United States Patent Application Publication US 2018/0126003 A1 - sequence listing, part 110

SEQ ID NO: 194675 - DNA, 1350 bp, Artificial Sequence
  derived and/or modified sequence
atggctagcgcgctcagacctcccagggtccccaaacccaagggagtcctgccttcccactactacgagtccttcctggagaagaagggcccatgtgacagagactataaaaagttttgggctggcctgcaaggcctgaccatctacttttacaattccaacagagacttccagcatgtggaaaagctaaatctaggcgctttcgaaaaactgacagacgagattccgtggggctcatcacgggatcccggaacacatttttccctcattctgcgcgatcaagagataaagttcaaggtagagaccttggaatgcagagaaatgtggaagggattcatcctcactgtggtggagctgagggtaccaacagatctaaccttgttgccagggcatctttatatgatgtcagaagttttggctaaagaggaggcgagaagagccttggaaacaccatcttgtttcctgaaagtgtccaggctggaggcccagcttctccttgaacggtatcctgagtgtgggaacttactactaagaccctcgggcgacggagccgatggggtgtcggtgacgacacggcaaatgcacaatgggactcacgtggttcgtcactacaaggtgaagcgagaagggccaaagtatgtcattgatgtggagcaacctttcagctgtacaagtctggatgctgtggtgaattattttgtgagccacactaaaaaggccttggtcccatttttgctcgacgaagattatgagaaggtgttaggatatgtcgaggccgacaaggaaaatggagagaacgtttgggtcgccccttctgctccaggacctgggccagccccatgtacaggcggacctaaacccttgagcccagcgtcatcccaggataaactccctccacttcctccactgcccaatcaagaggagaactatgtgacacctattggagacggacccgcagtggattacgagaatcaagatgtggctagctcatcctggccagtgattttaaaaccaaagaaactccctaagccgcctgctaagctgccaaaaccaccagtgggacctaagccagtcgagaagggattccatcacgttgcacaggccggactggagctcctcacttcatcagatccacctacctctgcatcgcaaagcgccggaatcaccggcgtgagtcaccacacgtggccccacctgagcagtctccctgaacccaaggtcttcaacggaggcctcggacgcaagctgcccgtgtcatctgcgcaacccttattcccgacagcgggactggctgatatgacagctgagctgcagaaaaaacttgaaaaaagacgtgccctggaacactag

SEQ ID NO: 194676 - DNA, 1536 bp, Artificial Sequence
  derived and/or modified sequence
gacacaggaaactcccctgaaacctgtttctcagcttcccggcccagctggggcacccactggaaggagaggccaggcggaagaccctggctccgtcatggcctctgccctgaggccaccccgtgtccccaagcctaagggtgtcctgccttcacactactatgagagctttctagagaagaaggggccctgtgaccgggattacaagaagttctgggcaggcctgcagggtctcaccatttatttctacaatagcaatcgggacttccagcacgtggagaagctcaacttgggagcatttgagaaactcacagatgagattccctggggaagctcacgtgaccctggcacccacttcagcctgattctccgggatcaggagatcaagttcaaggtagagaccttggagtgtcgggaaatgtggaaaggcttcatcttaacggtggtggagctccgtgtcccgaccgacttgaccctgcttcctgggcacctatacatgatgtctgaagtcttggccaaagaggaggcgcgccgtgcactggagacaccctcgtgcttcctgaaggtgagccggctggaggcacaactgctcctggagcgctaccccgagtgcgggaacctgctgctgcggcccagcggggacggcgccgacggcgtgtcggtcaccacgcggcagatgcacaacgggacgcacgtggtccggcattacaaggtgaagcgggagggccccaagtacgtgatcgatgtggaacagccgttctcttgcacctccctggacgccgtggtcaactatttcgtgtcgcataccaaaaaggcgctggtgccattcctgttagacgaggactacgagaaggtgctaggctacgtggaagccgataaggagaatggcgagaatgtgtgggtggcgccctccgctccgggcccaggtcctgcaccctgcacaggtggccccaagccgctgtcacctgcgtctagccaggacaagctgcccccactgcccccactaccgaaccaggaagagaactacgtgacccccattggagatggcccagctgttgactatgagaaccaagatgtggcttcctctagttggccagtcatcctgaagccaaagaagttgccaaagcctcctgccaagcttccaaagccacccgttggacccaagccagtagagaaggggtttcaccatgttgcccaggctggtctcgaactcctgacctcaagtgatccacccacctcagcctcccaaagtgctgggattaccggcgtgagccaccacacctggcctcatctgtcttctcttccagagcccaaagtctttaatggtggcttgggcaggaagctgccagtcagttcagcccagcctctcttccccacagccgggctggcagacatgacggcagagctacagaagaagctggagaagaggcgggcactggagcactgattcggacacaccagggaccagcgggctagtcccagggcatggcccagcggccagattctttttcccaggattaaaactctgaccccagg

SEQ ID NO: 194677 - DNA, 1350 bp, Artificial Sequence
  derived and/or modified sequence
atggccagcgccctgagaccccccagagtgcccaagcccaagggcgtgctgcccagccactactacgagagcttcctggagaagaagggcccctgcgacagagactacaagaagttctgggccggcctgcagggcctgaccatctacttctacaacagcaacagagacttccagcacgtggagaagctgaacctgggcgccttcgagaagctgaccgacgagatcccctggggcagcagcagagaccccggcacccacttcagcctgatcctgagagaccaggagatcaagttcaaggtggagaccctggagtgcagagagatgtggaagggcttcatcctgaccgtggtggagctgagagtgcccaccgacctgaccctgctgcccggccacctgtacatgatgagcgaggtgctggccaaggaggaggccagaagagccctggagacccccagctgcttcctgaaggtgagcagactggaggcccagctgctgctggagagataccccgagtgcggcaacctgctgctgagacccagcggcgacggcgccgacggcgtgagcgtgaccaccagacagatgcacaacggcacccacgtggtgagacactacaaggtgaagagagagggccccaagtacgtgatcgacgtggagcagcccttcagctgcaccagcctggacgccgtggtgaactacttcgtgagccacaccaagaaggccctggtgcccttcctgctggacgaggactacgagaaggtgctgggctacgtggaggccgacaaggagaacggcgagaacgtgtgggtggcccccagcgcccccggccccggccccgccccctgcaccggcggccccaagcccctgagccccgccagcagccaggacaagctgccccccctgccccccctgcccaaccaggaggagaactacgtgacccccatcggcgacggccccgccgtggactacgagaaccaggacgtggccagcagcagctggcccgtgatcctgaagcccaagaagctgcccaagccccccgccaagctgcccaagccccccgtgggccccaagcccgtggagaagggcttccaccacgtggcccaggccggcctggagctgctgaccagcagcgacccccccaccagcgccagccagagcgccggcatcaccggcgtgagccaccacacctggccccacctgagcagcctgcccgagcccaaggtgttcaacggcggcctgggcagaaagctgcccgtgagcagcgcccagcccctgttccccaccgccggcctggccgacatgaccgccgagctgcagaagaagctggagaagagaagagccctggagcactag

SEQ ID NO: 194678 - DNA, 258 bp, Artificial Sequence
  derived and/or modified sequence
atgctgctgaccatcgagaccaagagccactacgtggcccaggccggcctggagctgctggccagcagcgacccccccaccagcgccagccagagcgtgggcatcatcgacatgagccactgcacctggcccaccctgggcaagttcctgaaccccagcaagccccacttcagccccatcaccaagggcaaggacggcaacatcttccccaccaagttcctgagcgacgccctgaccgagctgagactgtgcacctag

SEQ ID NO: 194679 - DNA, 225 bp, Artificial Sequence
  derived and/or modified sequence
atgctgctgaccatcgagaccaagagccactacgtggcccaggccggcctggagctgctggccagcagcgacccccccaccagcgccagccagagcgtgggcatcatcgacatgagccactgcacctggcccaccctgggcaagttcctgaaccccagcaagccccacttcagccccatcaccaagggcaaggacggcaacatcttccccaccaagttcctgtag

SEQ ID NO: 194680 - DNA, 258 bp, Artificial Sequence
  derived and/or modified sequence
atgttactgaccatagaaactaagtcccactacgtggcacaggcagggttggaactcctggccagctcagatccccccacatcagcctctcaatccgtgggaattattgacatgtcccactgcacttggccgacgctggggaagtttctgaatccctcaaagcctcactttagccccattaccaaaggcaaggacggaaacatcttccctacaaagtttctcagcgatgccttgacagagctacgcctgtgtacttag

SEQ ID NO: 194681 - DNA, 225 bp, Artificial Sequence
  derived and/or modified sequence
atgcttcttacaattgaaactaagtcccactacgtggcacaggccggcttggaactcctggcctcctcagaccctcctacaagcgcgtcacagtctgtaggaattatcgacatgagccactgtacctggcctaccttaggcaagttcctgaatccctcaaagccccacttctcacccattactaaagggaaagacgggaatattttccccacgaaatttctgtag

SEQ ID NO: 194682 - DNA, 258 bp, Artificial Sequence
  derived and/or modified sequence
atgctcctgacaatcgagactaaaagccactacgtggcacaagccgggctggaactattggcatcctccgacccgcctaccagtgcgagtcagagcgtgggtatcattgacatgagccactgcacttggcccacattgggcaaatttctaaacccctccaaacctcatttctcacccatcacgaaaggaaaagacggcaacattttccccacgaaatttttgtccgacgcgctgacagagctgcgcctgtgtacctag

SEQ ID NO: 194683 - DNA, 258 bp, Artificial Sequence
  derived and/or modified sequence
atgttactgacaattgaaactaagtcccactatgtggcccaggctggcctcgagctgttggccagtagcgaccccccaacttcagctagtcagtcagtaggaatcatagacatgtctcactgcacatggcctacgctcgggaagtttttgaacccatctaagcctcatttttctccaattactaaaggcaaggatgggaatattttcccaaccaagtttctaagtgacgcgttaacagagctgcgtctctgcacctag

SEQ ID NO: 194684 - DNA, 1187 bp, Artificial Sequence
  derived and/or modified sequence
cacacaacggggtttcggggctgtggaccctgtgccaggaaaggaagggcgcagctcctgcaatgcggagcagccagggcagtgggcaccaggctttagcctccctttctcaccctacagagggcaggcccttcagctccattctcctccaaggctgcagagggggcaggaattgggggtgacaggagagctgtaaggtctccagtgggtcattctgggcccagagatgggtgctgaagctcccacgcctgcctgtgaaaatggagtcctctctcacctgggagagccaggtgctgccccgagaaggatgcatttatggcttcgtgaagtctttcctgacccccgatgctgctgactatagagacaaagtctcactatgttgctcaggctggtcttgaactcctggcctcaagcgatcctcccacctcagcctcccaaagtgttgggattatagacatgagccactgcacctggccgaccttgggcaagttcttaaacccttcaaagcctcatttttctccaatcacaaaagggaaagatggtaatattttccccaccaaattcttgtcggatgccctcacagaattgagattatgtacgtaaaacaccaggtgcctaacccggcacagagcaggagggctaagcgtgacatccagcacgtggtcagtggaatccagtattcctacccacctctctagtctcccctccacccctctccctttcagaggcaccaagctgcttgtggtcttgtctattcccactccctgcctgactgaacattttctccacctcctgatcatcagcagcagaaactggctgctcttcctcctgggtagacagccagactgtatttcccagctgcccctgcagtgagatgtggccatcggagccagcattggccaatggactctgcatgggagtgacgcatgctgcctccaggcttgtccctaaaacctcccacgtgtcctccgcctgctcttcccacctccaaggagcacggcaattgtggaagacccagattagtgatggcagaaccatagatgggaggaacctgggtccctgacttaaagtatcatggatttggatgttcccttagtgagaaataaacttccattgtgtttaagcctttatttgtttatagttggttacagcaactgccttcttttaattaaaacactcctgctgct

SEQ ID NO: 194685 - DNA, 590 bp, Artificial Sequence
  derived and/or modified sequence
ggggtttcggggctgtggaccctgtgccaggaaaggaagggcgcagctcctgcaatgcggagcagccagggcagtgggcaccaggctttagcctccctttctcaccctacagagggcaggcccttcagctccattctcctccaaggctgcagagggggcaggaattgggggtgacaggagagctgtaaggtctccagtgggtcattctgggcccagagatgggtgctgaagctcccacgcctgcctgtgaaaatggagtcctctttcacctgggagagccaggtgctgccccgagaaggatgcatttatggcttcgtgaagtctttcctgacccccgatgctgctgactatagagacaaagtctcactatgttgctcaggctggtcttgaactcctggcctcaagcgatcctcccacctcagcctcccaaagtgttgggattatagacatgagccactgcacctggccgaccttgggcaagttcttaaacccttcaaagcctcatttttctccaatcacaaaagggaaagatggtaatattttccccaccaaattcttgtaagtattaaacattgtatatgtattttgaa

SEQ ID NO: 194686 - DNA, 1107 bp, Artificial Sequence
  derived and/or modified sequence
tggaccctgtgccaggaaaggaagggcgcagctcctgcaatgcggagcagccagggcagtgggcaccaggctttagcctccctttctcaccctacagagggcaggcccttcagctccattctcctccaaggctgcagagggggcaggaattgggggtgacaggagagctgtaaggtctccagtgggtcattctgggcccagagatgggtgctgaagctcccacgcctgcctgtgaaaatggagtcctctttcacctgggagagccaggtgctgccccgagaaggatgcatttatggcttcgtgaagtctttcctgacccccgatgctgctgactatagagacaaagtctcactatgttgctcaggctggtcttgaactcctggcctcaagcgatcctcccacctcagcctcccaaagtgttgggattatagacatgagccactgcacctggccgaccttgggcaagttcttaaacccttcaaagcctcatttttctccaatcacaaaagggaaagatggtaatattttccccaccaaattcttgtcggatgccctcacagaattgagattatgtacgtaaaacaccaggtgcctaacccggcacagagcaggagggctaagcgtgacatccagcacgtggtcagtggaatccagtattcctacccacctctctagtctcccctccacccctctccctttcagaggcaccaagctgcttgtggtcttgtctattcccactccctgcctgactgaacattttctccacctcctgatcatcagcagcagaaactggctgctcttcctcctgggtagacagccagactgtatttcccagctgcccctgcagtgagatgtggccatcggagccagcattggccaatggactctgcatgggagtgacgcatgctgcctccaggcttgtctctaaaacctcccacgtgtcctccgcctgctcttcccacctccaaggagcacggcaattgtggaagacccagattagtgatggcagaaccatagatgggaggaacctgggtccctgacttaaagtatcatggatttggatgttcccttagtgagaaataaacttccattgtgtttaagccttta

SEQ ID NO: 194687 - DNA, 1124 bp, Artificial Sequence
  derived and/or modified sequence
caacggggtttcggggctgtggaccctgtgccaggaaaggaagggcgcagctcctgcaatgcggagcagccagggcagtgggcaccaggctttagcctccctttctcaccctacagagggcaggcccttcagctccattctcctccaaggctgcagagggggcaggaattgggggtgacaggagagctgtaaggtctccagtgggtcattctgggcccagagatgggtgctgaagctcccacgcctgcctgtgaaaatggagtcctctctcacctgggagagccaggtgctgccccgagaaggatgcatttatggcttcgtgaagtctttcctgacccccgatgctgctgactatagagacaaagtctcactatgttgctcaggctggtcttgaactcctggcctcaagcgatcctcccacctcagcctcccaaagtgttgggattatagacatgagccactgcacctggccgaccttgggcaagttcttaaacccttcaaagcctcatttttctccaatcacaaaagggaaagatggtaatattttccccaccaaattcttgtcggatgccctcacagaattgagattatgtacgtaaaacaccaggtgcctaacccggcacagagcaggagggctaagcgtgacatccagcacgtggtcagtggaatccagtattcctacccacctctctagtctcccctccacccctctccctttcagaggcaccaagctgcttgtggtcttgtctattcccactccctgcctgactgaacattttctccacctcctgatcatcagcagcagaaactggctgctcttcctcctgggtagacagccagactgtatttcccagctgcccctgcagtgagatgtggccatcggagccagcattggccaatggactctgcatgggagtgacgcatgctgcctccaggcttgtccctaaaacctcccacgtgtcctccgcctgctcttcccacctccaaggagcacggcaattgtggaagacccagattagtgatggcagaaccatagatgggaggaacctgggtccctgacttaaagtatcatggatttggatgttcccttagtgagaaataaacttccattgtgtttaagcctt

SEQ ID NO: 194688 - DNA, 258 bp, Artificial Sequence
  derived and/or modified sequence
atgctgctgaccatcgagaccaagagccactacgtggcccaggccggcctggagctgctggccagcagtgacccccccaccagcgccagccagagcgtgggcatcatcgacatgagccactgcacctggcccaccctgggcaagttcctgaaccccagcaagccccacttcagccccatcaccaagggcaaggatggcaacatcttccccaccaagttcctgagtgatgccctgacagagctgcggctgtgcacctag

SEQ ID NO: 194689 - DNA, 225 bp, Artificial Sequence
  derived and/or modified sequence
atgctgctgaccatcgagaccaagagccactacgtggcccaggccggcctggagctgctggccagcagtgacccccccaccagcgccagccagagcgtgggcatcatcgacatgagccactgcacctggcccaccctgggcaagttcctgaaccccagcaagccccacttcagccccatcaccaagggcaaggatggcaacatcttccccaccaagttcctgtag

SEQ ID NO: 194690 - DNA, 258 bp, Artificial Sequence
  derived and/or modified sequence
atgctgctgaccatcgagaccaagagccactacgtggcccaggccggactggagctgctggcaagctccgatcccccgaccagtgcaagccaatcagtgggaattattgacatgtcgcactgcacttggcctaccttaggcaagttcctgaacccgagcaaaccacacttctcccccatcaccaagggtaaagacggtaatatcttccccactaagtttttgagtgacgccctgaccgagcttaggctgtgtacctag

SEQ ID NO: 194691 - DNA, 225 bp, Artificial Sequence
  derived and/or modified sequence
atgctgctgaccatcgagaccaagagccactacgtggcccaggccggcctcgaacttctggcttcatccgacccaccaacttccgccagtcagtcagtaggaataatagacatgtctcactgcacctggccgactctcggtaaatttcttaacccgtcaaaaccccatttcagtcccataacaaagggaaaagacggaaacatcttccccaccaaattcctgtag

SEQ ID NO: 194692 - DNA, 258 bp, Artificial Sequence
  derived and/or modified sequence
atgctgctgaccatcgagaccaagagccactacgtggcccaggccggcctggagttactggcatcctccgacccaccaacaagcgcaagccagtcggtcgggatcattgacatgtcccattgtacctggcccaccctggggaagttcttgaatccaagtaagcctcacttctcacccatcaccaaaggcaaagacgggaacatattcccaaccaaatttctttctgacgcactcaccgagctaagattgtgtacttag

SEQ ID NO: 194693 - DNA, 258 bp, Artificial Sequence
  derived and/or modified sequence
atgctgctgaccatcgagaccaagagccactacgtggcccaggccggtctggaattactggctagctccgatcccccaactagcgcctctcagtccgtagggattattgatatgtcccactgtacctggcctactctgggcaagttcttgaaccccagtaagcctcacttcagtcccatcacaaagggaaaagacggaaacatattccctacgaaattccttagtgatgctctgactgagctgcgcctctgtacatag

SEQ ID NO: 194694 - DNA, 258 bp, Artificial Sequence
  derived and/or modified sequence
atgcttcttacaatcgagactaagtctcattacgtggctcaagctggcttagaactgcttgcctctagtgatccgcctacctccgctagccagtcagtgggcatcatagacatgagccactgcacttggcctacattgggtaaattcctcaatccctccaagccccacttctcccctatcaccaagggcaaagacggcaatatatttcctacgaaatttttgtctgatgcgctgaccgaactaaggctctgtacctag

SEQ ID NO: 194695 - DNA, 225 bp, Artificial Sequence
  derived and/or modified sequence
atgttgttaaccatagagaccaaaagccactacgtcgctcaggcaggattggagctgttagcatcatcggatcccccaaccagtgcctcccagagtgtcggtatcatcgatatgagtcactgcacctggccaacccttgggaagttcttgaacccaagcaaaccacattttagccccatcactaagggcaaagacgggaatatttttcctactaagttcctgtag

SEQ ID NO: 194696 - DNA, 258 bp, Artificial Sequence
  derived and/or modified sequence
atgcttctaactattgagacaaagagtcattatgtggcacaggcgggactcgaattactggcatcaagcgatccacctaccagcgcctctcagagcgtaggcattattgacatgtctcactgtacatggccaacattgggcaagttcctgaatccaagtaagccgcatttctccccaattacgaaaggcaaagatggcaatatctttccgaccaaattcctgagtgatgctctcacggaactgcgtttatgcacctag

SEQ ID NO: 194697 - DNA, 258 bp, Artificial Sequence
  derived and/or modified sequence
atgctcctgacgatcgagacaaagtcccactatgtggctcaggctggcctcgaactacttgcatcgtcagaccctcccacatccgcttctcagtccgtggggataattgatatgtcccactgcacttggccgacacttggcaagtttctgaatccctccaagccgcatttctcccctattacaaagggcaaggacggcaatatcttccctaccaaattcttatctgacgcactgactgaactccgtctgtgcacttag

SEQ ID NO: 194698 - protein, 951 aa, Artificial Sequence
  derived and/or modified sequence
MHKRKGPPGPPGRGAAAARQLGLLVDLSPDGLMIPEDGANDEELEAEFLALVGGQPPALEKLKGKGPLPMEAIEKMASLCMRDPDEDEEEGTDEDDLEADDDLLAELNEVLGEEQKASETPPPVAQPKPEAPHPGLETTLQERLALYQTAIESARQAGDSAKMRRYDRGLKTLENLLASIRKGNAIDEADIPPPVAIGKGPASTPTYSPAPTQPAPRIASAPEPRVTLEGPSATAPASSPGLAKPQMPPGPCSPGPLAQLQSRQRDYKLAALHAKQQGDTTAAARHFRVAKSFDAVLEALSRGEPVDLSCLPPPPDQLPPDPPSPPSQPPTPATAPSTTEVPPPPRTLLEALEQRMERYQVAAAQAKSKGDQRKARMHERIVKQYQDAIRAHKAGRAVDVAELPVPPGFPPIQGLEATKPTQQSLVGVLETAMKLANQDEGPEDEEDEVPKKQNSPVAPTAQPKAPPSRTPQSGSAPTAKAPPKATSTRAQQQLAFLEGRKKQLLQAALRAKQKNDVEGAKMHLRQAKGLEPMLEASRNGLPVDITKVPPAPVNKDDFALVQRPGPGLSQEAARRYGELTKLIRQQHEMCLNHSNQFTQLGNITETTKFEKLAEDCKRSMDILKQAFVRGLPTPTARFEQRTFSVIKIFPDLSSNDMLLFIVKGINLPTPPGLSPGDLDVFVRFDFPYPNVEEAQKDKTSVIKNTDSPEFKEQFKLCINRSHRGFRRAIQTKGIKFEVVHKGGLFKTDRVLGTAQLKLDALEIACEVREILEVLDGRRPTGGRLEVMVRIREPLTAQQLETTTERWLVIDPVPAAVPTQVAGPKGKAPPVPAPARESGNRSARPLHSLSVLAFDQERLERKILALRQARRPVPPEVAQQYQDIMQRSQWQRAQLEQGGVGIRREYAAQLERQLQFYTEAARRLGNDGSRDAAKEALYRRNLVESELQRLRR

SEQ ID NO: 194699 - protein, 371 aa, Artificial Sequence
  derived and/or modified sequence
MPPGPCSPGPLAQLQSRQRDYKLAALHAKQQGDTTAAARHFRVAKSFDAVLEALSRGEPVDLSCLPPPPDQLPPDPPSPPSQPPTPATAPSTTEVPPPPRTLLEALEQRMERYQVAAAQAKSKGDQRKARMHERIVKQYQDAIRAHKAGRAVDVAELPVPPGFPPIQGLEATKPTQQSLVGVLETAMKLANQDEGPEDEEDEVPKKQNSPVAPTAQPKAPPSRTPQSGSAPTAKAPPKATSTRAQQQLAFLEGRKKQLLQAALRAKQKNDVEGAKMHLRQAKGLEPMLEASRNGLPVDITKVPPAPVNKDDFALVQRPGPGLSQEAARRYGELTKLIRQQHEMCLNHSNQFTQLGNITETTKANMVKPCFY

SEQ ID NO: 194700 - DNA, 2856 bp, Artificial Sequence
  derived and/or modified sequence
atgcacaagcggaagggtcctccgggaccgccagggcgaggagcggcagcagcacgacagctgggattactggtcgacctgtcacccgacggcctgatgattcctgaagacggtgccaacgatgaggagctggaggctgaattcctggcactggtgggaggccaaccccctgcgctggagaaactcaaagggaagggccccctgcccatggaagccatcgagaagatggcctcactgtgtatgagagacccagacgaagacgaagaggagggaaccgacgaagatgacctggaggccgacgacgacctgctggcggagctgaatgaggttttaggtgaggagcagaaggccagcgaaaccccacctcccgtagcccaaccgaaacccgaggcaccccatcccgggttagaaaccacattacaagagcggctggccttataccagacggcaatcgagagcgcgcggcaagcgggagatagtgcgaagatgcgccgctatgatcgtggcctcaaaactctcgaaaacttgctggcaagcatccgtaagggaaacgcaatcgacgaggccgacatacctccccctgtggcaattggaaagggtcccgcaagcacccccacctatagccccgctcccactcagccggccccgagaatcgcatctgcacctgaaccccgtgtcacattggaaggacctagcgcgaccgcgcctgctagctcgcccggcttggccaagccccaaatgccacccggaccgtgcagtccaggccctctggcacagttacagagcaggcagcgggattacaaactggccgccttgcatgctaaacagcagggggatactaccgcagctgctcggcatttcagagtggcgaaatcattcgatgccgttctggaggccctctctcgcggggaaccggtggacttgagctgcctgcccccgccacccgatcagctgccccccgaccctccatccccccccagtcagcctccgacaccagctacagccccttcgaccaccgaagtccctccgcccccacgtaccctcctggaggccctggagcaaaggatggagcggtatcaagtggccgccgcacaggccaagtctaaaggtgaccagcgaaaggcacggatgcacgaacggatcgtaaaacagtatcaagacgccataagagctcataaggcaggtcgggcagtggacgttgccgagctgccagtaccccctggctttccccctatccagggactggaggccacaaaacctacccagcaaagcttggtaggggtccttgaaacggctatgaagctggccaatcaggacgagggcccagaagacgaagaggacgaggtcccgaagaagcagaattcacccgtcgcccccacagcccagccaaaggcgcccccgtccaggaccccccagagcggctccgcacccaccgctaaggcacctccaaaggccacgagcacccgggcccaacaacaactggccttcttggaaggtagaaagaagcaactgctgcaggccgcactgcgggctaaacagaagaacgacgttgaaggtgcaaagatgcatctaagacaagccaaagggcttgaaccaatgctggaggccagcaggaatgggctgcctgtggacattaccaaagtcccacctgcaccagtcaataaggacgattttgcccttgttcagcgacctggcccgggcttaagtcaagaggccgcccggcggtacggcgaattgacaaaattgatccggcagcagcacgagatgtgcctgaaccactcgaatcagtttacccagctgggtaatatcacagaaacaacgaagtttgaaaaactggctgaggactgtaagaggagcatggatatattgaagcaggcttttgtgaggggactgcccacgccaacggctcggttcgagcagaggactttttcagtcatcaaaatcttccctgacttgtcgagcaacgacatgctgctttttatagtgaaggggattaacctaccgactccacctggcttgtcacctggtgacctggacgtctttgtgaggtttgacttcccatacccgaacgtcgaagaggcgcagaaagataaaacctccgtcatcaagaatactgacagccccgaatttaaggaacaattcaaactgtgtatcaataggtctcaccgaggatttcgccgggcgatacaaactaaggggattaaatttgaagttgtgcacaaggggggcttgtttaagacagatagagtcctgggtacagcccaattgaagctcgacgcccttgagatcgcatgtgaggtccgcgagattctcgaggtgctagatgggaggaggccaaccggagggaggttagaggtgatggtacggattcgtgaaccactcacggcgcagcagctagagacgacgacggaacggtggttggttatcgaccccgtccctgccgcagtgcctacccaggtggccggcccaaaggggaaggcccccccggtgcccgcccccgcacgcgagtctggaaaccgcagtgcccggccattgcatagtctgtctgtgttggcctttgatcaggagcggctcgaacggaaaatactggctcttagacaagcgagaaggccagtgcctcccgaggtagcccaacagtatcaggatattatgcagcgatctcaatggcagcgggctcagctcgagcaaggaggcgtgggtattaggagggagtacgcggcacagctcgagcgacagctgcagttctacacagaggccgcccggcgactgggcaatgatgggtcccgcgatgccgccaaggaggcactgtatagacggaaccttgtggagtcggagctgcagagactgcgaaggtag

SEQ ID NO: 194701 - DNA, 2856 bp, Artificial Sequence
  derived and/or modified sequence
atgcacaagaggaaaggacctcctggccccccaggaagaggagctgctgctgcccggcagctgggcctgctggtggacctgagcccagatggcctgatgatcccagaagatggagccaatgatgaggagctggaggccgagttcctggccctggtgggcggccagcccccagccctggagaagctgaagggcaagggccccctgcccatggaggccatcgagaagatggccagcctgtgcatgagggaccctgatgaagatgaggaggagggcacagatgaagatgacctggaggctgatgatgacctgctggccgagctgaatgaggtgctgggggaggagcagaaggccagcgagaccccacctcctgtggcccagcccaagccagaggccccccaccctggcctggagaccaccctgcaggagcggctggccctgtaccagacagccattgaaagtgcccggcaggccggggacagcgccaagatgagaagatatgaccggggcctgaagaccctggagaacctgctggccagcatcagaaaaggaaatgccattgatgaagctgacatccccccacctgtggccatcggcaaaggacctgccagcacccccacctacagccctgcccccacccagcctgccccccgcatcgccagcgcccctgagccccgggtgaccctggagggccccagcgccacagccccagccagcagccctggcctggccaagccccagatgcctcctggcccctgcagccctggccccctggcccagctgcagagccggcagagggactacaagctggccgccctgcacgccaagcagcagggcgacaccacagctgctgcccggcacttccgggtggccaagagctttgatgctgtgctggaggccctgagcagaggagagcctgtggacctgagctgcctgcccccacctccagaccagctgcccccagacccccccagcccccccagccagccccccaccccagccacagcccccagcaccacagaggtgcccccaccacccaggaccctgctggaggccctggagcagaggatggagcgctaccaggtggccgccgcccaggccaagagcaaaggagaccagaggaaggccaggatgcatgaaagaattgtgaagcagtaccaggatgccatccgggcccacaaggccggccgggctgtggatgtggccgagctgcctgtgcccccaggcttcccccccatccagggcctggaggccaccaagcccacccagcagagcctggtgggcgtgctggagacagccatgaagctggccaaccaggatgagggcccagaagatgaggaggatgaggtgcccaagaagcagaacagccctgtggcccccacagcccagcccaaggccccacccagcaggaccccccagagcggcagcgcccccacagccaaggccccacccaaggccaccagcacccgggcccagcagcagctggccttcctggagggcaggaagaagcagctgctgcaggccgccctgcgggccaagcagaagaatgatgtggagggcgccaagatgcacctgcggcaggccaagggcctggagcccatgctggaggccagcagaaatggcctgcctgtggacatcaccaaggtgcccccagcccctgtgaacaaggatgactttgccctggtgcagaggcctggccctggcctgagccaggaggccgcccggcgctacggggagctgaccaagctgatccggcagcagcacgagatgtgcctgaaccacagcaaccagttcacccagctgggcaacatcacagagaccaccaagtttgagaagctggccgaggactgcaagaggtccatggacatcctgaagcaggcctttgtgcggggcctgcccacccccacagccaggtttgagcagaggaccttcagcgtcatcaagatcttcccagacctgagcagcaatgacatgctgctcttcatcgtgaagggcatcaacctgcccaccccacctggcctgagccctggggacctggatgtgtttgtgcgctttgacttcccctaccccaacgtggaggaggcccagaaggacaagaccagcgtcatcaagaacacagacagccctgagttcaaggagcagttcaagctgtgcatcaacagaagccaccggggcttccggcgggccatccagaccaagggcatcaagtttgaggtggtgcacaagggcggcctcttcaagacagacagagtgctgggcacagcccagctgaagctggatgccctggagatcgcctgtgaggtgcgggagatcctggaggtgctggatggaagaagacccaccggcggccgcctggaggtgatggtgcgcatccgggagcccctgacagcccagcagctggagaccaccacagagcgctggctggtgattgatcctgtgcctgctgctgtgcccacccaggtggccggccccaagggcaaggcccctcctgtgcctgccccagcccgggagagcggcaacagaagtgcccggcccctgcacagcctgtctgtgctggcctttgaccaggagcggctggagaggaagatcctggccctgcggcaggcccggcggcctgtgcccccagaggtggcccagcagtaccaggacatcatgcagaggagccagtggcagagggcccagctggagcagggcggcgtgggcatccggcgggagtatgctgcccagctggagcggcagctgcagttctacacagaagctgcccggcggctgggcaatgatggcagcagagatgctgccaaggaggccctgtacagaagaaacctggtggagagcgagctgcagaggctgcggaggtag

SEQ ID NO: 194702 - DNA, 2856 bp, Artificial Sequence
  derived and/or modified sequence
atgcacaagcggaagggcccccccggcccccccggccggggcgccgccgccgccagacagttaggactcctcgtggatctctcccctgatggcttaatgattcccgaggacggtgccaatgacgaggagctggaggcagagtttcttgcactggttggcgggcaaccacccgccctcgaaaagctgaaagggaaggggccgttgcccatggaggcgatcgagaaaatggcatcactctgcatgcgggaccccgatgaagatgaggaggagggcacagacgaagatgaccttgaagcagatgatgatctactcgccgaactgaatgaggtgttgggcgaagagcaaaaggcctccgagaccccgccgcctgtggcccagcctaagcccgaagctcctcacccagggctcgagactactctccaggaaaggcttgcgctgtatcagactgctatcgaatcagcgcggcaagccggtgattctgccaagatgcgaagatatgaccgagggctgaaaacactggagaacttactggcgagcatcagaaaagggaatgccattgacgaagctgatatcccaccccctgtcgccatcgggaagggcccagccagtacacccacgtattctccagcgcccacacagcccgcaccacgtatcgcgagtgctcccgagcctagagtgaccctggaagggccctcagccaccgcaccagcctcgtctccagggcttgccaagccccagatgcccccaggtccctgttcgcccgggccgctagcacaacttcaaagccgccagcgcgattacaagctcgcagccctgcatgctaaacagcagggtgacaccacagctgccgcccgtcactttcgggtggcaaaatctttcgatgccgtgctcgaagcactctctaggggtgaaccagtagatctgtcttgtctcccaccacctcctgaccagcttcccccagatcctccgagtcccccttcccagcctccgacaccagcaactgcgccctctacaacagaggtaccaccccctcctcgaaccctcctcgaagcactagagcagcggatggaaaggtatcaggtggcagctgcacaggcgaagtcaaaaggagatcagagaaaagcacgaatgcacgagcgtatcgtgaaacagtatcaggatgctatccgggctcataaggccggtagagccgtggatgttgccgaactaccggtgcctccgggttttccccccattcagggcttggaggccaccaagcctacccagcagtctctggtgggagtgctggaaaccgcgatgaaactggccaaccaggatgaggggcctgaggacgaggaagacgaagtcccgaaaaagcagaacagccctgttgccccaaccgcacagccaaaagctccaccatcaaggacacctcagagcggatcagcacctacagccaaggctccccccaaggctacttccacgagagcccagcaacagttggccttcctcgaggggcgcaaaaagcagctgctccaggccgctctgcgggcgaagcagaaaaatgatgttgaaggggcaaaaatgcacctccggcaggcaaagggcctcgaacctatgctggaagctagtcggaatggactgcctgttgatattaccaaggtgcccccagcgccagtcaacaaagatgatttcgccctcgttcagagacccggaccaggtttatctcaagaagcagcccgccgttatggagaactaactaagctgatccgacagcagcatgagatgtgcctgaatcacagtaatcagtttacacaactcggaaacatcactgagactaccaagttcgagaaactggcagaagattgcaagaggtctatggatatcttgaaacaagcattcgttagggggttgcctaccccaaccgccaggttcgaacaacggaccttcagtgtgataaagatctttccagacctgagctccaatgacatgttgttatttatagtgaaagggatcaacctgcccacgccacccggactgtctccaggcgacctcgatgtttttgtgcgttttgattttccctacccaaacgtcgaagaggctcaaaaagacaaaacatctgttattaaaaataccgattcccccgaattcaaggaacagtttaagctgtgcatcaaccggagccatcggggttttaggcgagcgatccagacaaagggtatcaaatttgaggtggtgcataaaggagggctcttcaaaaccgatagggtgctgggcaccgcccaactgaaactggacgctctcgagattgcctgcgaggtcagggaaattttggaggtgttggatgggaggagaccgacaggggggcgactggaggtgatggtccggatccgggaaccgctcacagctcagcagctggagactaccactgagcggtggcttgtgatcgatcccgtgcctgctgctgtcccaacccaagttgctgggccgaagggtaaggcaccaccggttccagccccagctagagaaagcgggaatcgcagcgcaagacctttacatagtctatcggtgctcgccttcgatcaggagcggctggagagaaagatcctcgcgctcaggcaagccaggagacctgtcccgcccgaagttgcgcagcagtatcaggacatcatgcaacgatcgcaatggcaacgggcacaactggagcaaggaggcgtgggtattcgccgcgaatatgcggcccagcttgaaagacaacttcaattctatacagaagccgcccgccgcctcggaaacgacgggagcagagacgcagccaaagaagctctttatcgccggaacctggtggaaagcgagctgcagaggcttagacgctag

SEQ ID NO: 194703 - DNA, 2856 bp, Artificial Sequence
  derived and/or modified sequence
atgcacaaaagaaagggcccacctggaccacctgggaggggagcagctgccgcaagacaattaggtttactagttgacttatcccccgacggtctcatgatccccgaagacggcgctaatgatgaggagctggaagcagaatttctggccctggtcggagggcagccccctgccctagaaaagttgaaagggaaggggcctttgcccatggaagccatcgaaaagatggcgagtttatgtatgagggacccagacgaggatgaggaagaagggacagatgaggacgatttagaagccgatgacgaccttttggccgagttaaatgaagtcctcggcgaagagcagaaggcctctgaaaccccacccccagtcgctcagccaaagcccgaagcgcctcatcccggtctggagaccacccttcaagagcgtctcgccctgtaccagactgccatcgaatctgctcggcaggccggtgactccgcaaaaatgcgcaggtacgataggggactaaagaccctggagaacctgctcgcttctattagaaaaggcaacgccatagatgaagcagatatccctcccccagttgctattggtaaggggcctgccagcaccccgacctactcccctgcccctacccagcccgcaccccgtatagcttctgccccagagccccgtgtcaccctggaggggccatcggcaaccgcgcctgctagctcacccggactggctaaacctcagatgccacctgggccttgttcacctggacctctggcccaattgcagtcgcgccaacgcgattacaaacttgccgcactgcatgccaaacagcagggcgataccaccgccgcagccagacatttccgtgtagcaaaatcgtttgatgccgtgttagaagccctttcccgcggtgaacccgtggacctaagctgtcttccaccaccaccagaccaactccctccggatcctcccagtccaccctctcaaccgcctacgccagcaacggctccctcaacaacagaggtccctcctccaccacgaacactactggaagcactggagcagcggatggaacggtatcaggttgcggcagcgcaggccaagtcgaaaggcgatcaacgcaaagcacgaatgcatgaacgtatagttaaacagtatcaggatgcaatcagggctcataaggctggacgcgcagtggacgttgcagaattaccagtcccacctgggtttcccccaattcaggggcttgaggccacaaagccaacccaacaatctttggtcggcgtacttgaaacggccatgaaactggcaaatcaagatgagggtccagaggacgaagaggatgaggtaccaaaaaaacaaaatagccctgtggctccgaccgctcagccaaaagcccctccatcccgtactccccagtccggcagtgccccaactgcgaaagcacccccaaaggccaccagcacccgcgctcaacagcagttagcattcctggaggggaggaagaagcagctactgcaagcggcattaagggccaagcaaaagaacgacgtggaaggggcaaagatgcacctgcgacaggcaaaaggcctagagccaatgctcgaggcctctcgaaatggcctcccagtggatattactaaggtacctccagcaccagttaacaaagatgactttgctctggttcagcgacctgggccaggtctctctcaggaggccgctcgtagatatggggagctgacgaaacttatccgacagcaacacgaaatgtgtctgaatcattcaaatcaattcacccaactcggaaatatcaccgaaacaaccaaatttgaaaagcttgcagaggactgtaagcgctctatggatatcctgaagcaggcgtttgtgaggggcttgccgacaccaacggcgcgattcgaacagcgcacctttagtgtgataaagatcttccccgatctatccagcaacgatatgcttcttttcattgttaagggcatcaatctacctaccccccctggtctctctcccggtgacctggatgtgtttgtgcgattcgacttcccttaccctaacgttgaagaagcccaaaaggataaaacctccgtcatcaagaatacagatagcccggagttcaaggagcagtttaaattgtgtataaatcgatctcatcgtggcttccgtagagcgatccagactaagggaattaagttcgaggttgttcacaaaggaggtttgtttaagacggaccgtgtgctgggcacagctcagcttaagctcgacgccctggaaatcgcatgtgaggttagggagatcctcgaggtgctggatgggaggcgaccaactggaggacgcttagaagtgatggttaggatcagagaacctcttaccgcgcagcaactggagaccactaccgagagatggctcgtgattgaccccgttcctgccgcagtgccaactcaggtagccggtccaaagggaaaagctcccccagtccctgctcctgcacgcgagtccggaaaccgtagtgctaggcctctccattctttgagtgtacttgcctttgaccaagagcgcctcgaacgaaaaatcctggctcttagacaggcacgacgcccagtgcctcctgaggtagcccagcagtatcaagacattatgcagcgaagccagtggcagcgcgcacagttggagcagggcggagttgggatccggagggaatacgccgctcagctcgagcgccagcttcagttctataccgaggctgccagacgtctgggcaacgatggttccagagacgcagccaaggaagccctctatcgccgtaacctggtcgagtccgagttgcagcgcctccggagatag

SEQ ID NO: 194704 - DNA, 3640 bp, Artificial Sequence
  derived and/or modified sequence
acagtcagcaccgccccagccaggcgcctgcgcgcccacgcactacctgccgggagttgtagtttcggctcggcagacccggcgagcccagtggccgcgctccggtgcggcggcgcccgaggcccgaggcggaagtgggacggccaagcagggaagcgagggctcgggatcgacggccgcggggcgccgacgaggagtgcaggactcaggaagggcgagtgcgcggcgacagagcccggggaaggaggcagggcaaggccgggcttgggggcaggtggtccgggcatccagccttgaagatgcacaagaggaaaggacccccgggacccccgggcagaggcgccgcggccgcccgccagctgggcctgctggttgacctctccccagatggcctgatgatccctgaggacggggctaacgatgaagaactggaggctgagttcttggctttggtcgggggccagcccccagccctggagaagctcaaaggcaaaggtcccttgccgatggaggccattgagaagatggccagcctgtgcatgagagacccggatgaggatgaggaggaggggacggatgaggacgacttggaggctgatgatgacctgctggcggagctaaatgaggtccttggagaggagcagaaggcttcagagaccccacctcctgtggcccagccgaagcctgaggcccctcatccggggctggagaccaccttgcaggagaggctggcgctctatcagacagcaattgaaagcgccagacaagctggagacagcgccaagatgcggcgctacgatcgggggcttaaaacactggaaaacctgctcgcctccatccgtaagggcaatgccattgacgaagcggacatcccgccgccagtggccataggaaaaggcccggcgtccacgcctacctacagccctgcacccacccagccggcccctagaatcgcgtcagccccagagcccagggtcaccctggagggaccttctgccaccgccccagcctcatctccaggcttggctaagccccagatgcccccaggtccctgcagccctggccctctggcccagttgcagagccgccagcgcgactacaagctggctgccctccacgccaagcagcagggagataccactgctgccgctagacacttccgcgtggctaagagctttgatgctgtcttggaggccctgagccggggtgagcccgtggacctctcctgcctgccccctccacccgaccagctgcccccagacccaccgtcaccaccgtcgcagcctccgacccccgctacggcgccctccacaacagaggtgcccccacccccgaggaccctgctggaggcgctggagcagcggatggagcggtaccaggtggccgcagcccaggccaagagcaagggggaccagcggaaagctcgaatgcacgagcgcatcgtcaagcaataccaagatgccatccgagcccacaaggctggccgagccgtggatgtcgctgaattgcccgtgcccccaggcttccccccaatccagggcctggaggccaccaagcccacccagcagagtctggtgggtgtcctggagactgccatgaagctggccaaccaggatgaaggcccagaggatgaagaggatgaggtgcctaagaagcagaacagccctgtggcccccacagcccagcccaaagccccaccctcaagaactccccagtcgggatcagccccaacagccaaagcgccccccaaagccacatccaccagagcccagcagcagctggccttcctagagggccgcaagaagcagctcctgcaggccgcactgcgagccaagcagaaaaacgacgtggagggtgccaagatgcacctgcgccaagccaagggactggagcctatgctggaggcctcgcgcaatgggctgcctgtggacatcaccaaggtgccgcctgcccctgtcaacaaggacgactttgccctggtccagcggcctggcccgggtctgtctcaggaggccgcccggcgctatggtgaactcaccaagctcatacggcagcagcacgagatgtgcctgaaccactcaaaccaattcacccagctgggcaacatcactgaaaccaccaagtttgaaaagttggcggaggactgtaagcggagcatggacattctgaagcaagccttcgtccggggtctccccacgcccaccgcccgctttgagcaaaggaccttcagcgtcatcaagatcttccctgacctcagcagcaacgacatgctcctcttcatcgtgaagggcatcaacttgcccacacccccaggactgtcccctggcgatctggatgtctttgttcggtttgacttcccctatcccaacgtggaagaagctcagaaagacaagaccagtgtgatcaagaacacagactcccctgagttcaaggagcagttcaaactctgcatcaaccgcagccaccgtggcttccgaagggccatccagaccaagggcatcaagttcgaagtggttcacaagggggggctgttcaagactgaccgggtgctggggacagcccagctgaagctggatgcactggagatagcatgtgaggtccgggagatccttgaggtcctggatggtcgccggcccacaggggggcgactggaggtaatggtccggattcgggagccactgacagcccagcagttggagacgacgacagagaggtggctggtcattgaccctgtgccggcagctgtgcccacacaggttgctgggcccaaagggaaggcccctcctgtgcctgcccctgcaagggagtcagggaacagatcagcccggcccctgcatagcctcagtgtgctggcgtttgaccaagagcgtctggagcggaagatcctggccctcaggcaggcgcggcggccggtgcccccagaagtggcccagcagtaccaggacatcatgcaacgcagccagtggcagagggcacagctggagcaggggggtgtgggcatccgacgggaatacgcagcccagctggagcggcagctgcagttctacacggaggctgcccggcgcctgggcaacgatggcagcagggatgctgcaaaggaggcgctctataggcggaatctggtagagagtgagctgcagcggctccgcaggtgaggagcccatggggcgggcagcccccagaaagcgggcagcaggccccgataccgggaagagccgacacagccacgaaccagacaagcagacaatcagcggacaatcggttctggactcacccctcatccgggcccccagccccgccagagcctccgtggctgcgggtgttgggaaccatgcctgccagccagtatgtgcccctcacccaggcctggctgggccctggagagtcctgtttgcacagcccaggggtgtccggcctctggcccgccccggagcagggagggtggctggggccaagccccgagggcccctgcaagcactttacttcctgttcctccccagccttaaccccaaagccctcctgcaccccaaagaagccactgaggctggccgagccacactgtctccccaggggcgtcgacctggcccagctgggtccccagggccagcacatggaataaaatagccagggccacactcag

SEQ ID NO: 194705 - DNA, 3266 bp, Artificial Sequence
  derived and/or modified sequence
tggcactccccagatggcctgatgatccctgaggacggggctaacgatgaagaactggaggctgagttcttggctttggtcgggggccagcccccagccctggagaagctcaaaggcaaaggtcccttgccgatggaggccattgagaagatggccagcctgtgcatgagagacccggatgaggatgaggaggaggggacggatgaggacgacttggaggctgatgatgacctgctggcggagctaaatgaggtccttggagaggagcagaaggcttcagagaccccacctcctgtggcccagccgaagcctgaggcccctcatccggggctggagaccaccttgcaggagaggctggcgctctatcagacagcaattgaaagcgccagacaagctggagacagcgccaagatgcggcgctacgatcgggggcttaaaacactggaaaacctgctcgcctccatccgtaagggcaatgccattgacgaagcggacatcccgccgccagtggccataggaaaaggcccggcgtccacgcctacctacagccctgcacccacccagccggcccctagaatcgcgtcagccccagagcccagggtcaccctggagggaccttctgccaccgccccagcctcatctccaggcttggctaagccccagatgcccccaggtccctgcagccctggccctctggcccagttgcagagccgccagcgcgactacaagctggctgccctccacgccaagcagcagggagataccactgctgccgctagacacttccgcgtggctaagagctttgatgctgtcttggaggccctgagccggggtgagcccgtggacctctcctgcctgccccctccacccgaccagctgcccccagacccaccgtcaccaccgtcgcagcctccgacccccgctacggcgccctccacaacagaggtgcccccacccccgaggaccctgctggaggcgctggagcagcggatggagcggtaccaggtggccgcagcccaggccaagagcaagggggaccagcggaaagctcgaatgcacgagcgcatcgtcaagcaataccaagatgccatccgagcccacaaggctggccgagccgtggatgtcgctgaattgcccgtgcccccaggcttccccccaatccagggcctggaggccaccaagcccacccagcagagtctggtgggtgtcctggagactgccatgaagctggccaaccaggatgaaggcccagaggatgaagaggatgaggtgcctaagaagcagaacagccctgtggcccccacagcccagcccaaagccccaccctcaagaactccccagtcgggatcagccccaacagccaaagcgccccccaaagccacatccaccagagcccagcagcagctggccttcctagagggccgcaagaagcagctcctgcaggccgcactgcgagccaagcagaaaaacgacgtggagggtgccaagatgcacctgcgccaagccaagggactggagcctatgctggaggcctcgcgcaatgggctgcctgtggacatcaccaaggtgccgcctgcccctgtcaacaaggacgactttgccctggtccagcggcctggcccgggtctgtctcaggaggccgcccggcgctatggtgaactcaccaagctcatacggcagcagcacgagatgtgcctgaaccactcaaaccaattcacccagctgggcaacatcactgaaaccaccaagtttgaaaagttggcggaggactgtaagcggagcatggacattctgaagcaagccttcgtccggggtctccccacgcccaccgcccgctttgagcaaaggaccttcagcgtcatcaagatcttccctgacctcagcagcaacgacatgctcctcttcatcgtgaagggcatcaacttgcccacacccccaggactgtcccctggcgatctggatgtctttgttcggtttgacttcccctatcccaacgtggaagaagctcagaaagacaagaccagtgtgatcaagaacacagactcccctgagttcaaggagcagttcaaactctgcatcaaccgcagccaccgtggcttccgaagggccatccagaccaagggcatcaagttcgaagtggttcacaagggggggctgttcaagactgaccgggtgctggggacagcccagctgaagctggatgcactggagatagcatgtgaggtccgggagatccttgaggtcctggatggtcgccggcccacaggggggcgactggaggtaatggtccggattcgggagccactgacagcccagcagttggagacgacgacagagaggtggctggtcattgaccctgtgccggcagctgtgcccacacaggttgctgggcccaaagggaaggcccctcctgtgcctgcccctgcaagggagtcagggaacagatcagcccggcccctgcatagcctcagtgtgctggcgtttgaccaagagcgtctggagcggaagatcctggccctcaggcaggcgcggcggccggtgcccccagaagtggcccagcagtaccaggacatcatgcaacgcagccagtggcagagggcacagctggagcaggggggtgtgggcatccgacgggaatacgcagcccagctggagcggcagctgcagttctacacggaggctgcccggcgcctgggcaacgatggcagcagggatgctgcaaaggaggcgctctataggcggaatctggtagagagtgagctgcagcggctccgcaggtgaggagcccatggggcgggcagcccccagaaagcgggcagcaggccccgataccgggaagagccgacacagccacgaaccagacaagcagacaatcagcggacaatcggttctggactcacccctcatccgggcccccagccccgccagagcctccgtggctgcgggtgttgggaaccatgcctgccagccagtatgtgcccctcacccaggcctggctgggccctggagagtcctgtttgcacagcccaggggtgtccggcctctggcccgccccggagcagggagggtggctggggccaagccccgagggcccctgcaagcactttacttcctgttcctccccagccttaaccccaaagccctcctgcaccccaaagaagccactgaggctggccgagccacactgtctccccaggggcgtcgacctggcccagctgggtccccagggccagcacatggaataaaatagccagggccacactcag

SEQ ID NO: 194706 - DNA, 2856 bp, Artificial Sequence
  derived and/or modified sequence
atgcacaagagaaagggcccccccggcccccccggcagaggcgccgccgccgccagacagctgggcctgctggtggacctgagccccgacggcctgatgatccccgaggacggcgccaacgacgaggagctggaggccgagttcctggccctggtgggcggccagccccccgccctggagaagctgaagggcaagggccccctgcccatggaggccatcgagaagatggccagcctgtgcatgagagaccccgacgaggacgaggaggagggcaccgacgaggacgacctggaggccgacgacgacctgctggccgagctgaacgaggtgctgggcgaggagcagaaggccagcgagacccccccccccgtggcccagcccaagcccgaggccccccaccccggcctggagaccaccctgcaggagagactggccctgtaccagaccgccatcgagagcgccagacaggccggcgacagcgccaagatgagaagatacgacagaggcctgaagaccctggagaacctgctggccagcatcagaaagggcaacgccatcgacgaggccgacatccccccccccgtggccatcggcaagggccccgccagcacccccacctacagccccgcccccacccagcccgcccccagaatcgccagcgcccccgagcccagagtgaccctggagggccccagcgccaccgcccccgccagcagccccggcctggccaagccccagatgccccccggcccctgcagccccggccccctggcccagctgcagagcagacagagagactacaagctggccgccctgcacgccaagcagcagggcgacaccaccgccgccgccagacacttcagagtggccaagagcttcgacgccgtgctggaggccctgagcagaggcgagcccgtggacctgagctgcctgccccccccccccgaccagctgccccccgacccccccagcccccccagccagccccccacccccgccaccgcccccagcaccaccgaggtgccccccccccccagaaccctgctggaggccctggagcagagaatggagagataccaggtggccgccgcccaggccaagagcaagggcgaccagagaaaggccagaatgcacgagagaatcgtgaagcagtaccaggacgccatcagagcccacaaggccggcagagccgtggacgtggccgagctgcccgtgccccccggcttcccccccatccagggcctggaggccaccaagcccacccagcagagcctggtgggcgtgctggagaccgccatgaagctggccaaccaggacgagggccccgaggacgaggaggacgaggtgcccaagaagcagaacagccccgtggcccccaccgcccagcccaaggccccccccagcagaaccccccagagcggcagcgcccccaccgccaaggccccccccaaggccaccagcaccagagcccagcagcagctggccttcctggagggcagaaagaagcagctgctgcaggccgccctgagagccaagcagaagaacgacgtggagggcgccaagatgcacctgagacaggccaagggcctggagcccatgctggaggccagcagaaacggcctgcccgtggacatcaccaaggtgccccccgcccccgtgaacaaggacgacttcgccctggtgcagagacccggccccggcctgagccaggaggccgccagaagatacggcgagctgaccaagctgatcagacagcagcacgagatgtgcctgaaccacagcaaccagttcacccagctgggcaacatcaccgagaccaccaagttcgagaagctggccgaggactgcaagagaagcatggacatcctgaagcaggccttcgtgagaggcctgcccacccccaccgccagattcgagcagagaaccttcagcgtgatcaagatcttccccgacctgagcagcaacgacatgctgctgttcatcgtgaagggcatcaacctgcccaccccccccggcctgagccccggcgacctggacgtgttcgtgagattcgacttcccctaccccaacgtggaggaggcccagaaggacaagaccagcgtgatcaagaacaccgacagccccgagttcaaggagcagttcaagctgtgcatcaacagaagccacagaggcttcagaagagccatccagaccaagggcatcaagttcgaggtggtgcacaagggcggcctgttcaagaccgacagagtgctgggcaccgcccagctgaagctggacgccctggagatcgcctgcgaggtgagagagatcctggaggtgctggacggcagaagacccaccggcggcagactggaggtgatggtgagaatcagagagcccctgaccgcccagcagctggagaccaccaccgagagatggctggtgatcgaccccgtgcccgccgccgtgcccacccaggtggccggccccaagggcaaggccccccccgtgcccgcccccgccagagagagcggcaacagaagcgccagacccctgcacagcctgagcgtgctggccttcgaccaggagagactggagagaaagatcctggccctgagacaggccagaagacccgtgccccccgaggtggcccagcagtaccaggacatcatgcagagaagccagtggcagagagcccagctggagcagggcggcgtgggcatcagaagagagtacgccgcccagctggagagacagctgcagttctacaccgaggccgccagaagactgggcaacgacggcagcagagacgccgccaaggaggccctgtacagaagaaacctggtggagagcgagctgcagagactgagaagatag

SEQ ID NO: 194707 - protein, 659 aa, Artificial Sequence
  derived and/or modified sequence
MQGSSLWLSLTFRSARVLSRARFFEWQSPGLPNTAAMENGTGPYGEERPREVQETTVTEGAAKIAFPSANEVFYNPVQEFNRDLTCAVITEFARIQLGAKGIQIKVPGEKDTQKVVVDLSEQEEEKVELKESENLASGDQPRTAAVGEICEEGLHVLEGLAASGLRSIRFALEVPGLRSVVANDASTRAVDLIRRNVQLNDVAHLVQPSQADARMLMYQHQRVSERFDVIDLDPYGSPATFLDAAVQAVSEGGLLCVTCTDMAVLAGNSGETCYSKYGAMALKSRACHEMALRIVLHSLDLRANCYQRFVVPLLSISADFYVRVFVRVFTGQAKVKASASKQALVFQCVGCGAFHLQRLGKASGVPSGRAKFSAACGPPVTPECEHCGQRHQLGGPMWAEPIHDLDFVGRVLEAVSANPGRFHTSERIRGVLSVITEELPDVPLYYTLDQLSSTIHCNTPSLLQLRSALLHADFRVSLSHACKNAVKTDAPASALWDIMRCWEKECPVKRERLSETSPAFRILSVEPRLQANFTIREDANPSSRQRGLKRFQANPEANWGPRPRARPGGKAADEAMEERRRLLQNKRKEPPEDVAQRAARLKTFPCKRFKEGTCQRGDQCCYSHSPPTPRVSADAAPDCPETSNQTPPGPGAAAGPGID

SEQ ID NO: 194708 - DNA, 1980 bp, Artificial Sequence
  derived and/or modified sequence
atgcagggcagcagcctgtggctgagcctgaccttcagaagcgccagagtgctgagcagagccagattcttcgagtggcagagccccggcctgcccaacaccgccgccatggagaacggcaccggcccctacggcgaggagagacccagagaggtgcaggagaccaccgtgaccgagggcgccgccaagatcgccttccccagcgccaacgaggtgttctacaaccccgtgcaggagttcaacagagacctgacctgcgccgtgatcaccgagttcgccagaatccagctgggcgccaagggcatccagatcaaggtgcccggcgagaaggacacccagaaggtggtggtggacctgagcgagcaggaggaggagaaggtggagctgaaggagagcgagaacctggccagcggcgaccagcccagaaccgccgccgtgggcgagatctgcgaggagggcctgcacgtgctggagggcctggccgccagcggcctgagaagcatcagattcgccctggaggtgcccggcctgagaagcgtggtggccaacgacgccagcaccagagccgtggacctgatcagaagaaacgtgcagctgaacgacgtggcccacctggtgcagcccagccaggccgacgccagaatgctgatgtaccagcaccagagagtgagcgagagattcgacgtgatcgacctggacccctacggcagccccgccaccttcctggacgccgccgtgcaggccgtgagcgagggcggcctgctgtgcgtgacctgcaccgacatggccgtgctggccggcaacagcggcgagacctgctacagcaagtacggcgccatggccctgaagagcagagcctgccacgagatggccctgagaatcgtgctgcacagcctggacctgagagccaactgctaccagagattcgtggtgcccctgctgagcatcagcgccgacttctacgtgagagtgttcgtgagagtgttcaccggccaggccaaggtgaaggccagcgccagcaagcaggccctggtgttccagtgcgtgggctgcggcgccttccacctgcagagactgggcaaggccagcggcgtgcccagcggcagagccaagttcagcgccgcctgcggcccccccgtgacccccgagtgcgagcactgcggccagagacaccagctgggcggccccatgtgggccgagcccatccacgacctggacttcgtgggcagagtgctggaggccgtgagcgccaaccccggcagattccacaccagcgagagaatcagaggcgtgctgagcgtgatcaccgaggagctgcccgacgtgcccctgtactacaccctggaccagctgagcagcaccatccactgcaacacccccagcctgctgcagctgagaagcgccctgctgcacgccgacttcagagtgagcctgagccacgcctgcaagaacgccgtgaagaccgacgcccccgccagcgccctgtgggacatcatgagatgctgggagaaggagtgccccgtgaagagagagagactgagcgagaccagccccgccttcagaatcctgagcgtggagcccagactgcaggccaacttcaccatcagagaggacgccaaccccagcagcagacagagaggcctgaagagattccaggccaaccccgaggccaactggggccccagacccagagccagacccggcggcaaggccgccgacgaggccatggaggagagaagaagactgctgcagaacaagagaaaggagccccccgaggacgtggcccagagagccgccagactgaagaccttcccctgcaagagattcaaggagggcacctgccagagaggcgaccagtgctgctacagccacagcccccccacccccagagtgagcgccgacgccgcccccgactgccccgagaccagcaaccagaccccccccggccccggcgccgccgccggccccggcatcgactag

SEQ ID NO: 194709 - DNA, 1980 bp, Artificial Sequence
  derived and/or modified sequence
atgcaggggagcagcctgtggctgtccttgaccttcagatcagccagagtgctttctcgcgcccgcttcttcgaatggcagtctcctggcttacccaacaccgctgccatggagaatggtaccggcccttacggtgaagagaggccacgggaggtgcaggagaccaccgtgaccgagggggccgcaaaaatcgcctttccaagtgccaatgaggtgttttacaatcctgtgcaggagttcaatcgggacctcacttgtgccgtcattaccgagttcgcccgaatccagctgggtgcaaagggcattcagattaaggtgcctggagagaaggatacccagaaagttgtggtggatctcagcgaacaggaggaggagaaagttgagctgaaggagtctgagaacttagcaagcggagatcagccacgcactgctgctgtcggagagatctgcgaggaaggcctccatgttctggaaggcctggccgcaagtggactccgaagcatcagattcgcactggaggtcccggggctgcgtagtgttgtcgcgaacgatgcctccacacgcgcggttgatctgatccgacgaaatgtccagctaaatgacgtggcccacctagtgcagccctcccaggccgatgccaggatgttaatgtaccagcaccagagagtgtccgaacgcttcgatgtcattgaccttgacccatatggatctcccgccacctttctggatgctgccgtgcaagctgtgtcagagggaggactgctgtgcgtaacatgtacagatatggcggttttggcaggtaattctggtgaaacttgctattcgaagtacggagccatggccctcaagtctagggcatgtcatgagatggcactgaggatcgtactgcattccctcgacctccgagcaaattgttatcagagattcgtcgtgccactcctcagcatcagtgccgacttctacgtgagggtgttcgtccgagtgttcacaggccaagcgaaagtgaaggcctccgcatctaagcaggcgcttgtatttcagtgtgtcggctgtggcgcatttcatctgcagcggctgggaaaggcaagtggtgttcctagtgggcgcgctaagttttctgccgcatgtggacctcctgtgactcccgagtgtgaacactgcggccaaagacaccagctgggcggaccgatgtgggctgaaccaatccacgatctggatttcgttggtagagtcctcgaggcggtttctgcgaatcccggtcgtttccatacctcggagagaatccgcggagttctcagcgttataaccgaagagctaccagacgtgcctctttattataccttggaccagttgtcctccaccattcattgtaacacaccgtcgctcctccagctgagatccgctctgcttcacgctgactttcgagtgagtctcagtcatgcatgcaaaaacgcagtcaagacagacgctccggcatccgccttatgggacattatgcgctgctgggaaaaagaatgtccggtgaagcgagaacgcttatcggagacaagtcctgctttccgcatactgagtgtcgagcctagactgcaggccaacttcactataagagaggatgccaacccatctagccggcagaggggtctgaaaagatttcaggccaaccctgaagcgaactggggaccacgaccccgtgcccggccgggcggaaaagcggctgatgaggccatggaggagaggaggcggctattacaaaacaagaggaaggagccgcctgaggacgtcgcccagcgggccgcacgcctcaagacattcccatgtaagcggtttaaggaggggacgtgtcagcgcggcgaccagtgctgctactcccatagtcctcctaccccaagagtatccgcggatgccgctccagactgcccggaaactagcaaccagacaccaccaggcccaggtgccgccgccggccctgggatcgactag

SEQ ID NO: 194710 - DNA, 1980 bp, Artificial Sequence
  derived and/or modified sequence
atgcagggcagtagcctgtggctgtcattgacattcagatcagcgagggttctgtcgagagcacgctttttcgaatggcaatctcccggactcccaaatactgccgctatggagaacgggacgggaccctacggcgaggagaggcctagggaggtgcaggaaacaacagttacagaaggcgctgctaaaattgcctttccgtctgccaacgaagtgttctataatcccgttcaggaattcaatcgggatttgacctgcgccgtgatcacagagttcgctcggattcagttaggcgccaaaggaattcagatcaaagtacctggcgagaaggatacccagaaggtggttgtggatttgtcggagcaggaggaggaaaaggtcgagctcaaggagagcgagaaccttgcctctggcgatcagccacggacagctgctgtgggagaaatttgcgaagagggacttcatgtgctcgagggtttggcagcctctgggctcaggagcataaggttcgcactcgaagtgcctgggctgcggagcgtggtcgcgaatgacgccagcacccgggcagtcgatcttatccgaaggaatgtacagctgaacgatgtagcccatctcgtacagcccagccaagccgatgcacgaatgctcatgtaccagcatcagagggttagcgagcgcttcgatgtgatagacctcgacccatatggttctcctgctaccttccttgatgctgctgtgcaagcagtgtcagagggaggcctactgtgcgtcacatgcacggatatggctgttcttgctggcaattccggagaaacttgctactctaaatatggggccatggccttgaagtcaagggcttgtcacgagatggccctgcgaatcgtcttacattcccttgatctgcgcgccaactgttaccaaaggttcgtcgtgccgctcctaagtatttcagccgacttctacgtgagagtctttgtgagggttttcactggtcaggccaaggtgaaggccagcgcaagcaagcaagcactggtctttcagtgtgtaggatgcggagcgttccacttgcaacgactgggcaaggcatccggcgttccatctggacgggccaaattctctgccgcatgcgggccccccgtcacaccagaatgcgagcactgtggccagaggcaccagctcggggggccaatgtgggccgagcctatacatgacctggatttcgtcggcagggttctggaggctgtgtctgccaatcccgggcggtttcacacaagtgagcgaatccgcggggtgctctctgtcattaccgaggagttgcccgatgtcccactgtactatacgctggaccagttgtcttcaacaattcactgtaacacgccaagccttcttcagttgagaagcgctcttctccacgccgactttcgtgtctctttgagtcatgcttgtaaaaatgccgtgaagactgatgcacctgcatcagcactctgggacattatgaggtgctgggagaaggagtgccccgtgaaaagggaaaggcttagcgaaacatcccctgcatttcggatcctatcggttgaaccgaggctgcaggccaactttaccataagagaggacgctaatccaagttccagacaacgcgggctgaaacgctttcaggccaatcctgaggctaactgggggcctcgcccaagggctaggccggggggcaaggctgcagatgaagctatggaggaaagacggcgtctgcttcagaataagaggaaggaaccacccgaagatgtggcccagcgcgcagcaaggctgaagacctttccatgcaagcgatttaaagaaggcacttgtcaaagaggggatcagtgctgttattctcattcccctcctactccacgggtctctgccgatgcggcccctgactgtcccgaaacctctaaccagacgccgcccggacctggagcagcggctggacctgggatagactag

SEQ ID NO: 194711 - DNA, 1980 bp, Artificial Sequence
  derived and/or modified sequence
atgcagggcagcagcctgtggctgagcctgaccttccgcagcgcccgggtgctgagccgggcccgcttctttgagtggcagagccctggcctgcccaacacagctgccatggagaatggaacaggcccctacggggaggagcggccccgggaggtgcaggagaccaccgtgacagagggcgccgccaagatcgccttccccagcgccaatgaggtgttctacaaccctgtgcaggagttcaacagagacctgacctgtgctgtgatcacagaatttgcccgcatccagctgggcgccaagggcatccagatcaaggtgcctggagagaaggacacccagaaggtggtggtggacctgtctgagcaggaggaggagaaggtggagctgaaggagagcgagaacctggccagcggggaccagcccaggacagctgctgtgggggagatctgtgaggagggcctgcacgtgctggagggcctggccgccagcggcctgcggagcatccgctttgccctggaggtgcccggcctgcggtctgtggtggccaatgatgccagcaccagggctgtggacctgatcagaagaaatgtgcagctgaatgatgtggcccacctggtgcagcccagccaggctgatgccaggatgctgatgtaccagcaccagagggtgtctgaaagatttgatgtgattgacctggacccctacggcagccctgccaccttcctggatgctgctgtgcaggccgtgtctgagggcggcctgctgtgtgtgacctgcacagacatggctgtgctggccggcaacagcggggagacctgctacagcaaatatggagccatggccctgaagagccgggcctgccacgagatggccctgcgcatcgtgctgcacagcctggacctgcgggccaactgctaccagagatttgtggtgcccctgctgagcatctctgctgacttctacgtgcgggtgtttgtgcgggtcttcaccggccaggccaaggtgaaggccagcgccagcaagcaggccctggtgttccagtgtgtgggctgtggggccttccacctgcagaggctgggcaaggccagcggcgtgcccagcggccgggccaagttctctgctgcctgtggcccccctgtgaccccagaatgtgagcactgcggccagaggcaccagctgggcggccccatgtgggccgagcccatccatgacctggactttgtgggccgggtgctggaggccgtgtctgccaaccctggccgcttccacaccagcgagcgcatccggggcgtgctgagcgtcatcacagaggagctgcctgatgtgcccctgtactacaccctggaccagctgagcagcaccatccactgcaacacccccagcctgctgcagctgcggagcgccctgctgcacgccgacttccgggtgtccctgagccacgcctgcaagaatgctgtgaagacagatgccccagccagcgccctgtgggacatcatgcgctgctgggagaaggaatgtcctgtgaagcgggagcggctgtctgagaccagccctgccttccgcatcctgtctgtggagccccggctgcaggccaacttcaccatcagagaagatgccaaccccagcagccggcagaggggcctgaagcgcttccaggccaaccctgaggccaactggggcccccggccccgggcccggcctgggggcaaggccgcagatgaggccatggaggagcggcggcggctgctgcagaacaagaggaaggagcccccagaagatgtggcccagagagctgcccggctgaagaccttcccctgcaagcgcttcaaggagggcacctgccagagaggagaccagtgctgctacagccacagcccccccaccccccgggtgtctgcagatgctgccccagactgcccagagaccagcaaccagaccccacctggccctggagctgctgctggccctggcatcgactag

SEQ ID NO: 194712 - DNA, 1980 bp, Artificial Sequence
  derived and/or modified sequence
atgcagggcagcagcctgtggctgagcctgaccttccggagcgcccgggttctctcgagagcccgcttcttcgaatggcagagtcctgggcttcccaacacagccgccatggagaacggtaccggaccttacggggaggaacgccctcgcgaggtccaggaaaccacagtgacagagggagccgccaaaattgcattcccttcagcaaacgaagtcttctacaaccccgtgcaggagtttaacagggatctgacatgcgccgtcatcaccgagtttgcacggattcagctgggcgcaaagggtattcagattaaggtgccaggcgagaaggatacacagaaggtcgtggtagacctctccgaacaggaagaagaaaaagttgaactgaaagaaagtgagaacttagccagtggcgatcaacctcgtaccgcggcagtcggggaaatatgcgaggaaggactgcacgtccttgagggcctggcagcctccggcctgagatccatccgattcgcgctcgaagtgccagggttgcgatccgtagtcgcaaacgacgcgtccaccagagccgtcgatttgattcgccgcaatgtccagctcaacgatgttgcccaccttgttcagccatcacaagctgacgccagaatgctgatgtaccagcatcagagagtaagcgaacgcttcgacgtcattgacctggatccctatggttcgcccgcaacctttctggacgctgccgtgcaggcggtgtccgaaggaggattactatgtgttacctgtacagacatggccgttctcgccggcaatagcggagaaacatgctactcaaagtacggcgcgatggctctgaaaagccgtgcatgccatgaaatggctctgcgcatcgtgttacattcacttgacctgagggctaattgttatcagcggtttgtggtcccactgcttagcattagtgcggacttctatgtacgagtgttcgtgagggtatttactggacaagcgaaggtgaaagcatccgccagcaaacaggccctcgtgttccaatgtgtgggttgcggcgctttccatctacaacgactgggtaaagcgtccggggtgccgagcggtcgggccaagtttagtgccgcttgcgggccccccgtgacccctgagtgcgagcattgtggccagagacaccagctcggtgggcccatgtgggctgaacccatccacgacctggacttcgtaggacgggtgctggaggccgtgtctgctaatcctggccggtttcataccagcgagcggattcgcggggtacttagcgtgattaccgaggaactgcctgatgtacccttgtactatactttggatcagctgtcaagtacgatccattgcaacactccgagcttgctgcagctaagaagtgctctcctacatgccgatttccgcgtgtcactcagtcacgcctgtaagaacgcggtgaagactgacgctcccgccagtgcgctgtgggacataatgcggtgctgggagaaggaatgtccagtcaagagagagcgactcagcgaaacctccccagccttccggatcctctcagtggagccccgcctgcaggccaattttacaattcgagaggacgccaacccttcatccaggcagaggggtctgaagcgtttccaagctaatcccgaggctaactggggacctcgtccacgcgcccgccctggtggcaaagcagcagacgaagcgatggaggagaggaggaggctcctccaaaacaagcgtaaggaaccacccgaggacgtggcccagcgggctgcacggctaaaaacctttccctgcaaacgcttcaaagagggcacttgccagaggggcgaccaatgctgctactcgcactctcctcccactccacgggtgtctgcagatgctgcccccgactgccccgagactagcaaccagacaccacctggtccgggtgccgctgctggccctggaattgattag

SEQ ID NO: 194713 - DNA, 1980 bp, Artificial Sequence
  derived and/or modified sequence
atgcagggcagcagcctgtggctgagcctgaccttccggagcgcccgcgtactctcccgtgccagattcttcgaatggcaatcaccaggtctccctaatacagccgcgatggagaatggcacaggaccatatggggaggaacgccctcgggaggtgcaggagacaacggttacagagggggctgcaaaaatcgcatttccttctgccaacgaagtcttctacaatccagtgcaggaattcaatcgcgacctcacctgcgctgtaattaccgagttcgccaggatacagttaggcgcaaagggcattcagataaaagtgcccggtgagaaggatacccagaaagtggtagttgacctgagtgaacaagaggaggagaaggtggagcttaaggaatccgagaacctcgctagtggggatcagccacgaacagccgccgtgggcgagatttgcgaggaagggctgcacgtactggaggggctggccgcctcgggactccggtctatcaggtttgcgctggaggtccccggactacgatcagttgttgcaaacgacgccagtacccgcgccgttgatctgatccgtagaaacgtccagttgaacgatgttgctcacctcgttcagcctagccaagcggatgcccgcatgctgatgtaccaacaccagagagtgtccgaacgcttcgacgttatagatctggatccatacggctctccagcaactttccttgatgctgctgtgcaggctgtcagcgaggggggactcctgtgcgtcacatgtacagatatggctgtgcttgcaggtaacagcggcgaaacttgctactccaagtatggcgccatggctctcaaatcacgtgcttgccatgagatggcactccggattgtgcttcacagcttggacctgcgggctaattgctaccaaaggttcgtggttccacttctcagcatttcagctgatttttatgtgcgagtatttgtgagggtgtttaccggccaggccaaggtgaaggcgagcgccagtaagcaggctttagtctttcagtgcgtcggctgtggtgcgtttcacctgcagcggcttggaaaggcctccggagtcccctccggcagagccaagttttccgccgcctgcggacccccagtgacacccgaatgtgagcactgtggacagcgtcaccaactgggtggtcccatgtgggctgaacctatacacgatctggattttgtggggcgcgtgcttgaagcagtgtcggcgaacccgggccgcttccacacaagcgagcgcattcggggggttctctctgttataactgaggagctgccagatgtccccctgtactataccctcgaccaactcagctctaccatccactgcaatacgccatcactgctgcagctccgctcggcgctcctacatgctgacttcagggtttcgttaagccatgcatgcaagaatgcagtgaaaaccgatgcccccgccagcgccttgtgggacatcatgcgctgttgggagaaggagtgtcccgttaaaagagagcggctctctgagactagccctgccttccgtattctgtccgtcgaacctagactccaggccaacttcactattagggaggacgcaaatcccagttcgagacagcgggggttaaaaaggtttcaggccaatccagaagccaactggggccccaggccccgagcgcggcccggaggaaaggccgctgacgaagcaatggaggagcgacggagactcctacagaacaaacggaaagagcctcccgaagacgtggcacagcgcgccgcacgcctgaagacttttccatgcaagaggttcaaggaggggacttgccaaaggggagatcagtgctgttacagtcacagcccccctacgccacgggtgagtgcagacgccgccccagactgcccagaaacaagcaatcagacacctcctgggcccggggctgcagctggaccggggatagactag

SEQ ID NO: 194714 - DNA, 1980 bp, Artificial Sequence
  derived and/or modified sequence
atgcaaggaagctccctgtggctgagcctaacattccggtctgctcgggtcttgtcacgtgccaggttctttgaatggcagagccccggtctacccaatactgctgctatggagaatgggactgggccttatggcgaggaaaggcctcgtgaggtgcaggaaacgaccgtaaccgagggggctgccaagatagcctttcctagcgccaacgaggtgttctataacccagtacaagagttcaaccgtgaccttacatgtgccgtgattacagagttcgcgagaattcagctgggcgctaagggcattcagatcaaggtccccggagaaaaggatacgcagaaagtggtggtggacctgtccgaacaggaggaagagaaagtggagttaaaggagtcggaaaacctggcatctggggaccaaccccgaacggctgctgtgggtgaaatttgcgaggaaggcctccacgtgctggagggcctcgctgcatctggcctgcgctccatcagatttgcactagaggtgcccggattaaggagcgtcgtggccaatgatgcatctaccagagcagtggacttgatcaggcgcaatgtgcaattaaacgatgtggctcacctggtgcagccaagtcaggctgacgctcggatgttgatgtaccagcatcaacgggtgtctgagaggttcgatgttatcgaccttgatccctacggatcgccagcaacattcctcgatgcagctgtgcaagccgttagtgaggggggtctcctttgcgtgacatgtaccgatatggcagttctggccggtaattccggagagacttgctattcaaaatacggcgctatggctctgaaatctcgtgcgtgccacgagatggccttacgtatcgtattgcatagccttgaccttcgggctaattgctatcagaggttcgtggttcctctgctgtcaataagtgccgatttctatgtacgtgtgtttgtgagagtgtttacaggacaggccaaggtgaaagcctcagcctccaagcaggcgctggtctttcagtgcgtgggctgcggcgcatttcacctgcaacgcctgggaaaggcttccggagtcccatcagggagagccaaattcagcgcagcttgtggaccccctgttacacccgaatgcgagcactgtggccagcggcaccagctggggggtccaatgtgggccgagccgatccatgaccttgattttgtgggaagggtgcttgaggccgtgtctgccaatcccggtagattccacacctctgaaagaatcaggggggtcctgtctgtgattactgaagagctgcctgatgtccctctctactacaccctggaccagctgagcagcacaatccactgtaacacgcctagtctgctgcaattgaggagcgccctgctgcacgctgatttccgggtatctctcagccatgcatgtaagaacgcagtgaagactgatgcacccgcatccgcactatgggatatcatgcgctgctgggagaaggaatgccccgtcaagagggagcgcttaagtgaaacatcacctgcattccggattctgtcggtagaacctcgattgcaagccaactttaccattcgagaagatgccaaccctagttcgcgccagcggggacttaagagatttcaggcaaacccagaggctaattggggccctaggcctcgcgctaggcccggaggtaaggcagcagacgaagctatggaggaaagaaggagacttctgcaaaacaagaggaaggagccaccagaggatgttgcacaacgggctgcgcgtttgaagacattcccatgtaaaaggttcaaggaaggcacatgtcagcgcggagaccagtgctgctattcacactcaccccctactcccagggtttcagctgatgccgcacctgactgtcctgagacttctaatcagacgccacccggtcccggtgctgcagctggtcctgggatcgattag

SEQ ID NO: 194715 - DNA, 1980 bp, Artificial Sequence
  derived and/or modified sequence
atgcagggatcaagcttatggttaagcctgacgtttcggtccgctcgagtgctctcaagggctcgcttctttgagtggcagtctcctggactgccaaatactgccgctatggaaaatggtacaggaccttatggggaagagagacccagggaggtgcaggagacaactgttacagaaggggcagccaagatcgctttcccctcggccaatgaggtcttctataatccagttcaggagtttaatagagatctgacatgcgcggtgatcaccgagtttgcacggatacagttgggcgcaaaggggatacagatcaaggtcccaggcgagaaagatacgcagaaagtagtggtcgacttgtctgagcaggaagaggagaaggttgaactcaaggagtcggagaatctggcctcaggtgaccaacccaggaccgctgctgtgggggaaatttgcgaggaaggtttacacgtgctggaggggcttgcagcaagtggactgagaagcatacgttttgctctcgaggtgccaggcctgagatctgttgtggcaaacgatgcaagcacccgcgctgtggacctaattcgccgaaacgtccaactaaatgacgtagcacacctcgtgcagccttctcaggccgacgctcggatgctcatgtatcagcaccaacgggtgagtgagaggtttgacgtgattgacttggatccatatggttcacccgcaacatttctcgacgccgctgtgcaagccgtgtctgaggggggtttgctgtgtgtgacttgtaccgacatggcagtgttggccggaaactcaggggagacatgttacagcaagtatggcgctatggcactaaagtcacgggcttgtcacgagatggcactgagaatagtattgcattcgcttgatctgcgggctaattgttatcaaagattcgtggtaccgttactgtccatctcagccgacttctacgtgcgggtgtttgtgcgagtctttaccgggcaggccaaggtgaaagcatcagcgtcaaaacaagcactggtgttccagtgcgtgggatgtggcgctttccacttgcaacggctgggcaaagcgtcaggggtcccctcaggcagagcaaaattttcagctgcctgcggacctcccgtcacccctgagtgtgaacactgtggacagcgacaccagctagggggacctatgtgggcagaaccgattcatgacctggacttcgttggccgagttctggaggccgtcagcgctaatcccggtagattccacacgtctgagcggatccgcggtgtgctgtctgtaataactgaggagttgcctgatgtcccactttactatacattggaccagctctcaagtaccatccattgtaatacacctagcttgcttcaactccgcagtgctctgctccatgccgattttagagtgtccctaagtcatgcatgtaagaacgcagtcaagactgatgcgcctgcaagtgctctctgggacattatgaggtgttgggaaaaggagtgcccagtgaagcgcgaacgcttatccgaaacgagtccagcattcagaatactctcggttgagcccagactccaggcaaacttcaccatccgggaggatgctaacccctcttcaaggcaacgcggacttaagcggtttcaggcaaacccagaagctaactgggggccaaggcccagagccaggcccggaggtaaggccgctgacgaagcaatggaagagagacgtagactgctccaaaacaaaagaaaggaaccaccagaggatgtggctcagcgcgctgcccgactgaagactttcccctgcaagagatttaaagagggcacctgccagaggggcgatcagtgttgctacagccatagtccgccaaccccaagagtatctgcagacgccgcacctgattgtcccgagacttctaatcaaacgccacctggcccaggagccgcagccggacctggcatcgattag

SEQ ID NO: 194716 - DNA, 2142 bp, Artificial Sequence
  derived and/or modified sequence
gattcgcccacccactgtgccaacatggcggcgcccaggtcctaattcgggaaacgtgcaccttgactaattcggttttctgtggctacgagagcaggcttggcgggcggaggcgccagcggatgtctcatgcaaggatcgtctctgtggctaagcctcactttccgctccgcccgggtgctctctagagcccggtttttcgagtggcagtctccagggctgccgaatacagcagcgatggagaacggcaccgggccctacggagaagaacgtccacgtgaagtccaggagacgacagtcaccgagggggctgccaaaatcgcctttcccagtgccaacgaggtcttttataacccggtgcaggaattcaatcgggacctgacatgtgctgtgatcaccgagtttgctcgcattcagcttggggccaaaggaatccagatcaaggttccaggagagaaggacacgcaaaaagtggtcgtggacttgtcagagcaagaggaggaaaaggttgaactgaaagagagtgaaaacctggcctcaggagaccaacctcgcacagcggccgtgggggagatctgtgaggaaggcctgcatgtgctggaaggcctggcagcttcaggcctacgttccattcgatttgccctagaggtgcctgggctcagatctgtggttgcaaacgatgcctccacccgggctgtggatctcatacgccggaatgtccagctcaatgacgtggcccacctggtacagccgagccaagcagatgcccggatgctgatgtaccagcaccagagggtgtcggagaggtttgacgtcatcgatctggacccctatggcagcccagccaccttcctggatgcagctgtgcaggctgtgagtgaaggagggttgctgtgtgtgacctgcacagacatggcggtgttggcggggaacagcggggagacgtgctacagcaagtacggggccatggccctcaagagccgggcctgccacgagatggccctgagaatcgtcctgcacagcctggacctccgcgccaactgctaccagcgcttcgtggtgccgctgctcagcatcagcgctgacttctacgtgcgtgtttttgtccgtgtcttcaccggccaggccaaggtcaaggcctcagccagcaagcaggcgctggtgttccagtgtgtgggctgcggggccttccaccttcagcgtctcggcaaagcgtcaggagtccccagcggccgggccaagttctctgcagcctgtggtccccctgtgacccccgagtgtgaacactgtgggcaacgacaccagcttggtggccccatgtgggcagagcccatccatgacctggattttgtgggccgtgtcctggaggctgtgagcgctaaccccggccgcttccacacctcggagcggatccgaggggtcctgagcgtcatcactgaggagctcccggacgtgcctctgtactacaccctggaccagctgagcagcaccatccactgcaacacaccaagcctcctgcagttgcggtcggccctcctccacgctgacttccgggtctcactctcccacgcctgtaagaacgctgtgaagacggatgcccctgcctctgccctctgggacatcatgcgttgctgggagaaggaatgtccggtgaaacgggagcgactatcagagactagcccagcgttccgcattctcagtgtggagcccaggctgcaggccaacttcaccatccgggaagatgccaaccccagctcccgacagcgaggactcaagcgcttccaggctaacccggaggccaactggggtccccggcctcgtgcccggccagggggcaaggcggccgacgaagctatggaggagagacgcaggctgcttcagaacaagcggaaggagccgccggaagatgtggcccagcgggctgcccggctcaagacatttccttgcaagaggtttaaggagggcacctgtcaacgcggggaccagtgctgctactcccacagccccccgacacccagggtttctgctgatgctgcccctgactgtccagagacctccaaccagaccccccctggacctggggctgccgctgggccaggcatagactgaaccaataaagagatgtcacgtcaccttctcccg

SEQ ID NO: 194717 - DNA, 2263 bp, Artificial Sequence
  derived and/or modified sequence
aggacgggctaggcagcgcggggagggattcggactcggggcgggcctgcacgagggcatcggctccacagggaccagtcatccccaaaacgaggggatatcagcttaccgaggccgcaggttttcctagtccctacctcatagatatgtaggacatccccgggcccggaatgcggctctctgaccctctctgtgccctcccccgccccccgaaccaggcttggcgggcggaggcgccagcggatgtctcatgcaaggatcgtctctgtggctaagcctcactttccgctccgcccgggtgctctctagagcccggtttttcgagtggcagtctccagggctgccgaatacagcagcgatggagaacggcaccgggccctacggagaagaacgtccacgtgaagtccaggagacgacagtcaccgagggggctgccaaaatcgcctttcccagtgccaacgaggtcttttataacccggtgcaggaattcaatcgggacctgacatgtgctgtgatcaccgagtttgctcgcattcagcttggggccaaaggaatccagatcaaggttccaggagagaaggacacgcaaaaagtggtcgtggacttgtcagagcaagaggaggaaaaggttgaactgaaagagagtgaaaacctggcctcaggagaccaacctcgcacagcggccgtgggggagatctgtgaggaaggcctgcatgtgctggaaggcctggcagcttcaggcctacgttccattcgatttgccctagaggtgcctgggctcagatctgtggttgcaaacgatgcctccacccgggctgtggatctcatacgccggaatgtccagctcaatgacgtggcccacctggtacagccgagccaagcagatgcccggatgctgatgtaccagcaccagagggtgtcggagaggtttgacgtcatcgatctggacccctatggcagcccagccaccttcctggatgcagctgtgcaggctgtgagtgaaggagggttgctgtgtgtgacctgcacagacatggcggtgttggcggggaacagcggggagacgtgctacagcaagtacggggccatggccctcaagagccgggcctgccacgagatggccctgagaatcgtcctgcacagcctggacctccgcgccaactgctaccagcgcttcgtggtgccgctgctcagcatcagcgctgacttctacgtgcgtgtttttgtccgtgtcttcaccggccaggccaaggtcaaggcctcagccagcaagcaggcgctggtgttccagtgtgtgggctgcggggccttccaccttcagcgtctcggcaaagcgtcaggagtccccagcggccgggccaagttctctgcagcctgtggtccccctgtgacccccgagtgtgaacactgtgggcaacgacaccagcttggtggccccatgtgggcagagcccatccatgacctggattttgtgggccgtgtcctggaggctgtgagcgctaaccccggccgcttccacacctcggagcggatccgaggggtcctgagcgtcatcactgaggagctcccggacgtgcctctgtactacaccctggaccagctgagcagcaccatccactgcaacacaccaagcctcctgcagttgcggtcggccctcctccacgctgacttccgggtctcactctcccacgcctgtaagaacgctgtgaagacggatgcccctgcctctgccctctgggacatcatgcgttgctgggagaaggaatgtccggtgaaacgggagcgactatcagagactagcccagcgttccgcattctcagtgtggagcccaggctgcaggccaacttcaccatccgggaagatgccaaccccagctcccgacagcgaggactcaagcgcttccaggctaacccggaggccaactggggtccccggcctcgtgcccggccagggggcaaggcggccgacgaagctatggaggagagacgcaggctgcttcagaacaagcggaaggagccgccggaagatgtggcccagcgggctgcccggctcaagacatttccttgcaagaggtttaaggagggcacctgtcaacgcggggaccagtgctgctactcccacagccccccgacacccagggtttctgctgatgctgcccctgactgtccagagacctccaaccagaccccccctggacctggggctgccgctgggccaggcatagactgaaccaataaagagatgtcacgtcaccttctcccg

SEQ ID NO: 194718 - protein, 400 aa, Artificial Sequence
  derived and/or modified sequence
MGTPASGRKRTPVKDRFSAEDEALSNIAREAEARLAAKRAARAEARDIRMRELERQQKELDEKSDKQYAENYTRPSSRNSASATTPLSGNSSRRGSGDTSSLIDPDTSLSELRESLSEVEEKYKKAMVSNAQLDNEKNNLIYQVDTLKDVIEEQEEQMAEFYRENEEKSKELERQKHMCSVLQHKMEELKEGLRQRDELIEKHGLVIIPDGTPNGDVSHEPVAGAITVVSQEAAQVLESAGEGPLDVRLRKLAGEKEELLSQIRKLKLQLEEERQKCSRNDGTVGDLAGLQNGSDLQFIEMQRDANRQISEYKFKLSKAEQDITTLEQSISRLEGQVLRYKTAAENAEKVEDELKAEKRKLQRELRTALDKIEEMEMTNSHLAKRLEKMKANRTALLAQQ

SEQ ID NO: 194719 - DNA, 1203 bp, Artificial Sequence
  derived and/or modified sequence
atggggactcccgcgagcggccggaaacggaccccagtgaaggatcgcttttccgcggaagatgaagcactaagtaacatcgcccgcgaggccgaagcacggcttgccgccaagagggccgcccgggctgaagcaagggatatcaggatgagggaactggaaaggcagcagaaagagctggacgaaaagtcggataagcagtatgccgagaattacactcgccccagcagtcggaattccgcttctgcaacaacaccccttagtgggaacagtagcaggagaggctcaggcgacacgtctagccttatcgatccggatacgagtttgagtgaattgagagagtcactttctgaggtggaggagaagtataaaaaagccatggtgagcaatgctcagttggacaacgagaagaacaacttgatttatcaagtcgacaccttaaaagatgtgatcgaagagcaagaggagcagatggcagaattctatcgcgagaatgaagagaaatctaaggaacttgaacgacaaaagcatatgtgctcggtcctccagcacaagatggaggaactgaaagaagggcttcgacagcgggacgaactcatcgaaaaacacgggctggtaatcatccctgacggcacacctaacggtgatgtgtcccacgagccagtggctggagcaatcacagttgtgtcccaagaggcagcccaagttctcgaaagtgccggagagggtcccttagacgttcgactgcgaaagttggctggcgagaaggaggaacttctgtctcagattagaaaactgaagttgcagcttgaagaggagaggcagaagtgtagtagaaacgacgggacagtaggtgacctagcggggctccagaacggtagtgacctgcaatttattgagatgcagcgtgatgccaaccgccagatatcggagtataagtttaaactcagcaaagctgagcaggacattaccactctggagcagagtatctctagattagagggccaagtgctacgttacaaaactgctgccgaaaacgcggaaaaggtcgaagatgaactgaaagcagagaagaggaagctgcagagggaactccgaaccgccctggataagattgaggagatggaaatgaccaacagccacctggccaaaagactagagaagatgaaagccaacagaacggctctgttggctcagcagtag

SEQ ID NO: 194720 - DNA, 180 bp, Artificial Sequence
  derived and/or modified sequence
atgggcactcccgctagtggccggaaaaggacgcccgtgaaagatcgtttttctgccgaggacgaagcgctctctaatatcgcaagggaggcagaagctcggctggccgccaagagggcagccagagctgaagccagagacatcaggatgagagagctggaacgtcagcagaaagagtag

SEQ ID NO: 194721 - DNA, 180 bp, Artificial Sequence
  derived and/or modified sequence
atgggtactcctgcgtcgggtcgaaagcgcactcctgtgaaggaccgcttctcagctgaagatgaagccctgtccaacattgcaagagaggctgaagcgcgtctggctgccaagagagccgccagggccgaagcccgcgacattcgaatgcgcgaactggaacgacagcagaaagaatag

SEQ ID NO: 194722 - DNA, 180 bp, Artificial Sequence
  derived and/or modified sequence
atgggaactccggcatctggacggaagcgaacaccagtgaaggataggttttccgcagaggacgaagcactatccaatatcgccagagaggccgaggcccgactggctgctaaaagggctgcaagggcagaagcccgggacatcaggatgagagaacttgaaagacagcagaaggagtag

SEQ ID NO: 194723 - DNA, 1203 bp, Artificial Sequence
  derived and/or modified sequence
atgggcaccccagccagcggcaggaagaggacccctgtgaaggaccgcttcagcgcagaagatgaggccctgagcaacatcgcccgggaggccgaggcccggctggccgccaagagagctgcccgggcagaggcccgggacatccgcatgagggagctggagcggcagcagaaggagctggatgagaagagtgacaagcagtatgcagagaactacacccggcccagcagcaggaacagcgccagcgccaccacccccctgagcggcaacagcagcagaagaggcagcggggacaccagcagcctgattgatcctgacaccagcctgtctgagctgcgggagagcctgtctgaggtggaggagaagtacaagaaggccatggtgtccaatgcccagctggacaatgagaagaacaacctgatctaccaggtggacaccctgaaggatgtgattgaggagcaggaggagcagatggccgagttctaccgggagaatgaggagaagagcaaggagctggagcggcagaagcacatgtgcagcgtgctgcagcacaagatggaggagctgaaggagggcctgcggcagagagatgagctgattgagaagcacggcctggtgatcatcccagatggcaccccaaatggagatgtgtcccatgagcctgtggccggggccatcaccgtggtgtcccaggaggccgcccaggtgctggagagcgctggggagggccccctggatgtgcggctgaggaagctggccggggagaaggaggagctgctgagccagatcaggaagctgaagctgcagctggaggaggagcggcagaagtgcagcagaaatgatggcaccgtgggggacctggccggcctgcagaatggaagtgacctgcagttcatcgagatgcagagagatgccaaccggcagatcagcgagtacaagttcaagctgagcaaggccgagcaggacatcaccaccctggagcagagcatcagccggctggagggccaggtgctgcgctacaagacagctgctgaaaatgctgagaaggtggaggatgagctgaaggccgagaagaggaagctgcagcgggagctgaggacagccctggacaagattgaggagatggagatgaccaacagccacctggccaagaggctggagaagatgaaggccaacagaacagccctgctggcccagcagtag

SEQ ID NO: 194724 - DNA, 180 bp, Artificial Sequence
  derived and/or modified sequence
atgggcaccccagccagcggcaggaagaggacccctgtgaaggaccgcttcagcgcagaagatgaggccctgagcaacatcgcccgggaggccgaggcccggctggccgccaagagagctgcccgggcagaggcccgggacatccgcatgagggagctggagcggcagcagaaggagtag

SEQ ID NO: 194725 - DNA, 2821 bp, Artificial Sequence
  derived and/or modified sequence
gtcgtcgaccctgtggccccgcccatccttcgcctcctcagtcggccgctcaggctgcggctcctcccggggccggttcccgctgtctcagccgcggcgcagagggcacatcggcctgaccgactagccggctgccagtgccgggagccgccgcgtccatccccgcccgcctggccggggacccaggactgagtcgtccagctgcgcccctcgcccatagccccagcgggcgccgggcgggcgagcagctcttcggcccttcccggacagcgacgcagtcgcagcgcgcgccctaacacagatgtgggaagataaatgaaggggtctagatgtaaatgtcagtggaaaggagagctaccatcactaagggctgaaaacacagttaaatcactttcaaagttaaaagactattaagaacacaagatggggactcctgcttctggaaggaaaagaacacctgtgaaagaccgattttctgcagaagatgaagctttgagtaacattgccagagaggcagaggcaaggctggcagcaaaacgggctgcccgggcagaagcaagagatatacgcatgagagaactggaacgacaacaaaaagagttggatgaaaaatctgacaaacagtatgctgaaaattatacaagaccttcatctcgaaattctgcctcagcaacaacccctctaagtggaaactcatccagacgaggaagtggggacaccagcagcttaatagatccagacacttcattaagtgaattgcgggaatctttgtctgaagtggaagaaaaatacaagaaagccatggtttccaatgcacagttagacaatgagaagaacaatttgatctaccaagtagacacactcaaggatgttattgaagagcaggaggaacagatggcagaattttatagagaaaatgaagaaaaatcaaaggagttagaaaggcagaaacatatgtgtagtgtgctgcagcataagatggaagaacttaaagaaggcctgcggcaaagagatgagcttattgagaaacatggcttagttataatccccgatggcactcccaatggtgatgtcagtcatgaaccagtggctggagccatcactgttgtgtctcaggaagctgctcaggtcttggagtcagcaggagaagggccattagatgtaaggctacgaaaacttgctggagagaaggaagaactactgtcacagattagaaaactgaagcttcagttagaggaggaacgacagaaatgctccaggaatgatggcacagtgggtgacctggcaggactgcagaatggctcagacttgcagttcatcgaaatgcagagagatgccaatagacaaattagcgaatacaaatttaagctttcaaaagcagaacaggatataactaccttggagcaaagtattagccggcttgagggacaggttctgagatataaaactgctgctgagaatgctgagaaagttgaagatgaattgaaagcagaaaaacggaagctacaacgagagttacgaacagcactggacaagattgaggagatggagatgaccaacagccacctggccaagcggctggagaagatgaaggccaataggacagcacttctggcccagcagtaggaaaaccacccttcaacctgggtgatgctccttggggccctacctagagggactgacttttgtccattgacacaaaccccttttagtactgttttgagttttgtcattaaaacagccacctttgtattttataatttatgacagaatgaagtcattttgaatctacatgaatgaacactttggattttgttgtagtttgattctagggtagaaccagtccatgctgtttttattttttatctccgtaattgtagaatcatgtttactcaacgtttttccccagctgcctcagtaactgggcactcggaggccttggcacgggttctggaggacagacagcaattctatgagtgctcactgagatacttgctggagacctcagaaaacacaagtgccttctccacggtgcaattcagacttcagtgatctccagtggtcaaaagacatttacccttaatatcagacaacatttatattttagtgaagaaacaagttctcgggtggggaatctatgtttcactcagatttatatgtttggaggaaaaaagcctttttttgtaaaatatttaaatttatataagaaaatgttagaaaaaaatatggggagtgtatataaaacttgctttattgcatggggcaggggaagtccaggcctaatactcctaaagtaagagttgggtcctttttttcttcaatacaactgtgctgtaccttgtaaagtattttatctgctgcttatttgtggaatgaaacctcaaacaaacccaaagggggagggtagggcagggcaggcagattggaaatctgcctgcagattctattaaatacacccttttgccaaccacaattggctactgacatgttcattttgttataggagactttaaaacaaatcatggcaaccacatccctcttcttttgtctccttctcaaggaaaaacaatctggaatgtagaacttttaaagacttgagtttcacctttagaggtaccctgtccaagaggtttttttaaaatcatggagtgcaactactttgcagaatttatgattctcttttgctcttagtacccaggtggttttatagaaatgattattgtatctttaaagtgcttacacagaaaatatattgggggaaaatctagtgactaaaggcacataagataataaaactagactttaaaaaggtaactcaaaa

SEQ ID NO: 194726 - DNA, 718 bp, Artificial Sequence
  derived and/or modified sequence
gtttaaaataatattttttcaagataacattttattttgaggataaatctatatgaaaaagtgcagttattggagaatgcagtgttgcaaatagaattagttggcagggactccacggttgttgtggtttgaatatcttgcagcactaaccctgtttaaccaacgtcatgctctgtttaacagatgcagagataatgacctagtattataatatgtagaataagaatttcagaaagtgtgattcatttcgaaggtagatcactcactttgtgaatcattgctatgaatctgaaaattgaaatagaggaaacctaagttcgtatctgcctaatgagatggcattctttactcattttataggaagtgttgtattatgttttgttaggtctgttgctggatatttatcatcgtgaagaatgatgtgggaagataaatgaaggggtctagatgtaaatgtcagtggaaaggagagctaccatcactaagggctgaaaacacagttaaatcactttcaaagttaaaagactattaagaacacaagatggggactcctgcttctggaaggaaaagaacacctgtgaaagaccgattttctgcagaagatgaagctttgagtaacattgccagagaggcagaggcaaggctggcagcaaaacgggctgcccgggcagaagcaagagatatacgcatgagagaactggaacgacaacaaaaagag

SEQ ID NO: 194727 - DNA, 389 bp, Artificial Sequence
  derived and/or modified sequence
gaagagaatgtggatgtagtaatgaaacaagagagaaggagagcgggatgtgggaagataaatgaaggggtctagatgtaaatgtcagtggaaaggagagctaccatcactaaggtttatattctgcaagatcctgaagatactttccttcttttctggctgaaaacacagttaaatcactttcaaagttaaaagactattaagaacacaagatggggactcctgcttctggaaggaaaagaacacctgtgaaagaccgattttctgcagaagatgaagctttgagtaacattgccagagaggcagaggcaaggctggcagcaaaacgggctgcccgggcagaagcaagagatatacgcatgagagaactggaacgacaacaaaaagag

SEQ ID NO: 194728 - DNA, 352 bp, Artificial Sequence
  derived and/or modified sequence
taatgggaagagaatgtggatgtagtaatgaaacaagagagaaggagagcgggatgtgggaagataaatgaaggggtctagatgtaaatgtcagtggaaaggagagctaccatcactaagggctgaaaacacagttaaatcactttcaaagttaaaagactattaagaacacaagatggggactcctgcttctggaaggaaaagaacacctgtgaaagaccgattttctgcagaagatgaagctttgagtaacattgccagagaggcagaggcaaggctggcagcaaaacgggctgcccgggcagaagcaagagatatacgcatgagagaactggaacgacaacaaaaagag

SEQ ID NO: 194729 - DNA, 1203 bp, Artificial Sequence
  derived and/or modified sequence
atgggcacccccgccagcggccggaagcggacccccgtgaaggacagattcagcgctgaagatgaggctctgtctaatatcgccagggaggccgaggcccggttagccgccaagcgggctgcacgagctgaagccagggatatcagaatgcgcgagctggagagacagcagaaagaactggatgagaagagcgacaaacaatatgccgagaactatacccgaccgtcctcacggaactctgcttccgctaccacccctctgtcaggcaacagttctagacgcggcagcggagacacctccagtctaattgatccggatacatccctgtctgagctgcgagaaagtttgagcgaggtcgaggaaaaatacaagaaagccatggtttccaatgctcagctggacaatgaaaaaaacaatctgatctaccaagttgatactctgaaggatgtcatcgaggagcaggaggagcaaatggccgagttttatcgggaaaatgaagaaaaatctaaggaactcgagcggcagaagcacatgtgctccgttctgcagcataaaatggaagagcttaaggagggtcttcggcaacgggatgagttgatagagaaacatggactcgtgattatcccggacggcaccccgaatggagacgtgagccatgaaccagtggcaggcgcaatcactgtagtgagtcaggaggcagcccaggttttagagtctgccggcgaaggaccacttgacgtgcgcttaaggaaactggccggagagaaagaggagttgctgagccagatccgcaaactgaagctgcagctggaagaggaacgccagaagtgtagccgcaacgatgggaccgtgggcgatctagcaggactccagaatggatccgacttgcaatttatcgaaatgcaacgggacgcaaaccggcaaatcagtgaatataaatttaagctgagcaaggccgagcaggacatcacgaccctggaacagagtatttctcggttagaaggacaggtgctgagatataaaacagccgcagagaacgccgagaaagtggaagacgaacttaaggccgaaaagaggaaactgcagagagaactgcgcacagcactcgacaaaatagaggaaatggagatgactaactcccacctggctaaacggctggagaagatgaaagcaaatcgaaccgcgctgctcgctcagcaatag

SEQ ID NO: 194730 - DNA, 180 bp, Artificial Sequence
  derived and/or modified sequence
atgggcacccccgccagcggccggaagcggacccccgtgaaggaccgcttctcagcagaggatgaagcactaagtaacatagctcgggaggccgaagctcggctggccgccaagcgagctgcacgagcagaggccagggatattcggatgcgggagttagagcgccagcagaaagaatag

SEQ ID NO: 194731 - DNA, 180 bp, Artificial Sequence
  derived and/or modified sequence
atgggcacccccgccagcggccggaagcggacccccgtgaaggaccggttcagcgcggaggatgaggcactcagtaacattgcacgagaagccgaagcccgcctcgccgcaaagagggcagcacgcgcggaagcccgagatattagaatgcgtgagcttgagcgccagcagaaggaatag

SEQ ID NO: 194732 - DNA, 180 bp, Artificial Sequence
  derived and/or modified sequence
atgggcacccccgccagcggccggaagcggacccccgtgaaggaccggttttcggccgaagacgaagctctgagtaatatcgcccgagaggccgaggcacggctagcggctaagcgggccgctcgggcagaagccagagacattcggatgagagagctcgaacggcaacagaaagagtag

SEQ ID NO: 194733 - DNA, 1203 bp, Artificial Sequence
  derived and/or modified sequence
atgggaacccctgcttcaggtaggaagcggacacctgtgaaggaccgattcagtgcggaggacgaagcgctgagcaatatagcccgagaggcagaagccaggctcgcagcaaagagagcggcacgagcagaagcacgggatatccgcatgcgcgagctcgagcggcagcagaaggaactggacgaaaagagcgataagcaatacgcagagaactataccaggccatcctcgcggaatagcgcttctgcaaccacaccactgagcggcaattcaagccgtcgtggttctggcgacacttcgtccctgatcgatcccgacacatccctgtccgagctcagggagtccctgtccgaagtggaagagaagtacaagaaagccatggtgagcaacgctcaactggacaacgagaaaaacaatctgatttaccaggtggatacattgaaagacgtgattgaggaacaggaggaacaaatggcagagttctacagagagaatgaggagaagagcaaggaactggagaggcaaaaacacatgtgttccgtcctgcaacataagatggaagagctgaaggagggtctcaggcaacgagacgagctcatcgagaaacatggactcgtgatcatccccgacggtaccccaaacggcgacgtgagtcatgaaccagtcgcaggagctattacagtggtgtctcaagaggcagctcaggtccttgagagcgctggcgagggacccttggacgtaaggctacgcaaacttgctggcgagaaggaagagctgctcagtcagatccggaaactcaagcttcagttggaggaggagaggcaaaaatgctccaggaatgatggcacagtgggcgacctcgcaggactccaaaatggctccgacctgcaatttatcgagatgcaacgtgacgccaataggcagatctctgaatataagttcaagttgtctaaagctgagcaggacatcactacccttgagcagagcatttcgagactcgaagggcaggttctcaggtataaaacagctgccgagaatgcagagaaggttgaagatgagcttaaggcagagaaacgtaaactacaacgggaactgcggaccgccctcgataagatcgaggaaatggaaatgaccaattcccatctcgccaagcgccttgagaagatgaaggccaaccgtacagcgttgcttgcccagcagtag

SEQ ID NO: 194734 - DNA, 180 bp, Artificial Sequence
  derived and/or modified sequence
atgggtacaccagcatctggacgcaaaagaacccctgtgaaagataggtttagtgcggaggatgaggccctgagtaatattgcaagggaagcagaagcgaggttggccgcaaagagggctgccagggctgaagcccgagacatccgaatgcgggaattagaacgacagcagaaagagtag

SEQ ID NO: 194735 - DNA, 180 bp, Artificial Sequence
  derived and/or modified sequence
atgggaaccccagcgagcgggagaaagcgcacaccagtaaaggataggtttagcgccgaagacgaggccctctctaacattgcccgagaggcagaggcccgactcgcagctaagcgcgcagcccgagccgaagctcgtgatatccggatgagggagcttgagaggcagcagaaagaatag

SEQ ID NO: 194736 - DNA, 180 bp, Artificial Sequence
  derived and/or modified sequence
atgggcactccagcctcgggtagaaagaggacacctgtcaaagatagatttagcgccgaggacgaggccttgagcaatatagcccgtgaagccgaagcacgtcttgctgcaaaacgggcagcccgagccgaagcccgagatattagaatgcgagaactggaacgacagcagaaagagtag

SEQ ID NO: 194737 - DNA, 1203 bp, Artificial Sequence
  derived and/or modified sequence
atgggcacccccgccagcggcagaaagagaacccccgtgaaggacagattcagcgccgaggacgaggccctgagcaacatcgccagagaggccgaggccagactggccgccaagagagccgccagagccgaggccagagacatcagaatgagagagctggagagacagcagaaggagctggacgagaagagcgacaagcagtacgccgagaactacaccagacccagcagcagaaacagcgccagcgccaccacccccctgagcggcaacagcagcagaagaggcagcggcgacaccagcagcctgatcgaccccgacaccagcctgagcgagctgagagagagcctgagcgaggtggaggagaagtacaagaaggccatggtgagcaacgcccagctggacaacgagaagaacaacctgatctaccaggtggacaccctgaaggacgtgatcgaggagcaggaggagcagatggccgagttctacagagagaacgaggagaagagcaaggagctggagagacagaagcacatgtgcagcgtgctgcagcacaagatggaggagctgaaggagggcctgagacagagagacgagctgatcgagaagcacggcctggtgatcatccccgacggcacccccaacggcgacgtgagccacgagcccgtggccggcgccatcaccgtggtgagccaggaggccgcccaggtgctggagagcgccggcgagggccccctggacgtgagactgagaaagctggccggcgagaaggaggagctgctgagccagatcagaaagctgaagctgcagctggaggaggagagacagaagtgcagcagaaacgacggcaccgtgggcgacctggccggcctgcagaacggcagcgacctgcagttcatcgagatgcagagagacgccaacagacagatcagcgagtacaagttcaagctgagcaaggccgagcaggacatcaccaccctggagcagagcatcagcagactggagggccaggtgctgagatacaagaccgccgccgagaacgccgagaaggtggaggacgagctgaaggccgagaagagaaagctgcagagagagctgagaaccgccctggacaagatcgaggagatggagatgaccaacagccacctggccaagagactggagaagatgaaggccaacagaaccgccctgctggcccagcagtag

SEQ ID NO: 194738 - DNA, 180 bp, Artificial Sequence
  derived and/or modified sequence
atgggcacccccgccagcggcagaaagagaacccccgtgaaggacagattcagcgccgaggacgaggccctgagcaacatcgccagagaggccgaggccagactggccgccaagagagccgccagagccgaggccagagacatcagaatgagagagctggagagacagcagaaggagtag

SEQ ID NO: 194739 - protein, 975 aa, Artificial Sequence
  derived and/or modified sequence
MRLGSGTFATCCVAIEVLGIAVFLRGFFPAPVRSSARAEHGAEPPAPEPSAGASSNWTTLPPPLFSKVVIVLIDALRDDFVFGSKGVKFMPYTTYLVEKGASHSFVAEAKPPTVTMPRIKALMTGSLPGFVDVIRNLNSPALLEDSVIRQAKAAGKRIVFYGDETWVKLFPKHFVEYDGTTSFFVSDYTEVDNNVTRHLDKVLKRGDWDILILHYLGLDHIGHISGPNSPLIGQKLSEMDSVLMKIHTSLQSKERETPLPNLLVLCGDHGMSETGSHGASSTEEVNTPLILISSAFERKPGDIRHPKHVQQTDVAATLAIALGLPIPKDSVGSLLFPVVEGRPMREQLRFLHLNTVQLSKLLQENVPSYEKDPGFEQFKMSERLHGNWIRLYLEEKHSEVLFNLGSKVLRQYLDALKTLSLSLSAQVAQYDIYSMMVLTLLLLSVPQALRRKAELEVPLSSPGFSLLFYLVILVLSAVHVIVCTSAESSCYFCGLSWLAAGGVMVLASALLCVIVSVLTNVLVGGNTPRKNPMHPSSRWSELDLLILLGTAGHVLSLGASSFVEEEHQTWYFLVNTLCLALSQETYRNYFLGDDGEPPCGLCVEQGHDGATAAWQDGPGCDVLERDKGHGSPSTSEVLRGREKWMVLASPWLILACCRLLRSLNQTGVQWAHRPDLGHWLTSSDHKAELSVLAALSLLVVFVLVQRGCSPVSKAALALGLLGVYCYRAAIGSVRFPWRPDSKDISKGIIEARFVYVFVLGILFTGTKDLLKSQVIAADFKLKTVGLWEIYSGLVLLAALLFRPHNLPVLAFSLLIQTLMTKFIWKPLRHDAAEITVMHYWFGQAFFYFQGNSNNIATVDISAGFVGLDTYVEIPAVLLTAFGTYAGPVLWASHLVHFLSSETRSGSALSHACFCYALICSIPVFTYIVLVTSLRYHLFIWSVFSPKLLYEGMHLLITAAVCVFFTAMDQTRLTQS

SEQ ID NO: 194740 - protein, 141 aa, Artificial Sequence
  derived and/or modified sequence
MHYWFGQAFFYFQGNSNNIATVDISAGFVGLDTYVEIPAVLLTAFGTYAGPVLWASHLVHFLSSETRSGSALSHACFCYALICSIPVFTYIVLVTSLRYHLFIWSVFSPKLLYEGMHLLITAAVCVFFTWIKPDSHSLRLS

SEQ ID NO: 194741 - DNA, 2928 bp, Artificial Sequence
  derived and/or modified sequence
atgagactgggcagcggcaccttcgccacctgctgcgtggccatcgaggtgctgggcatcgccgtgttcctgagaggcttcttccccgcccccgtgagaagcagcgccagagccgagcacggcgccgagccccccgcccccgagcccagcgccggcgccagcagcaactggaccaccctgcccccccccctgttcagcaaggtggtgatcgtgctgatcgacgccctgagagacgacttcgtgttcggcagcaagggcgtgaagttcatgccctacaccacctacctggtggagaagggcgccagccacagcttcgtggccgaggccaagccccccaccgtgaccatgcccagaatcaaggccctgatgaccggcagcctgcccggcttcgtggacgtgatcagaaacctgaacagccccgccctgctggaggacagcgtgatcagacaggccaaggccgccggcaagagaatcgtgttctacggcgacgagacctgggtgaagctgttccccaagcacttcgtggagtacgacggcaccaccagcttcttcgtgagcgactacaccgaggtggacaacaacgtgaccagacacctggacaaggtgctgaagagaggcgactgggacatcctgatcctgcactacctgggcctggaccacatcggccacatcagcggccccaacagccccctgatcggccagaagctgagcgagatggacagcgtgctgatgaagatccacaccagcctgcagagcaaggagagagagacccccctgcccaacctgctggtgctgtgcggcgaccacggcatgagcgagaccggcagccacggcgccagcagcaccgaggaggtgaacacccccctgatcctgatcagcagcgccttcgagagaaagcccggcgacatcagacaccccaagcacgtgcagcagaccgacgtggccgccaccctggccatcgccctgggcctgcccatccccaaggacagcgtgggcagcctgctgttccccgtggtggagggcagacccatgagagagcagctgagattcctgcacctgaacaccgtgcagctgagcaagctgctgcaggagaacgtgcccagctacgagaaggaccccggcttcgagcagttcaagatgagcgagagactgcacggcaactggatcagactgtacctggaggagaagcacagcgaggtgctgttcaacctgggcagcaaggtgctgagacagtacctggacgccctgaagaccctgagcctgagcctgagcgcccaggtggcccagtacgacatctacagcatgatggtgctgaccctgctgctgctgagcgtgccccaggccctgagaagaaaggccgagctggaggtgcccctgagcagccccggcttcagcctgctgttctacctggtgatcctggtgctgagcgccgtgcacgtgatcgtgtgcaccagcgccgagagcagctgctacttctgcggcctgagctggctggccgccggcggcgtgatggtgctggccagcgccctgctgtgcgtgatcgtgagcgtgctgaccaacgtgctggtgggcggcaacacccccagaaagaaccccatgcaccccagcagcagatggagcgagctggacctgctgatcctgctgggcaccgccggccacgtgctgagcctgggcgccagcagcttcgtggaggaggagcaccagacctggtacttcctggtgaacaccctgtgcctggccctgagccaggagacctacagaaactacttcctgggcgacgacggcgagcccccctgcggcctgtgcgtggagcagggccacgacggcgccaccgccgcctggcaggacggccccggctgcgacgtgctggagagagacaagggccacggcagccccagcaccagcgaggtgctgagaggcagagagaagtggatggtgctggccagcccctggctgatcctggcctgctgcagactgctgagaagcctgaaccagaccggcgtgcagtgggcccacagacccgacctgggccactggctgaccagcagcgaccacaaggccgagctgagcgtgctggccgccctgagcctgctggtggtgttcgtgctggtgcagagaggctgcagccccgtgagcaaggccgccctggccctgggcctgctgggcgtgtactgctacagagccgccatcggcagcgtgagattcccctggagacccgacagcaaggacatcagcaagggcatcatcgaggccagattcgtgtacgtgttcgtgctgggcatcctgttcaccggcaccaaggacctgctgaagagccaggtgatcgccgccgacttcaagctgaagaccgtgggcctgtgggagatctacagcggcctggtgctgctggccgccctgctgttcagaccccacaacctgcccgtgctggccttcagcctgctgatccagaccctgatgaccaagttcatctggaagcccctgagacacgacgccgccgagatcaccgtgatgcactactggttcggccaggccttcttctacttccagggcaacagcaacaacatcgccaccgtggacatcagcgccggcttcgtgggcctggacacctacgtggagatccccgccgtgctgctgaccgccttcggcacctacgccggccccgtgctgtgggccagccacctggtgcacttcctgagcagcgagaccagaagcggcagcgccctgagccacgcctgcttctgctacgccctgatctgcagcatccccgtgttcacctacatcgtgctggtgaccagcctgagataccacctgttcatctggagcgtgttcagccccaagctgctgtacgagggcatgcacctgctgatcaccgccgccgtgtgcgtgttcttcaccgccatggaccagaccagactgacccagagctag

SEQ ID NO: 194742 - DNA, 2928 bp, Artificial Sequence
  derived and/or modified sequence
atgagacttggctcaggtaccttcgctacttgttgcgttgcgatcgaagtcctgggaatcgcagtgttcttaagaggcttcttccctgccccagtgcggtcatctgctcgggccgaacacggggcggagccgcctgctcccgaaccgagcgcaggagcctcctcaaattggacaacgctcccacctcctctcttctctaaggtggtgatagtcctgatcgatgccctgcgggacgatttcgtgtttggcagtaagggtgtgaaattcatgccctacacgacttatctagtggagaagggggcaagccattcctttgtggcagaggccaaacctccgacagtaactatgccccggataaaggctctgatgactggatccttacccggctttgttgatgtgatacgcaacttgaactccccggccctgcttgaagacagcgtgattcggcaggctaaggctgctggcaaacggatagtgttctatggggatgaaacctgggtgaaattgttcccaaagcatttcgtggagtatgatggaacaacctcctttttcgtctctgactacaccgaggttgacaataatgtgacccgacaccttgacaaagtcctgaaacgcggggattgggatatcctgatcctccattatcttggccttgatcacattggacatattagcggcccaaatagccctctgatcgggcaaaaacttagtgagatggatagcgtgctgatgaagattcacacaagcctacagagtaaagaacgcgagacccccctccctaacctgcttgtgctgtgtggagatcatggtatgtctgagactggcagccatggagcctcctccacagaggaggttaacacaccactgatcctcatctcctcagcctttgagaggaagcccggtgacattcggcatccaaaacacgtgcaacagaccgatgtggccgctaccctggccattgccctggggctgccaattcccaaagattctgtcgggtctttacttttccctgtggtcgaagggaggcccatgcgggagcagcttcgtttcctgcacttgaacacagtgcagctgtccaagcttctgcaggagaacgtcccttcctatgagaaagatcctggttttgagcagtttaagatgagtgaacggctccacgggaattggataagactgtatctggaggagaaacactccgaggtactgttcaacctgggatcaaaagtgttgaggcaatatctggatgcactaaaaacactgtcattaagcctttctgcccaggtagctcagtatgatatctactcaatgatggtgcttaccctgctgctgctgtctgtcccccaagcgctccgacgaaaagctgagctggaggttcccttgtcttcccccggtttttcactcttgttttacttggttatactcgtcctatccgctgttcatgtgatagtctgcacctcagcagagagtagctgctatttttgtggactctcctggctggctgccggcggcgttatggtgctggcatccgctctgttatgtgtgatcgtcagtgtgctgactaacgtcctggtgggggggaacacgcccagaaagaaccctatgcacccaagtagcagatggtcagaattagatttgctgatattgcttggaactgcgggtcatgtactgtctctcggagcaagtagcttcgtggaggaagagcaccagacctggtatttcctggtgaatacactgtgcctcgccctgtcacaggaaacgtataggaattactttttgggagacgatggcgaaccaccatgtggtctatgtgtggaacaaggccacgatggagcaacagccgcttggcaggacggcccaggctgcgacgtgctagaaagggacaaggggcacggaagtccatccacaagcgaggtgctgcgcgggcgtgagaagtggatggtactcgccagcccatggcttatcctcgcctgctgtcggttgcttagatccctgaaccagaccggagtacagtgggctcacagaccggacctgggccattggctgacaagttcggatcataaagccgagctgtcagttctggctgcactatccctgttggtggtattcgtgctggtgcagcgcggatgctcaccagtgtctaaggccgcattggctctgggcctgctaggcgtgtattgctaccgtgcagcaatcggcagtgtgagattcccatggcgccctgactctaaggatattagtaagggaatcattgaagcccggtttgtttacgtcttcgtcttgggcatactcttcactgggactaaagatttgttgaagtcacaagtcatcgcggcggattttaagcttaagaccgtgggtctctgggaaatttattctggcttagtcctgctggccgctctgctttttaggcctcacaacttacccgttctcgcctttagcctgctgatccagacgctcatgaccaaatttatttggaagcctttgagacacgacgccgctgagattaccgttatgcattactggttcggacaggccttcttttatttccaaggtaattccaacaacattgccaccgtagacatcagcgccggatttgtggggttggatacctacgtggagatccctgctgtgttactcaccgcatttggtacctacgctggccctgttctctgggccagtcacctcgtgcatttcctgtcatcagaaacacggtccggttccgctctgagccatgcttgtttttgctacgcactgatctgttccattcctgtcttcacatatattgtactagtgactagcctgaggtatcatcttttcatttggtctgtgttttcccccaagctgctgtacgaaggcatgcatttactcattacggccgccgtctgcgtgttctttaccgcgatggatcagacacggttgactcaaagttag

SEQ ID NO: 194743 - DNA, 2928 bp, Artificial Sequence
  derived and/or modified sequence
atgaggctgggcagcggcacctttgccacctgctgcgtggccatcgaggtgctgggcattgctgtgttcctgcggggcttcttccctgcccctgtgcgcagcagcgcccgggcagagcacggggctgagcccccagcccctgagcccagcgctggggccagcagcaactggaccaccctgcccccacccctcttcagcaaggtggtgattgtgctgattgatgccctgagagatgactttgtgtttggcagcaaaggagtgaagttcatgccctacaccacctacctggtggagaagggggccagccacagctttgtggccgaggccaagcccccaacagtgaccatgccccgcatcaaggccctgatgacaggcagcctgcccggctttgtggatgtgatccggaacctgaacagccctgccctgctggaggacagcgtcatccggcaggccaaggccgccggcaagagaattgtgttctatggagatgagacctgggtgaagctgttccccaagcactttgtggagtatgatggcaccaccagcttctttgtgtctgactacacagaggtggacaacaacgtgaccaggcacctggacaaggtgctgaagagaggagactgggacatcctgatcctgcactacctgggcctggaccacatcggccacatcagcggccccaacagccccctcatcggccagaagctgtctgagatggattctgtgctgatgaagatccacaccagcctgcagagcaaggagcgggagacccccctgcccaacctgctggtgctgtgtggggaccacggcatgtctgagaccggcagccatggagccagcagcacagaggaggtgaacacccccctcatcctgatcagcagcgcctttgagaggaagccaggggacatccgccaccccaagcacgtgcagcagacagatgtggccgccaccctggccatcgccctgggcctgcccatccccaaggacagcgtgggcagcctgctcttccctgtggtggagggccggcccatgagggagcagctgcgcttcctgcacctgaacacagtgcagctgagcaagctgctgcaggagaatgtgcccagctatgagaaggaccccggctttgagcagttcaagatgtctgagcggctgcacggcaactggatccggctgtacctggaggagaagcacagcgaggtgctcttcaacctgggcagcaaggtgctgcggcagtacctggatgccctgaagaccctgagcctgagcctgagcgcccaggtggcccagtatgacatctacagcatgatggtgctgaccctgctgctgctgtctgtgccccaggccctgcggaggaaggccgagctggaggtgcccctgagcagccctggcttcagcctgctcttctacctggtgatcctggtgctgtctgctgtgcacgtgattgtgtgcaccagcgctgagagcagctgctacttctgtggcctgtcctggctggccgccggcggcgtgatggtgctggccagcgccctgctgtgtgtgattgtgtctgtgctgaccaacgtgctggtgggcggcaacacccccaggaagaaccccatgcaccccagcagccgctggagcgagctggacctgctgatcctgctgggcacagctggccacgtgctgagcctgggcgccagcagctttgtggaggaggagcaccagacctggtacttcctggtgaacaccctgtgcctggccctgagccaggagacctacagaaactacttcctgggagatgatggagagcccccctgtggcctgtgtgtggagcagggccatgatggagccacagctgcctggcaggacggccctggctgtgatgtgctggagcgggacaagggccacggcagccccagcaccagcgaggtgctgcggggccgggagaagtggatggtgctggccagcccctggctgatcctggcctgctgccgcctgctgcggagcctgaaccagacaggagtgcagtgggcccacaggccagacctgggccactggctgaccagcagtgaccacaaggccgagctgtctgtgctggccgccctgagcctgctggtggtgtttgtgctggtgcagaggggctgcagccctgtgtccaaggccgccctggccctgggcctgctgggcgtgtactgctaccgggccgccatcggctctgtgcgcttcccctggaggccagacagcaaggacatcagcaagggcatcatcgaggccaggtttgtgtatgtgtttgtgctgggcatcctcttcaccggcaccaaggacctgctgaagagccaggtgattgctgctgacttcaagctgaagacagtgggcctgtgggagatctacagcggcctggtgctgctggccgccctgctcttccggccccacaacctgcctgtgctggccttcagcctgctgatccagaccctgatgaccaagttcatctggaagcccctgcggcatgatgctgctgagatcaccgtgatgcactactggtttggccaggccttcttctacttccagggcaacagcaacaacatcgccaccgtggacatctctgctggctttgtgggcctggacacctacgtggagatcccagctgtgctgctgacagccttcggcacctacgccggccctgtgctgtgggccagccacctggtgcacttcctgagcagcgagaccaggagcggcagcgccctgagccacgcctgcttctgctacgccctgatctgcagcatccctgtgttcacctacatcgtgctggtgaccagcctgcgctaccacctgttcatctggagcgtcttcagccccaagctgctgtatgagggcatgcacctgctgatcacagctgctgtgtgtgtgttcttcaccgccatggaccagacccggctgacccagagctag

SEQ ID NO: 194744 - DNA, 2928 bp, Artificial Sequence
  derived and/or modified sequence
atgcggctgggcagcggcaccttcgccacctgctgcgtggccatcgaagtactcggcattgccgtctttctgagagggttttttcctgctcctgtgagaagctccgcacgcgccgaacatggggctgagcctccagccccggagccctccgccggagcaagcagtaattggaccacactcccgccccctctgttttccaaggtggttattgttctcatcgatgccttacgtgatgattttgtcttcggctcaaagggggttaagttcatgccttatacaacctacctcgtcgagaaaggtgctagccactcctttgtagccgaagccaaaccccccaccgtaaccatgccaagaatcaaggctttaatgactggatctttacccggatttgttgatgtgatacggaacctgaactctccagcactcctggaagactcagtgattcggcaggctaaagctgcaggcaaaaggatcgtgttttatggggatgaaacgtgggtgaagctgttcccgaagcacttcgtggaatatgacggaaccactagcttcttcgtcagcgactacacggaggtggacaacaatgtcacacggcacctcgataaggtgctaaagcggggagactgggacattctcatactacattacctgggactggatcatattggacatatctcaggaccaaatagtcctctgattggtcagaagctaagcgaaatggattctgtactgatgaagatacacacctctttgcaatcaaaagagagggagacaccactgcccaatctactcgtgttgtgtggtgatcatggtatgtccgaaaccggttcccatggcgccagttctacagaggaagtgaacacaccgttgattttgatctcatctgcctttgaacgaaaacctggagacatcagacatccgaaacacgtccaacagactgatgttgcggcgacattggcaatcgccttgggcctgcccatccctaaagattccgtcggcagtctgctattcccagtcgtagaggggaggccaatgagggagcagttgcggtttttgcatctgaacactgttcagctcagcaaactcctgcaagaaaacgtaccaagctatgaaaaggatcccggttttgagcagttcaaaatgagcgagaggctgcatggaaattggattaggctgtatctggaagagaagcattctgaggtgttgttcaacctgggtagtaaggttcttcgacagtatcttgatgcattgaaaacactctccctgagtcttagcgcccaggtggcccagtatgatatctactcaatgatggtactgacactactgctgctgtccgtgccacaagcactgcgtaggaaagccgagcttgaggtgcccttgtcatcaccaggcttctccctgctgttttatcttgtgatcctggtcctatcggcagtccacgtaatcgtatgtacctctgccgagagcagttgctatttttgcggccttagttggttagcagcagggggggtcatggtgctggcgtccgccctcctttgtgtgatagtctccgtcctgactaacgtgttggttggtggaaataccccacggaagaaccctatgcacccttcatcaagatggtcagaacttgacctcctgatcctgctgggaactgcaggccatgtgttaagtctgggagccagcagttttgttgaggaagagcaccagacttggtactttctggtaaatactctgtgcttagcgctttcacaggaaacatacagaaattacttcttaggtgacgacggggagcctccgtgcggactgtgtgtcgaacagggtcatgatggcgcaacagctgcgtggcaagacggtccagggtgcgacgtcttagaacgagacaaaggacatggatctccaagtacctcagaagtactgcgagggcgagagaagtggatggtgctggctagcccttggctgatcttagcctgttgtagactgctcaggtccctgaatcagaccggcgtgcaatgggcacataggccagacttgggacactggctgactagttccgatcataaggccgaattgtcggtcctagcggctttaagcctgttggtggtgtttgtgctggtccaacgtggttgtagccctgtgtccaaggcagctttggcgctgggcctgttgggtgtctattgctatagagcggcgattggcagtgtgcgatttccatggagacccgatagcaaagacatttcaaaagggatcattgaggctcgttttgtttatgtgttcgtactgggcattctttttactggcaccaaggacctgttgaaatctcaggttatcgcagccgactttaagctgaagaccgtgggcctttgggagatctattctggtctggtcctgttggcagccctgctattcaggccacacaacctgcccgtgctggcattctctctacttatccagacattgatgactaaatttatttggaaaccactgcgacacgacgcagccgagataacggtgatgcactactggtttggacaggcttttttctactttcaggggaattcaaataatattgccacggttgatattagcgcaggatttgtgggtcttgatacctacgtcgaaatccccgcggtgcttctgaccgccttcggcacttacgccggacccgtcctttgggcttctcatcttgttcactttttgtctagcgaaacacgctccgggtccgccttgtcacacgcatgcttttgctacgctctcatctgctctatcccagttttcacctatatcgtgttagtgacatcactgagatatcacttgttcatttggagtgtgttcagccctaagttgctgtacgagggaatgcatctgctgattacagctgccgtatgtgtgttctttacagctatggaccagacgcgcctcacccagtcatag

SEQ ID NO: 194745 - DNA, 3203 bp, Artificial Sequence
  derived and/or modified sequence
gacgataaggcctggcgttattgcttagaggcggctacctggagccggaagcgcggctgcagcagggcgaggctccaggtggggtcggttccgcatccagcctagcgtgtccacgatgcggctgggctccgggactttcgctacctgttgcgtagcgatcgaggtgctagggatcgcggtcttccttcggggattcttcccggctcccgttcgttcctctgccagagcggaacacggagcggagcccccagcgcccgaaccctcggctggagccagttctaactggaccacgctgccaccacctctcttcagtaaagttgttattgttctgatagatgccttgagagatgattttgtgtttgggtcaaagggtgtgaaatttatgccctacacaacttaccttgtggaaaaaggagcatctcacagttttgtggctgaagcaaagccacctacagttactatgcctcgaatcaaggcattgatgacggggagccttcctggctttgtcgacgtcatcaggaacctcaattctcctgcactgctggaagacagtgtgataagacaagcaaaagcagctggaaaaagaatagtcttttatggagatgaaacctgggttaaattattcccaaagcattttgtggaatatgatggaacaacctcatttttcgtgtcagattacacagaggtggataataatgtcacgaggcatttggataaagtattaaaaagaggagattgggacatattaatcctccactacctggggctggaccacattggccacatttcagggcccaacagccccctgattgggcagaagctgagcgagatggacagcgtgctgatgaagatccacacctcactgcagtcgaaggagagagagacgcctttacccaatttgctggttctttgtggtgaccatggcatgtctgaaacaggaagtcacggggcctcctccaccgaggaggtgaatacacctctgattttaatcagttctgcgtttgaaaggaaacccggtgatatccgacatccaaagcacgtccaacagacggatgtggctgcgacactggcgatagcacttggcttaccgattccaaaagacagtgtagggagcctcctattcccagttgtggaaggaagaccaatgagagagcagttgagatttttacatttgaatacagtgcagcttagtaaactgttgcaagagaatgtgccgtcatatgaaaaagatcctgggtttgagcagtttaaaatgtcagaaagattgcatgggaactggatcagactgtacttggaggaaaagcattcagaagtcctattcaacctgggctccaaggttctcaggcagtacctggatgctctgaagacgctgagcttgtccctgagtgcacaagtggcccagtacgacatctattcgatgatggttctcaccctgctcctgctcagcgtcccacaggcactgcgcagaaaggctgagctggaagtcccactgtcatctcctgggttttctctgctcttttatttggtgatcctggttctttcggccgttcacgtcattgtgtgcacctcagctgaaagttcgtgctacttctgtggcctctcgtggctggcggcaggtggggtgatggtgctggcctcggcgctgctgtgtgtgattgtgtctgttctgaccaacgtgctcgtgggtggaaacaccccaaggaagaaccccatgcatcccagctcaaggtggtcagagctagaccttcttattctgttggggacggcgggccacgtcttgagcctgggcgccagcagcttcgtggaggaggagcaccagacctggtacttccttgtgaacaccctgtgtctagctctgagccaagaaacctacagaaactactttctgggagatgacggtgagcctccgtgtggcctctgtgtggaacaagggcatgacggggccacagcagcgtggcaggacgggcctggctgtgatgtcctggagcgagacaaaggccacggaagcccctctacctccgaagtgctcagaggccgcgagaagtggatggtgctggccagtccgtggctaatactggcctgctgccggctgctgcgctccctaaaccagacaggtgtgcagtgggctcaccggcctgacctcggccactggctcaccagctctgaccacaaagccgagctctctgtcctggctgccctctccctcctcgtagtttttgtgctggtgcagagggggtgctcccctgtgtccaaggctgccctggcgctggggctgctgggcgtctactgctaccgggcggccatcgggagtgtccggttcccgtggcggccggacagcaaggacatttccaagggtattattgaagctcgttttgtttatgtctttgtccttggcattctgttcacgggcaccaaagacttacttaaatctcaagtcattgctgcagacttcaaactcaagactgtaggtttatgggagatatatagtggattagttcttctggcagccttgctctttagaccacataatcttccggtcttagcatttagcctcttgattcagactctaatgactaaattcatctggaagcccctgagacacgatgcagctgagattactgtgatgcattattggtttggtcaagcattcttctattttcagggcaactccaacaacattgccaccgtggacatctccgcaggcttcgtgggcttagacacctacgtggaaatcccagccgtgctcctgacagcgtttgggacgtacgcagggcctgtgctgtgggccagccacttagtgcacttcctgagctcagaaacacgcagtggttcagcactgagtcatgcttgcttctgctacgcactgatttgttctattccagttttcacgtacatcgttttggtgacatctctgcgttatcatttatttatatggagtgtattttctccaaaacttctctacgagggaatgcacctgctcattacagctgctgtctgtgtattcttcacggcaatggatcaaaccagactcacacagtcttagactaagctgaacactggaaaaataatacatgcttaaagtctgctgttattctaaaatgaaagatatgaattcaacaaagttgatggataactttctttgactgctctacctgaatttagactaagcagtaaatagtttaataaaagatcactttaatata

SEQ ID NO: 194746 - DNA, 2928 bp, Artificial Sequence
  derived and/or modified sequence
atgaggctggggagcgggactttcgctacatgctgtgtggccatcgaggtgctggggatcgctgttttcctgcgaggcttttttcccgctcctgttcgcagcagcgccagagcagagcacggggcagagcccccagccccagagccttctgctggggctagttccaattggaccaccctgccaccacccctgttcagcaaggtagtgatagtgctcattgacgccctacgggatgatttcgtattcggctcaaaaggagtgaaattcatgccatatactacctacctcgtggaaaagggcgcttctcattcttttgttgccgaagccaagccgccaacagttacgatgcccaggatcaaggcgctgatgactggatccctacccggtttcgtcgatgtaatccggaatttgaactctccggcactgttggaagactcagtgattcggcaggctaaggcagccggaaagaggattgtgttttacggggacgagacgtgggttaaactcttccctaaacacttcgtggagtatgacgggacaacaagcttcttcgtgtcagactacactgaggtcgacaacaatgtcacgcggcatctggacaaggttcttaagagaggcgactgggacattctgattctgcactaccttggactcgatcacatcggtcacatctcaggcccaaactctccgcttataggacaaaagctgagtgagatggactcagttctgatgaagatccatacttcgctccagagtaaagagagagaaacacccctgccaaacttgcttgtgctatgtggcgatcacggaatgagcgaaactggatctcacggcgcaagctccaccgaggaagttaatactcctctgattcttatctcttctgcctttgaaagaaagccaggggacatcaggcacccgaagcacgtccagcagaccgacgtggccgctacactggccatagccctgggcctgccaatccccaaggatagcgtaggatcactcctgtttcccgttgtggaggggaggccaatgcgggaacagttacgcttcctgcacctgaacaccgtgcagttatcgaagttgctccaggagaacgtaccctcctatgagaaggaccctggcttcgaacagttcaagatgtccgaaaggctccacggaaattggattaggttgtacctcgaagagaagcactccgaggttctgttcaatctcgggagcaaagtcttgaggcaatatttagacgccctcaagaccctctccctctcgctcagtgcccaggttgcacagtacgacatctattccatgatggtcctgactctgctcctcctcagcgtgccccaagcactgcgcagaaaagccgagctggaggttccactgtcaagtcctggattctccctgttgttttatttagtgatactcgtgctttctgccgtccacgtcatagtgtgcacatcggcggagtctagctgctatttctgcggcctgagctggctggccgctggaggggtgatggtgttggccagtgcgcttttgtgcgtgatcgtatctgtccttacaaatgtgctagttggcggaaacaccccacgcaagaatcccatgcaccctagctctaggtggagcgagctcgacttgctgattcttttggggaccgccggacatgtcctgtccctgggcgcttcaagttttgtagaggaggaacaccaaacttggtattttctggttaatacgctttgtctggccctctctcaagagacatacagaaactatttcttgggtgacgacggcgagccaccatgtggtctctgtgtggagcaggggcatgacggggctaccgccgcatggcaggacggcccaggatgtgacgttcttgagcgggacaagggacacggatcgccaagcaccagtgaagtcctgaggggtagggagaaatggatggtccttgcctccccctggcttatcctggcgtgttgccgcctgctgcgatctctcaaccagacaggagtgcagtgggcgcaccgccctgacttgggccactggcttactagcagcgatcacaaggccgaactgtctgttctcgctgctctttcactgttagtggtcttcgtcctagttcagagggggtgctcccctgtgtccaaagctgccctggccctcggcctcttgggcgtttactgctatcgcgcagcaattgggtcagtgcgatttccctggcgtcccgattccaaagatatatctaaaggaattattgaggccaggttcgtatatgtgtttgtccttgggattctgtttacgggaaccaaagatctgttgaaaagtcaggtgatcgccgcagacttcaaattgaagacggtggggctgtgggagatttatagcggcctcgtcctcctagccgcactgctcttccgccctcacaatctcccagtcctggccttttctttactgatccagacactgatgacaaaatttatctggaaaccgctgaggcatgacgccgcagaaatcacagtcatgcactactggttcggccaggcatttttttactttcaagggaattcgaataacattgctaccgtggatatctccgcaggttttgtgggactggacacttacgtcgaaattccggctgttctgctgaccgcttttggaacatatgccggtcccgtgctgtgggcctcccatcttgtccacttcctcagctcggagacacggtcaggatccgccctatcgcacgcatgtttttgctacgccctcatttgctccatccctgtattcacctacatagtgctcgttacctcactgcgataccacctctttatttggtcggtattcagtcctaagctgctttatgaagggatgcatctgctgataaccgctgctgtgtgcgtgttttttacagccatggatcaaacaagattaacgcaaagttag

SEQ ID NO: 194747 - protein, 1406 aa, Artificial Sequence
  derived and/or modified sequence
MAARSPPSPHPSPPARQLGPRSPRVGRGAEVHAMRSEASGFAGAAREVVADESDKIWVGEEGSGGRRGPGGAAPAHAPLLSAPMGSRRLEGISVEEAMVTRTQLLEEELSSLKEELALCQADKEFVWSLWKRLQVTNPDLTQVVSLVVEREKQKSEAKDRKVLEILQVKDAKIQEFEQRESVLKQEINDLVKRKIAVDEENAFLRKEFSDLEKKFKDKSQEIKDTKECVQNKEEQNRLVIKNLEEENKKLSTRCTDLLNDLEKLRKQEAHLRKEKYSTDAKIKTFEDNLIEARKEVEVSQSKYNALSLQLSNKQTELIQKDMDITLVRKELQELQNLYKQNSTHTAQQAELIQQLQVLNMDTQKVLRNQEDVHTAESISYQKLYNELHICFETTKSNEAMLRQSVTNLQDQLLQKEQENAKLKEKLQESQGAPLPLPQESDPDYSAQVPHRPSLSSLETLMVSQKSEIEYLQEKLKIANEKLSENISANKGFSRKSIMTSAEGKHKEPPVKRSRSLSPKSSFTDSEELQKLRKAERKIENLEKALQLKSQENDELRDAHEKRKERLQMLQTNYRAVKEQLKQWEEGSGMTEIRKIKRADPQQLRQEDSDAVWNELAYFKRENQELMIQKMNLEEELDELKVHISIDKAAIQELNRCVAERREEQLFRSGEDDEVKRSTPEKNGKEMLEQTLQKVTELENRLKSFEKRSRKLKEGNKKLMKENDFLKSLLKQQQEDTETREKELEQIIKGSKDVEKENTELQVKISELETEVTSLRRQVAEANALRNENEELINPMEKSHQSADRAKSEMATMKVRSGRYDCKTTMTKVKFKAAKKNCSVGRHHTVLNHSIKVMSNVFENLSKDGWEDVSESSSDSEAQTSQTLGTIIVETSQKISPTEDGKDQKESDPTEDSQTQGKEIVQTYLNIDGKTPKDYFHDKNAKKPTFQKKNCKMQKSSHTAVPTRVNREKYKNITAQKSSSNIILLRERIISLQQQNSVLQNAKKTAELSVKEYKEVNEKLLHQQQVSDQRFQTSRQTIKKLNLDLAGLRKEKEDLLKKLESSSEITSLAEENSQVTFPRIQVTSLSPSRSMDLEMKQLQYKLKNATNELTKQSSNVKTLKFELLAKEEHIKEMHEKISRMERDITMKRHLIEDLKFRQKVNLESNKSFSEMLQNLDKKVKTLTEECSNKKVSIDSLKQRLNVAVKEKSQYEQMYQKSKEELEKKDLKLTLLVSRISETESAMAEIETAASKQLQELALQSEQVLEGAQKTLLLANEKVEEFTTFVKALAKELQNDVHVVRRQIRELKKMKKNRDACKTSTHKAQTLAASILNISRSDLEEILDTEDQVEIEKTKIDAENDKEWMLYIQKLLEGQLPFASYLLEAVLEKINEKKKLVEGYFTIMKDIR

SEQ ID NO: 194748 - protein, 1406 aa, Artificial Sequence
  derived and/or modified sequence
MAARSPPSPHPSPPARQLGPRSPRVGRGAEVHAMRSEASGFAGAAREVVADESDKIWVGEEGSGGRRGPGGAAPAHAPLLSAPMGSRRLEGISVEEAMVTRTQLLEEELSSLKEELALCQADKEFVWSLWKRLQVTNPDLTQVVSLVVEREKQKSEAKDRKVLEILQVKDAKIQEFEQRESVLKQEINDLVKRKIAVDEENAFLRKEFSDLEKKFKDKSQEIKDTKECVQNKEEQNRLVIKNLEEENKKLSTRCTDLLNDLEKLRKQEAHLRKEKYSTDAKIKTFEDNLIEARKEVEVSQSKYNALSLQLSNKQTELIQKDMDITLVRQELQELQNLYKQNSTHTAQQAELIQQLQVLNMDTQKVLRNQEDVHTAESISYQKLYNELHICFETTKSNEAMLRQSVTNLQDQLLQKEQENAKLKEKLQESQGAPLPLPQESDPDYSAQVPHRPSLSSLETLMVSQKSEIEYLQEKLKIANEKLSENISANKGFSRKSIMTSAEGKHKEPPVKRSRSLSPKSSFTDSEELQKLRKAERKIENLEKALQLKSQENDELRDAHEKRKERLQMLQTNYRAVKEQLKQWEEGSGMTEIRKIKRADPQQLRQEDSDAVWNELAYFKRENQELMIQKMNLEEELDELKVHISIDKAAIQELNRCVAERREEQLFRSGEDDEVKRSTPEKNGKEMLEQTLQKVTELENRLKSFEKRSRKLKEGNKKLMKENDFLKSLLKQQQEDTETREKELEQIIKGSKDVEKENTELQVKISELETEVTSLRRQVAEANALRNENEELINPMEKSHQSADRAKSEMATMKVRSGRYDCKTTMTKVKFKAAKKNCSVGRHHTVLNHSIKVMSNVFENLSKDGWEDVSESSSDSEAQTSQTLGTIIVETSQKISPTEDGKDQKESDPTEDSQTQGKEIVQTYLNIDGKTPKDYFHDKNAKKPTFQKKNCKMQKSSHTAVPTRVNREKYKNITAQKSSSNIILLRERIISLQQQNSVLQNAKKTAELSVKEYKEVNEKLLHQQQVSDQRFQTSRQTIKKLNLDLAGLRKEKEDLLKKLESSSEITSLAEENSQVTFPRIQVTSLSPSRSMDLEMKQLQYKLKNATNELTKQSSNVKTLKFELLAKEEHIKEMHEKISRMERDITMKRHLIEDLKFRQKVNLESNKSFSEMLQNLDKKVKTLTEECSNKKVSIDSLKQRLNVAVKEKSQYEQMYQKSKEELEKKDLKLTLLVSRISETESAMAEIETAASKQLQELALQSEQVLEGAQKTLLLANEKVEEFTTFVKALAKELQNDVHVVRRQIRELKKMKKNRDACKTSTHKAQTLAASILNISRSDLEEILDTEDQVEIEKTKIDAENDKEWMLYIQKLLEGQLPFASYLLEAVLEKINEKKKLVEGYFTIMKDIR

SEQ ID NO: 194749 - DNA, 4221 bp, Artificial Sequence
  derived and/or modified sequence
atggctgctcgctctccaccttctccgcacccaagtccacccgcgcggcagctgggcccgaggtctcctcgtgtgggtaggggagccgaggtgcatgctatgaggagcgaggcaagcggctttgccggcgccgcccgagaggtcgttgccgacgagtctgacaagatatgggtaggcgaagagggcagcggaggtcgccggggccctgggggagcagccccagcgcatgcccctctgttgtccgcccctatgggatcacgtaggctggagggtataagcgtcgaggaggctatggtgactagaactcagttactggaggaggaactgtcttccctgaaggaagagctggctctttgccaggcagacaaggaattcgtgtggtccctctggaaaaggttgcaggtaactaacccagacctgactcaggtggtgagtctggtcgtggagagggaaaagcagaaaagcgaggccaaggaccgcaaagtcctcgagattctgcaggtgaaggacgccaagatccaagagtttgagcagcgcgaaagcgtcttgaagcaggaaattaacgatctggtgaagaggaaaattgccgtcgatgaggaaaacgcttttctgcggaaggagttttccgatttggagaaaaagtttaaggacaagtcacaggaaattaaggacaccaaggagtgcgtgcagaataaggaggagcagaacagattggtgatcaagaatctggaggaggagaacaagaagcttagtacccgttgcacagatctgttaaatgatctcgagaaactgcgcaagcaggaggctcaccttagaaaagaaaagtactccaccgatgcaaaaatcaagacatttgaggataatctcattgaggcgcggaaggaggttgaagtcagccagtctaagtacaatgcattgtcccttcaactaagtaacaaacagactgagctcattcaaaaggatatggacatcacgctagtccgaaaggagctgcaggagctccagaatctttataagcagaacagcacacacaccgctcagcaggcagaacttatacagcaactacaggttttgaacatggacacccagaaagtactcaggaatcaagaggacgtgcatacagctgaaagcatcagctaccagaagttgtacaacgaacttcacatttgcttcgagacaaccaaatcaaatgaggccatgctcagacagagcgtgactaacttacaggaccaactcctgcagaaagagcaggagaatgccaaattaaaagagaagctgcaggagagtcagggggcaccactgcccctacctcaggagagtgaccccgactacagcgcccaggtaccccatagaccgagcctgtcatccctagaaaccctgatggtatcccaaaagtcagagatagagtacttacaggagaagctcaagatagctaatgagaaactgtcagagaacatctctgcaaacaagggcttttcacgaaaatctattatgacgtcagctgagggtaagcataaggagccccctgtcaagcgctctagatcacttagcccgaaaagctcatttactgacagcgaggagttacagaaactgcgcaaggccgagcgcaagatcgaaaatttagaaaaggctttgcagttgaaatcccaggagaatgatgagttaagggacgcgcacgaaaagcgcaaggaacgactgcaaatgttgcaaactaactatagagctgtaaaggagcagctgaaacagtgggaagaaggcagtgggatgactgaaatccgcaaaatcaaacgggcggatccccagcagctccgccaggaagactctgacgcggtatggaacgaacttgcctactttaagcgggaaaatcaagagttgatgatccagaaaatgaacctagaagaagagcttgacgagcttaaagtccatatcagcatagacaaagccgctattcaggagttaaaccgatgcgttgctgaacgtcgagaagaacagctctttcgctccggagaggatgatgaggtgaagcggtccaccccagagaaaaacggtaaggaaatgctggaacagactttgcaaaaagttacagaactggagaatcgccttaagtcttttgagaagcgaagcaggaagctaaaagagggtaataagaagctgatgaaagagaacgattttctgaagtcactgcttaagcagcaacaggaggacactgagacaagggaaaaggaattggaacagattattaaggggtcaaaagacgtggaaaaggagaataccgagctgcaagtcaagatcagcgaactcgaaaccgaggtgacgtccctgaggaggcaagtggccgaggcaaatgctctgagaaatgagaatgaggagctgataaatccaatggagaagtcacaccagtctgcagatagggcaaaaagtgagatggcgactatgaaggtacggtcgggaaggtatgattgtaagactacgatgaccaaggtaaagttcaaggctgcgaaaaagaactgctctgttgggcgacaccacactgttctaaaccatagcattaaggtgatgtcaaacgttttcgagaacctgtcaaaagatgggtgggaagacgtgagtgaatctagctcagacagcgaggcacagacttcccagacattgggaacgatcattgttgagactagccagaaaatctcccccacagaggacggtaaggatcagaaggaatcagatcctactgaggactcacaaacccagggaaaggaaattgttcaaacttatctcaatatcgatgggaagacgcccaaagattatttccatgataaaaatgctaagaagcccacgttccagaaaaagaattgcaaaatgcagaaaagctcccataccgccgtgcctacccgagttaatagagagaagtacaaaaacatcaccgcccagaagtcctcctctaatattatactactgagggagcgcatcatctccctgcagcaacaaaatagcgtgctccagaatgcaaaaaagaccgcagaattgagcgtcaaggagtacaaagaggtgaacgaaaaactactccatcagcaacaggtttccgatcagcgatttcagacgtcacggcagaccattaaaaaactgaacttggatttagccggactccgcaaagaaaaagaggatctgctgaagaagctcgagtcaagctcagaaatcactagcttggcagaggagaactcccaagtaacttttccgcgcatccaggtaactagcctgtctccctccaggtctatggatctagagatgaagcagcttcagtacaaattaaaaaacgcaactaacgaacttacaaagcagtcgagcaatgtgaaaaccctcaagttcgaactactcgccaaagaagagcatatcaaagaaatgcacgagaagatctctcgtatggagcgtgacattactatgaaacgacacttaatcgaagacctcaagttcaggcagaaggttaaccttgagtcaaataagtccttcagcgaaatgctgcagaatctggataagaaggtcaagactttgacggaggaatgctcaaataaaaaggtgtctatcgattctttgaaacaacgtcttaacgtggccgttaaagagaaatcccagtacgagcaaatgtaccaaaagtcaaaggaagaactggagaagaaagacctgaaactcaccctcctcgttagtaggatctcagaaacagaatctgcaatggccgagatcgagaccgctgccagtaagcaactacaagaactggctctccaatcagaacaggtcttggaaggagcgcagaagacactcctcctagcaaacgagaaagtggaagagttcacgacattcgttaaagccctcgccaaggagctccagaatgatgtacacgtcgtcagacgacagattcgggaactcaagaagatgaaaaagaaccgtgacgcctgtaagacaagcacccacaaagcccaaaccctcgcggcctccatcctgaatatctcaaggtcagacctggaagagatccttgacacggaggatcaggttgaaatcgaaaagacgaagattgatgccgaaaatgacaaggagtggatgctctatatccaaaagttgctggagggccagttgccttttgccagttacctgctggaggcagtccttgagaaaattaatgaaaagaagaagctggttgagggttatttcactataatgaaggacatcagatag

SEQ ID NO: 194750 - DNA, 4221 bp, Artificial Sequence
  derived and/or modified sequence
atggctgctagatcaccgcctagccctcacccttcccccccagcccggcagctgggtccacgttcgccacgtgtcgggagaggcgcagaagtgcacgcaatgagaagcgaggcaagcggtttcgcaggagctgctcgcgaggtagttgccgacgagagcgacaagatttgggtcggggaggaagggagcggcggaagacgcggccccgggggtgctgcacccgcgcacgctcctttgctgtctgcccccatgggttctagacgacttgaaggcatctccgtcgaagaagcaatggtgacccggacccagctcttagaggaagaactgtcttctctgaaggaggagttagcgttgtgtcaggccgataaggagttcgtctggagcctatggaaaaggttgcaggttaccaatcctgatttaacccaggtggtgagcctggtagtagaaagggagaagcagaagagcgaggcgaaagatagaaaagtactggaaatcctacaggtgaaggatgctaagattcaagagttcgagcaacgcgagtcggtgctgaaacaagagattaatgatcttgtcaagcggaagatcgccgtggacgaggagaatgcctttctgagaaaggaattttcagacttagagaaaaaatttaaagacaagtctcaggaaattaaagacacaaaagagtgcgtgcagaataaggaggaacagaatcggctagttattaagaatctggaggaagagaacaagaaactttctactcggtgcacagacctgttaaacgatctggaaaagctgaggaagcaggaggctcatttaaggaaggaaaaatattccactgacgcaaagatcaagacattcgaagataatctaatcgaagctaggaaagaggttgaggtcagccagagtaagtacaatgctttatcgctgcagctgagcaataaacagacagaactgatacaaaaagatatggatatcacgctcgtacggcaggaattacaggagctccaaaacctctacaagcagaactccacgcataccgcccaacaggccgagctaatacagcagctgcaagtgctgaatatggatacccaaaaggttttgaggaatcaggaggacgtgcacaccgccgaaagtatatcatatcagaagctctataatgagctgcatatctgctttgagaccaccaagtctaatgaggccatgttgcgccagagcgtaaccaatctgcaagaccaactgctccaaaaagagcaggaaaacgcaaagctcaaagaaaaactccaggagagtcagggggcacccctgcccctgccccaggagagcgatccggattatagtgcccaggtccctcacagacccagcctttcctccttggagaccctgatggtgagccaaaaatctgagattgaatatctgcaggagaaattgaaaattgctaatgagaaattgtcagaaaacattagcgccaacaagggtttctcccggaagtctataatgacgagcgccgagggcaagcataaggaacctccagtcaagagaagccggagccttagcccaaaatccagcttcacggactccgaggaactgcagaaattacggaaagccgaacgcaagatagagaatctagaaaaagcgttgcagctgaaaagccaagagaacgatgaactgagggacgcccatgagaagcggaaagagcggctgcaaatgctccagactaattatcgagccgttaaagagcaactgaagcagtgggaagagggcagcggcatgacggagattaggaaaattaagagggccgacccccaacagttgcgccaggaagattccgacgcagtgtggaatgaattagcctactttaagagggaaaaccaggaactcatgattcagaagatgaacctcgaggaggagttggatgaactcaaagttcacatttcaatcgataaggccgccatccaggagctgaaccggtgtgtcgctgagcggagagaggagcagcttttccggtcaggcgaggacgacgaagtcaaaagaagtacgcctgagaaaaatggcaaggaaatgctggaacagaccttgcaaaaagtaactgaactcgaaaatagactgaagtcatttgaaaagaggtcaaggaaactgaaagaagggaacaagaagctcatgaaggaaaacgattttctcaaaagcctcctgaaacaacaacaagaagataccgaaaccagggagaaagaacttgaacagattattaaggggagcaaggacgtcgaaaaagagaacacggaactccaggtgaagatatctgagctggagactgaagtaaccagcctcaggcgccaagtggccgaggccaacgcgttgcgaaacgaaaacgaagaattgatcaatcccatggagaaaagtcaccagagtgcagacagagccaaaagtgagatggccactatgaaggtgcgctccggtcgatatgactgtaagaccaccatgacaaaagtgaaattcaaggctgcaaagaagaactgcagtgtgggccgccaccacactgtccttaaccatagtattaaggtcatgtcaaacgtgtttgaaaacttgtccaaggacgggtgggaggacgtctcagagagctccagtgattccgaagctcagacgagtcagacattggggacgattatcgttgagacctcacagaagatcagtcctactgaggatggcaaagaccagaaggagagcgatcccactgaggatagtcaaacacaggggaaagagatcgttcaaacctatctgaatatcgacgggaaaacgcccaaggactacttccacgataagaacgcgaaaaagccgactttccagaaaaagaattgtaaaatgcagaaaagtagccacaccgccgtccccactagagtgaaccgggagaaatacaagaatataacagcacagaaaagctcaagcaacattatcttattgcgagagcggatcatatctctgcaacaacaaaacagcgtgttgcagaacgccaaaaagacagccgaactgtccgtgaaggaatacaaggaagtgaacgagaagctgctgcaccagcagcaggttagtgaccagaggttccagactagcaggcagacgatcaaaaagcttaatctagacctggctggcctgagaaaagaaaaggaggaccttctgaaaaagctggaatcttccagcgaaatcacaagcttggcagaggagaattctcaggtcaccttcccacgcattcaggtcacgagtttatccccctcgagaagcatggatctcgagatgaagcaactacagtacaagttgaagaatgctacgaatgagcttaccaagcagagcagtaatgtgaaaacactcaaattcgagctgctcgccaaggaggagcacattaaggaaatgcacgagaagattagtaggatggagagggacatcactatgaagagacaccttatcgaggatttgaagttccgccagaaggtaaatcttgagagcaacaaatccttctccgagatgctgcagaacttggacaagaaggtgaagacgttaaccgaagagtgtagtaacaagaaagtgagcatagatagcttgaaacagagactcaatgtggctgtcaaagagaagagccaatacgagcagatgtaccagaaatcaaaagaggagttagaaaagaaagatttaaaactaactctgctcgtgtctagaatttcggagacagaatcagctatggccgaaattgagacagccgctagtaaacaattgcaagaactggcacttcagagcgagcaagtactcgaaggagcccaaaaaacccttctgctcgccaatgagaaggtggaggaattcacaacattcgtgaaagccctggccaaagaactccagaacgacgtgcatgtcgtccgcaggcagatccgcgaattaaagaagatgaaaaagaatcgagatgcatgtaagacttcgacccacaaggctcagacgctggccgccagcattctcaatatctcccgcagcgatttagaggaaattttagatacagaggatcaggtggaaatagagaaaaccaagatcgatgctgagaatgacaaggaatggatgctatatattcagaaattactggagggccagctcccgttcgcatcctacttgctggaggccgtacttgagaagatcaatgagaaaaagaaactggtggaaggatactttaccatcatgaaggatataagatag

SEQ ID NO: 194751 - DNA, 4221 bp, Artificial Sequence
  derived and/or modified sequence
atggccgcccggagcccccccagcccccaccccagccccccagcccggcagctgggccccaggagcccccgggtgggcagaggagctgaggtgcacgccatgaggtctgaggccagcggctttgctggggccgcccgggaggtggtggctgatgaaagtgacaagatctgggtgggggaggagggcagcggcggccggcggggccctggaggagctgccccagcccacgcccccctgctgagcgcccccatgggcagccggcggctggagggcatctctgtggaggaggccatggtgaccaggacccagctgctggaggaggagctgagcagcctgaaggaggagctggccctgtgccaggccgacaaggagtttgtgtggagcctgtggaagaggctgcaggtgaccaacccagacctgacccaggtggtgtccctggtggtggagcgggagaagcagaagtctgaggccaaggacaggaaggtgctggagatcctgcaggtgaaggatgccaagatccaggagtttgagcagcgggagagcgtgctgaagcaggagatcaatgacctggtgaagaggaagattgctgtggatgaggagaatgccttcctgaggaaggagttcagtgacctggagaagaagttcaaggacaagagccaggagatcaaggacaccaaggaatgtgtgcagaacaaggaggagcagaaccggctggtgatcaagaacctggaggaggagaacaagaagctgagcacccgctgcacagacctgctgaatgacctggagaagctgaggaagcaggaggcccacctgaggaaggagaagtacagcacagatgccaagatcaagacctttgaggacaacctgattgaggccaggaaggaggtggaggtgtcccagagcaagtacaatgccctgagcctgcagctgagcaacaagcagacagagctgatccagaaggacatggacatcaccctggtgaggaaggagctgcaggagctgcagaacctgtacaagcagaacagcacccacacagcccagcaggccgagctgatccagcagctgcaggtgctgaacatggacacccagaaggtgctgaggaaccaggaggatgtgcacacagctgagagcatctcctaccagaagctgtacaatgagctgcacatctgctttgagaccaccaagagcaatgaggccatgctgcggcagagcgtgaccaacctgcaggaccagctgctgcagaaggagcaggagaatgccaagctgaaggagaagctgcaggagagccagggcgcccccctgcccctgccccaggagagtgaccctgactacagcgcccaggtgccccaccggcccagcctgagcagcctggagaccctgatggtgtcccagaagtcagaaattgagtacctgcaggagaagctgaagatcgccaatgagaagctgtctgagaacatcagcgccaacaagggcttcagcaggaagagcatcatgaccagcgctgagggcaagcacaaggagccccctgtgaagaggagccgcagcctgagccccaagagcagcttcacagattctgaggagctgcagaagctgaggaaggccgagaggaagattgagaacctggagaaggccctgcagctgaagagccaggagaatgatgagctgagagatgcccacgagaagaggaaggagcggctgcagatgctgcagaccaactacagagctgtgaaggagcagctgaagcagtgggaggagggcagcggcatgacagagatcaggaagatcaagagagctgacccccagcagctgcggcaggaggacagtgatgctgtgtggaatgagctggcctacttcaagcgggagaaccaggagctgatgatccagaagatgaacctggaggaggagctggatgagctgaaggtgcacatcagcattgacaaggccgccatccaggagctgaacagatgtgtggccgagcggcgggaggagcagctgttccgcagcggggaggatgatgaggtgaagaggagcaccccagagaagaatggcaaggagatgctggagcagaccctgcagaaggtgacagagctggagaaccggctgaagagctttgagaagaggagcaggaagctgaaggagggcaacaagaagctgatgaaggaaaatgacttcctgaagagcctgctgaagcagcagcaggaggacacagagacccgggagaaggagctggagcagatcatcaagggcagcaaggatgtggagaaggagaacacagagctgcaggtgaagatcagcgagctggagacagaggtgaccagcctgcggcggcaggtggccgaggccaatgccctgagaaatgaaaatgaggagctgatcaaccccatggagaagagccaccagagcgctgaccgggccaagtctgagatggccaccatgaaggtgcgcagcggccgctatgactgcaagaccaccatgaccaaggtgaagttcaaggccgccaagaagaactgcagcgtgggccgccaccacacagtgctgaaccacagcatcaaggtgatgagcaatgtgtttgagaacctgagcaaggatggctgggaggatgtgtctgagagcagcagtgacagcgaggcccagaccagccagaccctgggcaccatcatcgtggagaccagccagaagatcagccccacagaagatggcaaggaccagaaggagagtgaccccacagaggacagccagacccagggcaaggagatcgtgcagacctacctgaacattgatggcaagacccccaaggactacttccatgacaagaatgccaagaagcccaccttccagaagaagaactgcaagatgcagaagagcagccacacagctgtgcccaccagggtgaaccgggagaagtacaagaacatcacagcccagaagagcagcagcaacatcatcctgctgcgggagcgcatcatcagcctgcagcagcagaacagcgtgctgcagaatgccaagaagacagctgagctgtctgtgaaggagtacaaggaggtgaatgagaagctgctgcaccagcagcaggtgtctgaccagcgcttccagaccagccggcagaccatcaagaagctgaacctggacctggccggcctgaggaaggagaaggaggacctgctgaagaagctggagagcagcagcgagatcaccagcctggccgaggagaacagccaggtgaccttcccccgcatccaggtgaccagcctgagccccagccgctccatggacctggagatgaagcagctgcagtacaagctgaagaatgccaccaatgagctgaccaagcagagcagcaatgtgaagaccctgaagtttgagctgctggccaaggaggagcacatcaaggagatgcatgagaagatcagcaggatggagcgggacatcaccatgaagaggcacctgattgaggacctgaagttccggcagaaggtgaacctggagagcaacaagagcttcagcgagatgctgcagaacctggacaagaaggtgaagaccctgacagaggagtgcagcaacaagaaggtgtccattgacagcctgaagcagaggctgaatgtggccgtgaaggagaagagccagtatgagcagatgtaccagaagagcaaggaggagctggagaagaaggacctgaagctgaccctgctggtgagccgcatcagcgagacagaaagtgccatggccgagattgaaacagctgccagcaagcagctgcaggagctggccctgcagagcgagcaggtgctggagggcgcccagaagaccctgctgctggccaatgagaaggtggaggagttcaccacctttgtgaaggccctggccaaggagctgcagaatgatgtgcacgtggtgcggcggcagatccgggagctgaagaagatgaagaagaacagagatgcctgcaagaccagcacccacaaggcccagaccctggccgccagcatcctgaacatcagcagaagtgacctggaggagatcctggacacagaggaccaggtggagattgagaagaccaagattgatgctgaaaatgacaaggagtggatgctgtacatccagaagctgctggagggccagctgccctttgccagctacctgctggaggccgtgctggagaagatcaatgagaagaagaagctggtggagggctacttcaccatcatgaaggacatcagatag

SEQ ID NO: 194752 - DNA, 4221 bp, Artificial Sequence
  derived and/or modified sequence
atggccgcccggagcccccccagcccccaccccagccccccagcccggcagctgggccccaggagcccccgggtgggcagaggagctgaggtgcacgccatgaggtctgaggccagcggctttgctggggccgcccgggaggtggtggctgatgaaagtgacaagatctgggtgggggaggagggcagcggcggccggcggggccctggaggagctgccccagcccacgcccccctgctgagcgcccccatgggcagccggcggctggagggcatctctgtggaggaggccatggtgaccaggacccagctgctggaggaggagctgagcagcctgaaggaggagctggccctgtgccaggccgacaaggagtttgtgtggagcctgtggaagaggctgcaggtgaccaacccagacctgacccaggtggtgtccctggtggtggagcgggagaagcagaagtctgaggccaaggacaggaaggtgctggagatcctgcaggtgaaggatgccaagatccaggagtttgagcagcgggagagcgtgctgaagcaggagatcaatgacctggtgaagaggaagattgctgtggatgaggagaatgccttcctgaggaaggagttcagtgacctggagaagaagttcaaggacaagagccaggagatcaaggacaccaaggaatgtgtgcagaacaaggaggagcagaaccggctggtgatcaagaacctggaggaggagaacaagaagctgagcacccgctgcacagacctgctgaatgacctggagaagctgaggaagcaggaggcccacctgaggaaggagaagtacagcacagatgccaagatcaagacctttgaggacaacctgattgaggccaggaaggaggtggaggtgtcccagagcaagtacaatgccctgagcctgcagctgagcaacaagcagacagagctgatccagaaggacatggacatcaccctggtgcggcaggagctgcaggagctgcagaacctgtacaagcagaacagcacccacacagcccagcaggccgagctgatccagcagctgcaggtgctgaacatggacacccagaaggtgctgaggaaccaggaggatgtgcacacagctgagagcatctcctaccagaagctgtacaatgagctgcacatctgctttgagaccaccaagagcaatgaggccatgctgcggcagagcgtgaccaacctgcaggaccagctgctgcagaaggagcaggagaatgccaagctgaaggagaagctgcaggagagccagggcgcccccctgcccctgccccaggagagtgaccctgactacagcgcccaggtgccccaccggcccagcctgagcagcctggagaccctgatggtgtcccagaagtcagaaattgagtacctgcaggagaagctgaagatcgccaatgagaagctgtctgagaacatcagcgccaacaagggcttcagcaggaagagcatcatgaccagcgctgagggcaagcacaaggagccccctgtgaagaggagccgcagcctgagccccaagagcagcttcacagattctgaggagctgcagaagctgaggaaggccgagaggaagattgagaacctggagaaggccctgcagctgaagagccaggagaatgatgagctgagagatgcccacgagaagaggaaggagcggctgcagatgctgcagaccaactacagagctgtgaaggagcagctgaagcagtgggaggagggcagcggcatgacagagatcaggaagatcaagagagctgacccccagcagctgcggcaggaggacagtgatgctgtgtggaatgagctggcctacttcaagcgggagaaccaggagctgatgatccagaagatgaacctggaggaggagctggatgagctgaaggtgcacatcagcattgacaaggccgccatccaggagctgaacagatgtgtggccgagcggcgggaggagcagctgttccgcagcggggaggatgatgaggtgaagaggagcaccccagagaagaatggcaaggagatgctggagcagaccctgcagaaggtgacagagctggagaaccggctgaagagctttgagaagaggagcaggaagctgaaggagggcaacaagaagctgatgaaggaaaatgacttcctgaagagcctgctgaagcagcagcaggaggacacagagacccgggagaaggagctggagcagatcatcaagggcagcaaggatgtggagaaggagaacacagagctgcaggtgaagatcagcgagctggagacagaggtgaccagcctgcggcggcaggtggccgaggccaatgccctgagaaatgaaaatgaggagctgatcaaccccatggagaagagccaccagagcgctgaccgggccaagtctgagatggccaccatgaaggtgcgcagcggccgctatgactgcaagaccaccatgaccaaggtgaagttcaaggccgccaagaagaactgcagcgtgggccgccaccacacagtgctgaaccacagcatcaaggtgatgagcaatgtgtttgagaacctgagcaaggatggctgggaggatgtgtctgagagcagcagtgacagcgaggcccagaccagccagaccctgggcaccatcatcgtggagaccagccagaagatcagccccacagaagatggcaaggaccagaaggagagtgaccccacagaggacagccagacccagggcaaggagatcgtgcagacctacctgaacattgatggcaagacccccaaggactacttccatgacaagaatgccaagaagcccaccttccagaagaagaactgcaagatgcagaagagcagccacacagctgtgcccaccagggtgaaccgggagaagtacaagaacatcacagcccagaagagcagcagcaacatcatcctgctgcgggagcgcatcatcagcctgcagcagcagaacagcgtgctgcagaatgccaagaagacagctgagctgtctgtgaaggagtacaaggaggtgaatgagaagctgctgcaccagcagcaggtgtctgaccagcgcttccagaccagccggcagaccatcaagaagctgaacctggacctggccggcctgaggaaggagaaggaggacctgctgaagaagctggagagcagcagcgagatcaccagcctggccgaggagaacagccaggtgaccttcccccgcatccaggtgaccagcctgagccccagccgctccatggacctggagatgaagcagctgcagtacaagctgaagaatgccaccaatgagctgaccaagcagagcagcaatgtgaagaccctgaagtttgagctgctggccaaggaggagcacatcaaggagatgcatgagaagatcagcaggatggagcgggacatcaccatgaagaggcacctgattgaggacctgaagttccggcagaaggtgaacctggagagcaacaagagcttcagcgagatgctgcagaacctggacaagaaggtgaagaccctgacagaggagtgcagcaacaagaaggtgtccattgacagcctgaagcagaggctgaatgtggccgtgaaggagaagagccagtatgagcagatgtaccagaagagcaaggaggagctggagaagaaggacctgaagctgaccctgctggtgagccgcatcagcgagacagaaagtgccatggccgagattgaaacagctgccagcaagcagctgcaggagctggccctgcagagcgagcaggtgctggagggcgcccagaagaccctgctgctggccaatgagaaggtggaggagttcaccacctttgtgaaggccctggccaaggagctgcagaatgatgtgcacgtggtgcggcggcagatccgggagctgaagaagatgaagaagaacagagatgcctgcaagaccagcacccacaaggcccagaccctggccgccagcatcctgaacatcagcagaagtgacctggaggagatcctggacacagaggaccaggtggagattgagaagaccaagattgatgctgaaaatgacaaggagtggatgctgtacatccagaagctgctggagggccagctgccctttgccagctacctgctggaggccgtgctggagaagatcaatgagaagaagaagctggtggagggctacttcaccatcatgaaggacatcagatag

SEQ ID NO: 194753 - DNA, 4221 bp, Artificial Sequence
  derived and/or modified sequence
atggccgcccggagcccccccagcccccaccccagcccccccgcccgccaactcggccctcgaagtccacgcgtcggccgcggcgctgaggtgcatgccatgcgttcagaggcctctggcttcgctggcgcagctcgggaagttgtggctgacgaatcggataaaatctgggtaggagaggagggatcaggagggcggcgaggacccggcggggccgcccccgcacatgcaccattactgtctgctccaatgggtagccgacgcctggaagggatcagtgtggaggaggccatggtaacgagaacacaactactggaagaggagctgtcaagcctgaaagaggagctggcattatgtcaggccgacaaggagtttgtatggtccctctggaaacgcctgcaggtgacgaatccagacctgactcaggttgtctccctggtcgtagagagagaaaaacagaaaagcgaagccaaggataggaaggtgcttgaaatcctgcaggttaaagatgccaagatacaggagtttgagcaacgggaaagcgtgttgaaacaggaaatcaacgacctggttaaacgcaagattgccgtggacgaagaaaacgctttcctgaggaaggagttttcggatctcgaaaaaaaattcaaggataagtcgcaggagattaaagacacgaaagagtgtgtgcagaacaaggaggaacagaatagattagtgatcaaaaatctggaggaggaaaacaaaaagttgagtaccagatgcacagatctattgaacgatctggagaagctaaggaagcaagaggcacacctaaggaaggaaaaatactcaaccgacgccaagataaaaactttcgaagacaacctgatcgaggcccgtaaggaggtggaggtttcacagtctaagtacaacgctctctccctgcagctctccaacaaacagactgaattgatccaaaaggacatggacatcactcttgtacgaaaggagctgcaggaactccagaatctttataaacagaattccactcacaccgcccagcaggcggagcttattcagcaattgcaggtgctgaacatggatactcagaaagtcctgcgcaaccaggaggacgtccacactgccgagtcgatctcttatcagaaactgtataacgagttacatatttgctttgagactactaagtcaaacgaggcaatgctgcggcagtcggtgacaaacttacaagaccagctcttacaaaaggagcaagagaacgccaaactgaaggagaaactccaagagtcgcagggagctcccctgcctctgcctcaggaatccgatcccgattacagcgcacaggttccacatcgaccatccctgtcttcccttgagacactgatggtgtctcagaagagtgagatcgagtacctgcaagagaaactgaagatagcaaacgagaaactgagcgagaatatctccgcaaataagggtttctcccggaaaagtattatgacttccgccgaggggaagcacaaggagccacctgtaaaaagatcgcgctctctgagcccgaagtcatcatttacagattccgaagaactccagaagcttcgcaaggctgagcgtaaaatagagaacctggaaaaagccctccaactaaagagccaagagaatgacgaattgagggatgctcatgaaaaaagaaaggaacgattgcagatgctccagaccaactatcgtgctgtgaaagagcaactcaagcaatgggaggaggggtcgggtatgacggagataaggaagattaaacgggccgatccccaacagttgcgacaggaagactcagatgccgtttggaacgagctcgcctattttaaaagggaaaaccaagaactgatgattcagaagatgaacctggaggaagagttggacgagctgaaggtgcacatttcaattgacaaggctgccattcaggagctgaatcggtgcgtagccgaaagacgagaagagcagttgttccgcagtggggaggatgatgaggtgaagagaagcacaccagagaaaaatgggaaggaaatgcttgaacagaccttacagaaagtcaccgaacttgagaatcgcttaaagagtttcgagaagagatcacggaagctgaaggaaggtaacaaaaagttgatgaaggaaaacgacttcctgaagagtctcctcaagcagcaacaggaggacaccgaaacgcgcgaaaaggaattagagcagattattaaaggatccaaagatgttgagaaggagaataccgaattacaggtcaagatttcggagctggaaactgaggtgacgtctctaaggcgtcaggtggccgaagcaaacgctcttcgcaatgaaaacgaggaactcattaatcctatggagaagtcccaccaatcagcggatcgcgcaaagtccgagatggccacaatgaaagtgagatctggaaggtatgactgcaagacaactatgaccaaggtgaagtttaaagcggcaaagaagaactgctcagtgggacgccaccacactgttctgaatcatagcatcaaggtgatgtccaatgtctttgagaacctgagcaaggatggttgggaagacgtttctgagagtagcagcgatagtgaagcacagactagccagacccttggtacaataatcgttgaaacatcccaaaaaatcagcccgaccgaggatgggaaagatcagaaggagtcagatccaacagaagactcacagacccaaggcaaggaaattgttcagacctatctgaacatcgacggtaaaacacccaaggactacttccacgataaaaacgcgaaaaagccgaccttccaaaagaaaaattgtaaaatgcaaaagagcagtcacacagcggtgcccactagggtgaatcgcgagaagtataaaaatattaccgcccaaaagtcatcttctaatatcatccttctccgggaacgtatcatctcgctgcagcaacagaacagcgttctgcagaacgccaagaaaacagctgagctctctgtcaaggagtataaggaagtgaacgagaaattattgcatcagcagcaggtgagcgaccagcgctttcagacctcgcggcagaccatcaagaaactgaacttggacctggccggactgagaaaagagaaggaggacctactgaagaagttagaatcctcaagtgaaatcacatctttggctgaagagaatagccaagtgacctttcctcgcatacaggttacatctctgtctccgagcaggtctatggacttggaaatgaagcagctgcagtacaaacttaagaatgccaccaacgaattaacaaaacagtcatccaacgtcaaaactttaaagttcgagcttctcgcaaaagaggagcatattaaagagatgcacgagaagatttctcgcatggagagggatatcacaatgaaaagacacctgattgaggatctcaaattccgtcaaaaagtgaatttagagagcaacaagtcctttagcgagatgctccagaacctggacaaaaaagtaaagactctaaccgaggagtgttcaaataaaaaagtctcgattgattccctcaagcagaggctgaatgtggcggtgaaggagaagtcccagtatgaacagatgtaccagaagtctaaggaggagcttgaaaagaaagatctgaagctcaccctactcgtgagccgcatttccgaaacagagtcggcgatggcagaaatagagactgccgcttccaagcagctgcaagagctggcattacagagcgagcaggttcttgagggtgcgcagaagactctgctgctcgccaacgaaaaagtggaagagttcacaacctttgttaaagccctggccaaggagctccagaacgacgtccacgtggtaagacgccagatacgtgaattgaaaaagatgaagaagaaccgagatgcctgtaagacctctacacacaaagctcagacactggctgctagcattctgaatatctcccggagtgacctggaggagattctggataccgaggaccaagtagagatcgagaaaactaagatcgatgctgagaacgacaaggagtggatgctttatatccaaaaattgctggaaggtcaattgcctttcgcctcatatttgttggaggctgtgctggagaaaattaatgaaaaaaaaaagctcgtagaagggtatttcacgattatgaaggacatccggtag

SEQ ID NO: 194754 - DNA, 4221 bp, Artificial Sequence
  derived and/or modified sequence
atggccgcccggagcccccccagcccccaccccagcccccccgcccggcagctaggacctagatctccgcgagtgggacgtggtgccgaggtgcacgccatgaggtccgaggcatcaggattcgccggagccgcccgtgaggtggttgcagacgagtccgacaaaatctgggtgggcgaggaagggtcaggaggccggagggggcccggaggggccgcccccgctcacgcccctctgctatctgccccaatgggctcccgaaggcttgagggcatctctgtggaggaggccatggtcacaagaacgcagctgcttgaggaagaactcagtagcctgaaggaggaactggccttatgccaagccgacaaggagtttgtttggtctttatggaaaaggctgcaggtcaccaatccagacctgactcaggtggttagcctggttgttgagcgggaaaaacaaaagtcggaggctaaggataggaaggtactcgaaattctgcaagtaaaggatgctaagatccaggagtttgaacagcgtgaatcggtcctcaaacaggaaattaacgaccttgtgaagcgcaagatagccgtcgacgaagaaaacgctttccttcgtaaagagttcagcgatctagagaaaaagttcaaggataagagccaggagataaaggacacaaaagagtgcgtgcagaacaaggaagaacagaacagactggtgatcaaaaacctggaagaggagaataagaagctcagcactaggtgcactgatttgctcaatgacctagagaaactgagaaagcaagaggctcacctcagaaaagaaaagtactccacagacgccaagatcaagacctttgaggataatttaattgaggctagaaaggaggtggaggtcagccagtctaagtataatgcattgtccttgcaactgagcaacaagcagacagagctcatccagaaagatatggatattaccttagttagacaggagctgcaggagctgcagaatctgtataaacagaattcaacacacaccgcgcagcaggccgaattaattcagcagctccaggttctcaatatggacacacagaaggttttgcggaatcaggaagacgttcatacggcggaatcaatctcataccagaagttatacaatgaactacatatctgcttcgaaaccactaagtcaaacgaggccatgctaaggcagtcagtgaccaatctccaagaccagctgttgcaaaaagaacaggagaacgcgaaactgaaggagaagctgcaagaatcacagggggcccctctgcctcttcctcaggaatccgaccccgattactccgcacaggtgcctcaccgtccctccctgagcagcctggaaactttgatggtgtcgcagaaatctgagatcgaatacctgcaggagaaactgaagattgcaaacgagaaattgagtgagaacatcagtgctaacaaagggttctcccgcaaatcaataatgacttccgccgaaggaaaacacaaggagcctcccgtaaagcggtctcgcagcctgtcacccaagtccagttttaccgattcagaagaactacagaagttgcgtaaggcggagagaaagatagaaaaccttgagaaagctctgcagctcaaatcacaggagaacgacgagctgcgggacgctcacgaaaaaaggaaggagaggctgcagatgttacaaactaactatagagccgttaaagaacagctcaagcagtgggaagaaggctcagggatgacagagataagaaagatcaagcgcgccgacccgcagcaactgcggcaagaagactctgatgcagtgtggaacgagctcgcatattttaaaagggaaaaccaggagctcatgattcagaagatgaacctcgaagaagaactcgatgagctgaaggtgcacatcagcatcgataaagccgccattcaggagttgaaccggtgtgtagctgagaggcgggaggaacagttgtttagaagcggagaggatgatgaggtgaaaaggagtacgcccgagaaaaatggaaaagagatgcttgagcagacgctgcagaaagtaaccgaactagagaatcgcttaaaaagctttgaaaagagatctcggaagctcaaggagggaaataaaaaactgatgaaagaaaatgattttctcaagtcccttctgaagcagcagcaagaagacaccgaaacccgagagaaagagttggagcagatcattaagggcagcaaggatgtggagaaggagaacaccgaactccaggtgaagattagtgaacttgaaacggaggtaacgtcacttcggcgacaggtagctgaggctaacgcactgaggaacgaaaacgaggagctgatcaacccaatggagaaatctcatcagtccgctgatcgggcaaagtcggaaatggctaccatgaaagtacgaagtggcagatacgattgtaagacaacgatgacaaaagtgaagttcaaggcagccaagaagaattgttctgtgggtcgacaccataccgttctaaatcacagtatcaaagtgatgtcgaatgtgtttgagaatctctctaaggatggttgggaggatgtgtcagaatcatcgtccgattctgaagcacaaacctcccagactttaggcactataatcgtcgagacctcacaaaaaatctcgcctactgaggatggaaaggaccaaaaggaatcggatcccacagaggattcacagacgcaggggaaagagatagtgcaaacttatctgaatattgacggcaaaacacctaaggactatttccacgacaaaaacgctaagaagcccaccttccagaaaaagaactgcaagatgcaaaagtcctctcacacagccgtgcccacgcgggtgaacagggagaagtacaagaatatcacggcccagaagtcctcctccaacattatcctactgagagagcggatcatttctcttcagcagcagaacagcgtgctgcagaacgccaagaaaaccgccgaactgtctgtgaaggagtataaggaggtgaatgagaaactactccaccagcaacaggtgtctgaccaaaggttccagactagcagacagactataaagaaattaaatctggatctagcaggactgcggaaagaaaaggaggacttacttaaaaaactggaatcgagttcagagatcaccagcctcgctgaagaaaactctcaagtcacatttcctagaatccaggtgacatctctgagtccgtcacggtccatggacctggaaatgaaacaattgcaatacaagctgaaaaacgccacgaacgagctaactaagcaaagctccaacgttaagactctgaaatttgagctgctggcaaaagaggagcatataaaggagatgcatgagaaaatctctcggatggaacgtgatatcacgatgaagcggcacctaattgaagatcttaaatttcgccagaaggtgaatctagagagtaataagtctttctctgaaatgctccagaacctcgataagaaggtgaagactttaaccgaagaatgtagcaataaaaaggtttcaattgactctctaaagcaaagattgaacgttgcagtcaaggaaaagtcacagtacgagcagatgtaccagaagagcaaggaggagctggagaaaaaggatctgaaactgacattactggtgtctcgcatctcagaaaccgaaagcgcgatggctgagatagaaacagcggcctctaaacagctgcaggaactggccctgcagtcagagcaagtcctggaaggcgctcagaaaactcttttactggccaatgagaaagttgaagaattcactacattcgtgaaagctcttgctaaggagctgcagaatgatgtacacgtagtgcgcagacaaattcgcgagctgaagaagatgaaaaaaaaccgggatgcctgcaaaacctctacacataaggcacagactctcgctgcgtccatccttaatataagcagaagcgatctggaagaaattctggacaccgaggaccaagtcgagattgagaagactaaaattgatgccgagaacgacaaggaatggatgctgtatattcagaagctgctagaaggacagctgcctttcgcaagctacctccttgaggccgtcctggagaagattaatgagaagaaaaaacttgtggaagggtacttcaccatcatgaaggacatccgatag

SEQ ID NO: 194755 - DNA, 4221 bp, Artificial Sequence
  derived and/or modified sequence
atggcagccaggagccccccatcaccccatcctagtccgcctgcccgacagctaggtcccagatctccacgggtcggaagaggagccgaggtccacgctatgcggtctgaagccagcggattcgcgggagctgcacgggaagtcgtggccgatgaatctgacaagatatgggttggcgaggaggggtctggtggcaggcgcggtccaggaggggcagctccagcccatgcgcctctgctctctgcccctatgggatcccggcgactcgagggaatttctgttgaagaagccatggtgacccggacccagttgttggaagaggagcttagcagccttaaggaggaactcgccctatgccaggccgataaggagtttgtgtggtccctctggaagagacttcaggtcacaaaccccgatttgacgcaagtggtaagcctggttgtggagcgggaaaagcagaagtctgaagctaaagatcgtaaggtgctggaaattctgcaagttaaggacgctaaaatccaggagttcgaacagcgggagagtgtgctgaagcaggagataaatgatctagttaaacgcaagattgctgtggacgaggagaacgcctttctaaggaaggagttcagcgacctggaaaagaaattcaaagataaatcacaggagattaaggatacaaaagaatgtgtccaaaataaagaggagcagaatagactcgtgatcaaaaaccttgaggaagagaataaaaagctgtcaaccaggtgtacggatctgcttaacgatctggagaaattgcgcaaacaggaggcccacttacgcaaggagaaatactccactgacgctaaaatcaaaaccttcgaagataacctgattgaagccagaaaggaagtcgaagtgtctcagtctaagtataacgcccttagtctgcagcttagcaacaagcagacagagctgatccagaaagacatggacattaccctggtaagaaaagagctgcaagagctccaaaatctctataagcagaattctacccacaccgcccaacaggcagagcttatccagcagctccaggtactaaatatggacactcagaaggtgctgcggaatcaggaggacgtgcacaccgcagaaagcatcagttatcagaagctgtacaacgagctccatatctgcttcgaaactacaaagtcaaacgaggcgatgctgagacagagcgtaactaatttgcaggaccagcttttgcaaaaggaacaggaaaacgccaaactgaaggaaaagctccaggagagccagggtgctccgctgccactcccccaggaaagtgatccagactactccgcccaggtaccccaccggccatccctttccagcctggagacactcatggtttctcagaagagcgagattgaatacctgcaggaaaaattgaagattgctaacgaaaagctatctgagaatatttcggccaataaggggtttagccgaaaatcaatcatgactagtgctgaaggaaagcacaaggagcccccagttaagcgtagccgctctctgtcccctaagtcgtcttttactgacagtgaagagctgcaaaagctccgcaaagctgaaaggaagatcgaaaatctggaaaaagctctgcagctgaagagccaggagaacgatgagctgagggatgcccatgagaagagaaaagaaagattacagatgcttcaaaccaattaccgggctgtgaaggaacagctgaaacagtgggaagaaggtagcggaatgacagagatccggaaaattaagcgcgctgacccccagcagcttaggcaggaggatagtgatgcggtctggaacgagctggcctactttaagagggaaaaccaggagctgatgatacagaaaatgaatcttgaagaggagttagacgaactcaaagtccacatctccattgacaaggctgcgatccaggagctgaatcggtgcgtggcagagcgaagagaggagcagcttttccggtccggagaggatgatgaagtgaagaggtcaactccagaaaaaaatggcaaagagatgctggaacagacactccagaaggtgactgaactggagaatcgtctcaagtcatttgagaagagatccaggaagctcaaagaaggtaataaaaagctcatgaaagagaatgacttcctgaagtctttgctaaagcaacaacaggaagatacggagaccagagagaaagaactggagcagatcattaaaggaagtaaagatgtagaaaaagagaatactgagcttcaggtgaagatctcagaactggagactgaagtcacatcattaagaagacaggttgctgaggctaatgcactcagaaacgaaaacgaggaactgataaatcccatggaaaaatcccatcagagtgctgaccgggctaaaagcgagatggctaccatgaaagtgcgatcagggaggtacgactgtaagacaaccatgacgaaggttaaatttaaggctgcaaaaaagaactgtagcgttgggagacatcacaccgtgcttaaccactctattaaggttatgagtaatgtgttcgagaatctatcaaaagatgggtgggaagatgtctccgaatcatcctctgattccgaagcacagaccagccagactctgggaacaattattgtggaaacgagtcaaaaaatttcaccgactgaggatggaaaggaccaaaaggagtccgatccgacagaggattcgcaaacacagggaaaagaaatcgtacaaacttatctgaacatcgacgggaagaccccgaaggattattttcacgacaaaaacgccaagaagcccacatttcaaaagaagaattgcaagatgcagaaaagctcccataccgctgtgcccacccgggtgaatcgcgaaaagtataagaatatcaccgcacagaaatcctcctctaacattatcctgttgcgcgagcggattatatctctgcagcagcagaattcagtgttgcagaacgcaaaaaaaacggccgagctgagcgtaaaagaatataaagaagtcaatgaaaagctgctgcaccagcaacaagtgtctgatcaacggttccagacctctcggcagactataaaaaaacttaatttggaccttgccggactaaggaaggaaaaggaggacttattgaagaaactagaaagcagcagcgagattacctctctcgctgaggagaatagccaagtgacatttcctcgtatacaggtgaccagcctgtcccctagcaggagcatggacctagagatgaaacagcttcagtacaagctgaaaaatgctacaaacgaacttacaaagcagtcaagtaacgtgaaaacactgaagtttgagctcctcgcaaaagaagaacacatcaaggagatgcatgagaagataagtagaatggaaagagatatcaccatgaaaaggcacctgatcgaggacttgaagtttcggcaaaaggtgaacctggagtctaacaaaagcttctctgaaatgctccagaatttggacaagaaggttaaaacactaactgaggaatgcagtaataagaaagtgagcatcgactccttgaagcagcgattaaatgtggccgttaaggagaagtctcagtacgaacagatgtatcagaaatctaaagaagagttggagaagaaggatctgaagttgaccctccttgtgagtagaattagcgaaactgagagcgcaatggcggagattgaaaccgccgcaagcaagcaactgcaagaattagccctgcaatccgagcaagtgctggaaggagcccagaaaacacttctgctagctaacgagaaggtagaagagttcactacatttgttaaggccctggcaaaagagctgcagaatgatgtccacgtcgtgcgtcgccagattagggaactgaaaaaaatgaagaaaaatcgtgacgcttgtaaaacatcgacccataaggcgcaaactttagcggctagcattctgaatatctcaaggagcgacctggaagaaatactggacaccgaggaccaggtagagattgagaaaacaaagatcgacgcagaaaacgataaggagtggatgttatatattcagaaattactcgaagggcagctgcccttcgcatcttatctgcttgaagctgtccttgagaaaattaatgagaagaagaagctagtcgagggctacttcacaattatgaaggatattaggtag

SEQ ID NO: 194756 - DNA, 4221 bp, Artificial Sequence
  derived and/or modified sequence
atggctgcgcgaagcccgccaagtcctcacccgagtcccccagcaagacagctcggccctaggtctccccgagttgggaggggggcagaagtgcatgcgatgagatccgaggcttccggattcgcgggtgccgcacgagaagtagtagccgacgaaagcgacaagatctgggtgggagaagagggatccggaggaaggcgtggacccggaggagctgccccagcacacgcccctcttctgagtgcacccatgggctcacgtcgcctggagggcatctccgtagaggaggcaatggtaacccgcactcagttacttgaggaagaactgtcatctttaaaagaggagctggccctctgccaggccgataaggagtttgtttggtcactgtggaaacggttacaagtgaccaatccagacctgacccaagtcgtgtctctcgttgtcgagcgcgagaagcagaaatccgaagcaaaagatcgaaaggtgctggaaattctccaagtgaaagacgctaagatccaagagttcgagcagagagagagcgtgctcaagcaggaaattaacgacctcgtgaagaggaaaattgctgtggacgaggaaaatgcctttttgcggaaagagtttagcgatctggaaaagaagtttaaggacaagtcccaggaaataaaagacacaaaagagtgcgttcagaataaagaagagcagaacaggctggttataaagaacctggaggaagagaataagaaactcagcacacgttgtacagacctgttgaatgatctcgaaaaattgcgcaagcaggaagctcacctgagaaaagagaagtactcgacggacgctaaaatcaaaactttcgaagacaacttgatagaggctagaaaggaggtggaggtgtctcaaagcaaatataatgctttaagcctgcaactgtccaacaagcaaaccgagcttattcagaaagatatggacattacactagtgcgccaagagctgcaggagctgcagaatctgtacaagcaaaactcgactcacaccgcccagcaagctgaactgatacagcagctgcaagtgttaaacatggacacacagaaagtgctgcgcaaccaggaggatgtccacactgctgaatctatatcttaccagaagttatataatgagttgcacatctgttttgaaacaaccaagagcaatgaggcgatgctcaggcagtctgttaccaacctgcaggatcaactactgcagaaggagcaagagaatgccaagctcaaggagaaactgcaggaatcgcaaggagctcccctgccactccctcaggaaagcgatcccgattacagcgcccaggttcctcaccgcccttctttgtctagcttagaaacgctcatggtgtcacagaagtcagagatcgagtaccttcaagaaaagctcaagatagcaaatgaaaaactaagcgagaatatctccgccaacaaaggcttctctagaaagagcattatgacttcggccgaagggaagcacaaggagccacccgtcaagcgcagccggtctctctcaccgaagagctcttttactgattcggaagagctacaaaaactgcgcaaggctgagcgaaagatagagaacctggaaaaggctctgcagcttaagagccaagagaacgatgaactgcgcgacgcacatgaaaaacgtaaagagcgactccaaatgcttcagacaaactatcgtgcagtgaaggagcagcttaaacagtgggaggagggaagcggcatgacagaaatccgcaaaatcaaaagagcggacccccagcagctccggcaggaggattctgatgctgtttggaatgagctcgcctattttaagcgggagaaccaggagctcatgatccaaaagatgaatctcgaggaagaactcgacgagctgaaggttcacatcagcatcgataaggctgccatacaagaactgaatcggtgtgtggctgagcggcgagaggagcagctgttcaggtccggggaggatgatgaagtgaaacgctctaccccagagaagaacggaaaggaaatgttggaacagaccctgcagaaggtcacagagctagaaaatagacttaagagtttcgagaaacgctccagaaaactgaaggaaggcaacaaaaagctcatgaaggagaacgactttcttaaatccctcttgaaacaacagcaggaggacaccgagactcgggaaaaggagcttgaacaaattatcaaggggagtaaagacgtagagaaggagaatacggagctgcaagtgaagatctcagagctggaaacggaggtgacctccttgcgcagacaagtcgcggaagcaaacgcactgcgcaatgagaacgaggagctgatcaaccccatggagaagtcccatcagagcgcggatcgcgcaaaatcagaaatggcaaccatgaaagtgaggagcggcagatacgactgcaagaccacaatgactaaagtgaagtttaaagccgctaaaaagaattgttctgtggggagacaccacacggtcctgaatcatagcattaaggtaatgtcaaatgtcttcgagaatctgtccaaagacggttgggaggacgtcagtgaatcctccagcgatagtgaagcgcagactagccagactctgggcacaattatcgttgaaacctctcagaagatttctcctacggaagacggaaaggatcagaaggaatctgatcccactgaagatagccagacgcagggaaaggaaatcgtgcagacgtacctgaatattgatggtaaaacgcccaaagactactttcacgataaaaatgcaaaaaagcctacatttcagaaaaagaattgtaagatgcagaagtcttcccatacagccgttcccacccgggtgaaccgcgagaaatacaagaatatcaccgcgcagaaatcaagttctaatataatactactccgggagcgcatcatatccctgcaacagcagaacagtgtcctgcagaatgccaaaaagacagccgagttgagcgtgaaggaatataaggaagtgaatgaaaagttattgcatcagcagcaggtttcagatcagagatttcagacatcccgtcagacaataaaaaagttgaatctcgatctggcgggtttgaggaaggagaaggaagacctgctcaaaaaactggaatcgagttctgagatcacttctttggccgaggagaactctcaggtgacattcccaagaattcaagtgacatcattgtcccccagtcgcagcatggatcttgagatgaagcagctccagtacaagttgaagaatgccaccaatgagctcaccaagcaaagctccaacgtgaagaccctgaaatttgagctgttagcaaaggaggagcatattaaagagatgcacgaaaaaatctcccggatggagagagatattactatgaaacgccacctcatagaggacctcaagttcaggcagaaggtgaatctggagagcaataaaagcttctcggagatgctgcagaatctggacaagaaggttaagactctgacggaggaatgtagcaataaaaaagtttcgatcgactcgctgaagcaaagactgaacgttgctgtgaaggaaaagtcgcagtacgagcagatgtatcagaaatccaaagaggaactggagaagaaagatctaaagttgacactgcttgtgagccggatctctgaaacagagtcagccatggctgagatagaaacagcagcctctaaacagctccaggagctggctcttcagtcagaacaggtgctcgagggcgcacagaagacactgctattggctaatgagaaggtagaggaattcactacttttgtcaaggcattagccaaggagctacagaacgacgtccacgtcgtccggcgacaaatccgggaactgaagaaaatgaaaaaaaaccgagacgcctgtaaaacatctacgcataaggcacagactctggctgcctccatcttgaacattagtcggtctgacttagaggaaatcttagacaccgaggaccaggtggaaatagagaaaacaaagattgacgcagagaacgataaagagtggatgctctacatacagaaactgctggaaggacaattaccttttgcatcttatctcttggaagcagtgcttgagaagatcaacgaaaagaagaaactcgtggaaggatattttactataatgaaggacattcgctag

SEQ ID NO: 194757 - DNA, 5576 bp, Artificial Sequence
  derived and/or modified sequence
cggttcggcgttccgggctcgccgggttggggaaagggaggtggagtttccaacagggaacttgacccgttagcagccgcagccatggcggcgcgttcgcctccctcaccgcacccttcgcccccagcgcgacagctgggccccaggtccccacgtgttgggcggggagctgaagtacacgcaatgcgcagcgaggcctcgggttttgccggcgcagcgcgggaggtggtcgcggacgaaagtgataaaatctgggtgggtgaagaagggtcagggggccggcgagggcctgggggggcagctccggctcatgctcccctcctcagcgcgcccatggggtccagacggctagagggcatctcggtagaggaggcgatggtgacccggacgcagctgctggaggaagagctgagcagcctaaaggaggagttggccctgtgtcaggctgataaagaatttgtatggtctttgtggaaacgtctccaggttacaaacccagatctcacacaagtggtcagtttggttgtggaaagagaaaaacagaaatctgaagctaaagacagaaaagttctagaaattctgcaagtcaaggatgccaaaatacaagaatttgaacagagagagtcagtactgaaacaggaaataaatgaccttgtaaaacggaaaattgcagtagatgaagaaaatgctttcttaaggaaagaattcagtgacttggagaagaaatttaaagataaaagtcaagaaattaaggacactaaggagtgtgtacagaacaaagaagagcaaaacagactagttataaaaaatctggaggaggaaaacaagaaattaagtacccgctgcactgacctgctaaatgacctggagaaattgaggaagcaggaagcacatttgagaaaagaaaaatatagcactgatgcaaaaataaagacctttgaagacaatttaattgaagcaaggaaagaagttgaagtatcacagagtaaatacaatgctctatcattacagttgagtaataaacagactgaacttatccagaaggatatggatattaccctggtcaggaaggaactgcaggagctgcagaatctttacaaacagaacagtacacatacagcccagcaagcagagctgatccagcagcttcaggttctcaatatggacacacaaaaagtactgagaaatcaggaagatgttcacacagctgaaagtatatcatatcaaaaactttacaatgagttacatatttgttttgaaaccacaaaatcaaatgaagctatgctccggcaaagtgttactaatcttcaggatcagctattacaaaaagagcaagaaaatgctaagttaaaagaaaaacttcaggaatcacagggagcacctcttcctttacctcaagaaagtgatccagactactcagcacaggtacctcatcgcccatccttatcaagcttagaaacgttaatggtttcacagaagtctgaaattgagtatttacaggagaaactaaagatagcaaatgaaaaactgtcagaaaacatatctgccaacaagggtttctcccgaaagagcatcatgacaagtgctgaaggaaaacataaggaaccacctgtgaaacgttcaaggtctttgtccccaaagagctctttcacagactcagaagagctacagaagctgagaaaagctgaaagaaagattgaaaacttagagaaggcactacaactaaagagccaagaaaatgatgagctaagagatgcccatgaaaaacgcaaggaacggctacagatgttacagaccaactacagagcagtaaaagagcaattaaaacagtgggaagaaggcagtggcatgactgaaatcaggaaaataaagagagcagatccccaacaacttcgacaagaagattctgacgctgtgtggaatgaactggcatatttcaaaagggaaaaccaggagctaatgattcaaaagatgaatcttgaagaagaattagatgaacttaaagtacatatatctattgataaggcagcaatacaagaattgaatagatgtgtggcagagagaagagaagaacagctctttagatctggtgaagatgatgaggtcaagaggagtactccagagaagaatggaaaagaaatgttggagcagacattacagaaggtcactgagttggaaaatcggctgaaatcttttgagaaaaggtcgagaaaattaaaagaagggaataaaaaattaatgaaagaaaatgattttctgaaatccctcttaaaacagcaacaagaagatacagagaccagagaaaaagagctagaacagataataaaggggagtaaagatgtagaaaaagaaaatactgaacttcaagtaaaaatcagtgagctggagacagaagtcacttccctgaggagacaagtggcagaagctaatgcattgagaaatgaaaatgaagagctgatcaacccaatggagaaatcacaccagtcagcagacagagctaaatccgagatggccaccatgaaagtgagatctggacgatatgattgtaagacaactatgaccaaggttaaatttaaagctgcgaagaaaaattgctctgtgggtcgtcaccacactgttctcaatcattccatcaaggttatgagcaatgtgtttgagaacctcagcaaggacggctgggaggatgtgagtgaaagcagcagtgattctgaagcacagacctctcaaactttgggaacaattattgtagaaacatcccagaaaataagtcctacggaagatggaaaagaccagaaagaaagtgatccaacagaagacagccaaacacaaggaaaagaaatagtacagacatatttaaatatagatggcaagaccccaaaggactattttcatgataagaatgccaaaaaaccaacttttcaaaagaagaattgcaagatgcaaaagagttcacatacagcagttcctactagagtcaacagagaaaagtacaaaaatataactgcccagaaatcaagtagcaatattattttattacgagaacggattatatccttgcaacaacaaaacagtgtacttcagaatgccaagaaaacagcagaattgtctgttaaagaatataaagaagttaatgaaaagctcctccatcaacagcaagtatccgatcaacgatttcagacaagcaggcagacaataaagaagctaaatttggatttggctgggcttcggaaagaaaaagaagatttactaaagaaattggagtcctcatctgaaatcacaagtttggcagaagaaaattcccaggtaacatttccacggatacaagttacatcacttagtccttcaaggagcatggatttggaaatgaagcaattgcagtataaactaaagaatgctactaatgaactcactaaacagtcatcaaatgtgaagactttgaaatttgaactcctagcaaaagaagaacacataaaggaaatgcatgaaaagatatctcgaatggagagggatataactatgaaaagacatttgatagaggacttgaaatttcgacagaaagtaaatttggaaagtaacaagagttttagtgaaatgttacaaaatcttgataaaaaggtaaagacattaactgaagaatgttccaacaagaaggtatcaattgattcactaaagcaaagacttaacgttgctgtaaaagaaaagtcacagtatgaacagatgtatcagaaatctaaagaggagttagaaaaaaaggatctcaagcttactctcctagtatcaagaataagtgagactgaatctgcaatggcagaaattgaaacagcagcatctaagcagcttcaagaattagcattgcaaagtgaacaggtcctagaaggtgcacagaagacattgctgttagccaatgaaaaagtagaagagttcaccacatttgtgaaggctttggccaaagagttgcaaaatgatgtccatgtggtaaggcgacaaataagagagcttaaaaaaatgaagaaaaacagggacgcctgtaaaacctcaacccataaagcccagaccttggcagcttctatcctgaacatttcacggtcagatttagaggaaatattagacacagaagatcaagtggaaattgaaaaaacaaaaattgatgctgaaaatgacaaggaatggatgttgtacattcagaaacttcttgaaggacagcttccttttgcctcatatttactagaagcagtactggaaaaaataaatgaaaaaaagaaactagttgaaggatatttcacaattatgaaagatattagatgatattaaaatggagagctttattgcaaatgtgaaaactttttatgtggtgtgattggaatacatgcattgcaatcctgacacggtatctgctccaactatcaatagtcaggttcaataccaaaataagaagtctctgaaaataattaattgctgaacaagtgaaactaattaagtacatagccatttaaaaggaaatagtgtagcatctgatggtcgaatacaaatattgccacaaatcagtgcaaacttaaaaatgattttccttctagtgcattaaaagaaactgagcaggcttggtacacacaaattggcctgagcataagaagaaaaagtatcaactaaggatttaatgttttacgtttcatgaagaaactagactttttacataaaactgctatagatggccataagtggtccagggagcaacagatttgtagtatgagcaaatataaaatgaagcatcataacttgagcatttattgaaataaattgtgtggtccaattgaatctgttctcattgatgtgctggtttatgtaggagatactgtgtatttctacaactctttggcaaaaacaaaaacattttcttcttctctctcttaacttcacaatactatacgttgtgtagtcatataaatttgcagggaaccacaaacccaatgtataaaattaggctctatttaacagaactactactgtggtcagctaatttaagttacattcttaaccatgatgtcatccttatttagattcctggacattcccacctcatttcacctcttcaccgtgttcctgccataccctttttggttcctctaattcaccatactggtgcctgcctcccacatttgcccttggtcttctctctttctagaatactctgcactcaactttcctcatggctggctccttgtcatcattcagctccaccttccccggtccctcagagacacattctctgaccagcttactattttatttcctcatagcacaaaattatctatctgttcatgtatttgttttcttgtttattttcttcttttccctctttagtatgtaggtcccatgagattaaggcaagggttggcagattatagcctgcagggcgaatctggcctgccacctgttttgtatggcccacaagctaagaatggtttttgccttattaaatggtttttaaaaaatcaaaaggagaataatattttgtagcatgtgaaaattatataaaattcaaattttggtgtctgttaataaagttttattggaacaca

SEQ ID NO: 194758 - DNA, 5516 bp, Artificial Sequence
  derived and/or modified sequence
agggaacttgacccgttagcagccgcagccatggcggcgcgttcgcctccctcaccgcacccttcgcccccagcgcgacagctgggccccaggtccccacgtgttgggcggggagctgaagtacacgcaatgcgcagcgaggcctcgggttttgccggcgcagcgcgggaggtggtcgcggacgaaagtgataaaatctgggtgggtgaagaagggtcagggggccggcgagggcctgggggggcagctccggctcatgctcccctcctcagcgcgcccatggggtccagacggctagagggcatctcggtagaggaggcgatggtgacccggacgcagctgctggaggaagagctgagcagcctaaaggaggagttggccctgtgtcaggctgataaagaatttgtatggtctttgtggaaacgtctccaggttacaaacccagatctcacacaagtggtcagtttggttgtggaaagagaaaaacagaaatctgaagctaaagacagaaaagttctagaaattctgcaagtcaaggatgccaaaatacaagaatttgaacagagagagtcagtactgaaacaggaaataaatgaccttgtaaaacggaaaattgcagtagatgaagaaaatgctttcttaaggaaagaattcagtgacttggagaagaaatttaaagataaaagtcaagaaattaaggacactaaggagtgtgtacagaacaaagaagagcaaaacagactagttataaaaaatctggaggaggaaaacaagaaattaagtacccgctgcactgacctgctaaatgacctggagaaattgaggaagcaggaagcacatttgagaaaagaaaaatatagcactgatgcaaaaataaagacctttgaagacaatttaattgaagcaaggaaagaagttgaagtatcacagagtaaatacaatgctctatcattacagttgagtaataaacagactgaacttatccagaaggatatggatattaccctggtcaggcaagaactgcaggagctgcagaatctttacaaacagaacagtacacatacagcccagcaagcagagctgatccagcagcttcaggttctcaatatggacacacaaaaagtactgagaaatcaggaagatgttcacacagctgaaagtatatcatatcaaaaactttacaatgagttacatatttgttttgaaaccacaaaatcaaatgaagctatgctccggcaaagtgttactaatcttcaggatcagctattacaaaaagagcaagaaaatgctaagttaaaagaaaaacttcaggaatcacagggagcacctcttcctttacctcaagaaagtgatccagactactcagcacaggtacctcatcgcccatccttatcaagcttagaaacgttaatggtttcacagaagtctgaaattgagtatttacaggagaaactaaagatagcaaatgaaaaactgtcagaaaacatatctgccaacaagggtttctcccgaaagagcatcatgacaagtgctgaaggaaaacataaggaaccacctgtgaaacgttcaaggtctttgtccccaaagagctctttcacagactcagaagagctacagaagctgagaaaagctgaaagaaagattgaaaacttagagaaggcactacaactaaagagccaagaaaatgatgagctaagagatgcccatgaaaaacgcaaggaacggctacagatgttacagaccaactacagagcagtaaaagagcaattaaaacagtgggaagaaggcagtggcatgactgaaatcaggaaaataaagagagcagatccccaacaacttcgacaagaagattctgacgctgtgtggaatgaactggcatatttcaaaagggaaaaccaggagctaatgattcaaaagatgaatcttgaagaagaattagatgaacttaaagtacatatatctattgataaggcagcaatacaagaattgaatagatgtgtggcagagagaagagaagaacagctctttagatctggtgaagatgatgaggtcaagaggagtactccagagaagaatggaaaagaaatgttggagcagacattacagaaggtcactgagttggaaaatcggctgaaatcttttgagaaaaggtcgagaaaattaaaagaagggaataaaaaattaatgaaagaaaatgattttctgaaatccctcttaaaacagcaacaagaagatacagagaccagagaaaaagagctagaacagataataaaggggagtaaagatgtagaaaaagaaaatactgaacttcaagtaaaaatcagtgagctggagacagaagtcacttccctgaggagacaagtggcagaagctaatgcattgagaaatgaaaatgaagagctgatcaacccaatggagaaatcacaccagtcagcagacagagctaaatccgagatggccaccatgaaagtgagatctggacgatatgattgtaagacaactatgaccaaggttaaatttaaagctgcgaagaaaaattgctctgtgggtcgtcaccacactgttctcaatcattccatcaaggttatgagcaatgtgtttgagaacctcagcaaggacggctgggaggatgtgagtgaaagcagcagtgattctgaagcacagacctctcaaactttgggaacaattattgtagaaacatcccagaaaataagtcctacggaagatggaaaagaccagaaagaaagtgatccaacagaagacagccaaacacaaggaaaagaaatagtacagacatatttaaatatagatggcaagaccccaaaggactattttcatgataagaatgccaaaaaaccaacttttcaaaagaagaattgcaagatgcaaaagagttcacatacagcagttcctactagagtcaacagagaaaagtacaaaaatataactgcccagaaatcaagtagcaatattattttattacgagaacggattatatccttgcaacaacaaaacagtgtacttcagaatgccaagaaaacagcagaattgtctgttaaagaatataaagaagttaatgaaaagctcctccatcaacagcaagtatccgatcaacgatttcagacaagcaggcagacaataaagaagctaaatttggatttggctgggcttcggaaagaaaaagaagatttactaaagaaattggagtcctcatctgaaatcacaagtttggcagaagaaaattcccaggtaacatttccacggatacaagttacatcacttagtccttcaaggagcatggatttggaaatgaagcaattgcagtataaactaaagaatgctactaatgaactcactaaacagtcatcaaatgtgaagactttgaaatttgaactcctagcaaaagaagaacacataaaggaaatgcatgaaaagatatctcgaatggagagggatataactatgaaaagacatttgatagaggacttgaaatttcgacagaaagtaaatttggaaagtaacaagagttttagtgaaatgttacaaaatcttgataaaaaggtaaagacattaactgaagaatgttccaacaagaaggtatcaattgattcactaaagcaaagacttaacgttgctgtaaaagaaaagtcacagtatgaacagatgtatcagaaatctaaagaggagttagaaaaaaaggatctcaagcttactctcctagtatcaagaataagtgagactgaatctgcaatggcagaaattgaaacagcagcatctaagcagcttcaagaattagcattgcaaagtgaacaggtcctagaaggtgcacagaagacattgctgttagccaatgaaaaagtagaagagttcaccacatttgtgaaggctttggccaaagagttgcaaaatgatgtccatgtggtaaggcgacaaataagagagcttaaaaaaatgaagaaaaacagggacgcctgtaaaacctcaacccataaagcccagaccttggcagcttctatcctgaacatttcacggtcagatttagaggaaatattagacacagaagatcaagtggaaattgaaaaaacaaaaattgatgctgaaaatgacaaggaatggatgttgtacattcagaaacttcttgaaggacagcttccttttgcctcatatttactagaagcagtactggaaaaaataaatgaaaaaaagaaactagttgaaggatatttcacaattatgaaagatattagatgatattaaaatggagagctttattgcaaatgtgaaaactttttatgtggtgtgattggaatacatgcattgcaatcctgacacggtatctgctccaactatcaatagtcaggttcaataccaaaataagaagtctctgaaaataattaattgctgaacaagtgaaactaattaagtacatagccatttaaaaggaaatagtgtagcatctgatggtcgaatacaaatattgccacaaatcagtgcaaacttaaaaatgattttccttctagtgcattaaaagaaactgagcaggcttggtacacacaaattggcctgagcataagaagaaaaagtatcaactaaggatttaatgttttacgtttcatgaagaaactagactttttacataaaactgctatagatggccataagtggtccagggagcaacagatttgtagtatgagcaaatataaaatgaagcatcataacttgagcatttattgaaataaattgtgtggtccaattgaatctgttctcattgatgtgctggtttatgtaggagatactgtgtatttctacaactctttggcaaaaacaaaaacattttcttcttctctctcttaacttcacaatactatacgttgtgtagtcatataaatttgcagggaaccacaaacccaatgtataaaattaggctctatttaacagaactactactgtggtcagctaatttaagttacattcttaaccatgatgtcatccttatttagattcctggacattcccacctcatttcacctcttcaccgtgttcctgccataccctttttggttcctctaattcaccatactggtgcctgcctcccacatttgcccttggtcttctctctttctagaatactctgcactcaactttcctcatggctggctccttgtcatcattcagctccaccttccccggtccctcagagacacattctctgaccagcttactattttatttcctcatagcacaaaattatctatctgttcatgtatttgttttcttgtttattttcttcttttccctctttagtatgtaggtcccatgagattaaggcaagggttggcagattatagcctgcagggcgaatctggcctgccacctgttttgtatggcccacaagctaagaatggtttttgccttattaaatggtttttaaaaaatcaaaaggagaataatattttgtagcatgtgaaaattatataaaattcaaattttggtgtctgttaataaagttttattgg

SEQ ID NO: 194759 - DNA, 4221 bp, Artificial Sequence
  derived and/or modified sequence
atggccgccagaagcccccccagcccccaccccagcccccccgccagacagctgggccccagaagccccagagtgggcagaggcgccgaggtgcacgccatgagaagcgaggccagcggcttcgccggcgccgccagagaggtggtggccgacgagagcgacaagatctgggtgggcgaggagggcagcggcggcagaagaggccccggcggcgccgcccccgcccacgcccccctgctgagcgcccccatgggcagcagaagactggagggcatcagcgtggaggaggccatggtgaccagaacccagctgctggaggaggagctgagcagcctgaaggaggagctggccctgtgccaggccgacaaggagttcgtgtggagcctgtggaagagactgcaggtgaccaaccccgacctgacccaggtggtgagcctggtggtggagagagagaagcagaagagcgaggccaaggacagaaaggtgctggagatcctgcaggtgaaggacgccaagatccaggagttcgagcagagagagagcgtgctgaagcaggagatcaacgacctggtgaagagaaagatcgccgtggacgaggagaacgccttcctgagaaaggagttcagcgacctggagaagaagttcaaggacaagagccaggagatcaaggacaccaaggagtgcgtgcagaacaaggaggagcagaacagactggtgatcaagaacctggaggaggagaacaagaagctgagcaccagatgcaccgacctgctgaacgacctggagaagctgagaaagcaggaggcccacctgagaaaggagaagtacagcaccgacgccaagatcaagaccttcgaggacaacctgatcgaggccagaaaggaggtggaggtgagccagagcaagtacaacgccctgagcctgcagctgagcaacaagcagaccgagctgatccagaaggacatggacatcaccctggtgagaaaggagctgcaggagctgcagaacctgtacaagcagaacagcacccacaccgcccagcaggccgagctgatccagcagctgcaggtgctgaacatggacacccagaaggtgctgagaaaccaggaggacgtgcacaccgccgagagcatcagctaccagaagctgtacaacgagctgcacatctgcttcgagaccaccaagagcaacgaggccatgctgagacagagcgtgaccaacctgcaggaccagctgctgcagaaggagcaggagaacgccaagctgaaggagaagctgcaggagagccagggcgcccccctgcccctgccccaggagagcgaccccgactacagcgcccaggtgccccacagacccagcctgagcagcctggagaccctgatggtgagccagaagagcgagatcgagtacctgcaggagaagctgaagatcgccaacgagaagctgagcgagaacatcagcgccaacaagggcttcagcagaaagagcatcatgaccagcgccgagggcaagcacaaggagccccccgtgaagagaagcagaagcctgagccccaagagcagcttcaccgacagcgaggagctgcagaagctgagaaaggccgagagaaagatcgagaacctggagaaggccctgcagctgaagagccaggagaacgacgagctgagagacgcccacgagaagagaaaggagagactgcagatgctgcagaccaactacagagccgtgaaggagcagctgaagcagtgggaggagggcagcggcatgaccgagatcagaaagatcaagagagccgacccccagcagctgagacaggaggacagcgacgccgtgtggaacgagctggcctacttcaagagagagaaccaggagctgatgatccagaagatgaacctggaggaggagctggacgagctgaaggtgcacatcagcatcgacaaggccgccatccaggagctgaacagatgcgtggccgagagaagagaggagcagctgttcagaagcggcgaggacgacgaggtgaagagaagcacccccgagaagaacggcaaggagatgctggagcagaccctgcagaaggtgaccgagctggagaacagactgaagagcttcgagaagagaagcagaaagctgaaggagggcaacaagaagctgatgaaggagaacgacttcctgaagagcctgctgaagcagcagcaggaggacaccgagaccagagagaaggagctggagcagatcatcaagggcagcaaggacgtggagaaggagaacaccgagctgcaggtgaagatcagcgagctggagaccgaggtgaccagcctgagaagacaggtggccgaggccaacgccctgagaaacgagaacgaggagctgatcaaccccatggagaagagccaccagagcgccgacagagccaagagcgagatggccaccatgaaggtgagaagcggcagatacgactgcaagaccaccatgaccaaggtgaagttcaaggccgccaagaagaactgcagcgtgggcagacaccacaccgtgctgaaccacagcatcaaggtgatgagcaacgtgttcgagaacctgagcaaggacggctgggaggacgtgagcgagagcagcagcgacagcgaggcccagaccagccagaccctgggcaccatcatcgtggagaccagccagaagatcagccccaccgaggacggcaaggaccagaaggagagcgaccccaccgaggacagccagacccagggcaaggagatcgtgcagacctacctgaacatcgacggcaagacccccaaggactacttccacgacaagaacgccaagaagcccaccttccagaagaagaactgcaagatgcagaagagcagccacaccgccgtgcccaccagagtgaacagagagaagtacaagaacatcaccgcccagaagagcagcagcaacatcatcctgctgagagagagaatcatcagcctgcagcagcagaacagcgtgctgcagaacgccaagaagaccgccgagctgagcgtgaaggagtacaaggaggtgaacgagaagctgctgcaccagcagcaggtgagcgaccagagattccagaccagcagacagaccatcaagaagctgaacctggacctggccggcctgagaaaggagaaggaggacctgctgaagaagctggagagcagcagcgagatcaccagcctggccgaggagaacagccaggtgaccttccccagaatccaggtgaccagcctgagccccagcagaagcatggacctggagatgaagcagctgcagtacaagctgaagaacgccaccaacgagctgaccaagcagagcagcaacgtgaagaccctgaagttcgagctgctggccaaggaggagcacatcaaggagatgcacgagaagatcagcagaatggagagagacatcaccatgaagagacacctgatcgaggacctgaagttcagacagaaggtgaacctggagagcaacaagagcttcagcgagatgctgcagaacctggacaagaaggtgaagaccctgaccgaggagtgcagcaacaagaaggtgagcatcgacagcctgaagcagagactgaacgtggccgtgaaggagaagagccagtacgagcagatgtaccagaagagcaaggaggagctggagaagaaggacctgaagctgaccctgctggtgagcagaatcagcgagaccgagagcgccatggccgagatcgagaccgccgccagcaagcagctgcaggagctggccctgcagagcgagcaggtgctggagggcgcccagaagaccctgctgctggccaacgagaaggtggaggagttcaccaccttcgtgaaggccctggccaaggagctgcagaacgacgtgcacgtggtgagaagacagatcagagagctgaagaagatgaagaagaacagagacgcctgcaagaccagcacccacaaggcccagaccctggccgccagcatcctgaacatcagcagaagcgacctggaggagatcctggacaccgaggaccaggtggagatcgagaagaccaagatcgacgccgagaacgacaaggagtggatgctgtacatccagaagctgctggagggccagctgcccttcgccagctacctgctggaggccgtgctggagaagatcaacgagaagaagaagctggtggagggctacttcaccatcatgaaggacatcagatag

SEQ ID NO: 194760 - DNA, 4221 bp, Artificial Sequence
  derived and/or modified sequence
atggccgccagaagcccccccagcccccaccccagcccccccgccagacagctgggccccagaagccccagagtgggcagaggcgccgaggtgcacgccatgagaagcgaggccagcggcttcgccggcgccgccagagaggtggtggccgacgagagcgacaagatctgggtgggcgaggagggcagcggcggcagaagaggccccggcggcgccgcccccgcccacgcccccctgctgagcgcccccatgggcagcagaagactggagggcatcagcgtggaggaggccatggtgaccagaacccagctgctggaggaggagctgagcagcctgaaggaggagctggccctgtgccaggccgacaaggagttcgtgtggagcctgtggaagagactgcaggtgaccaaccccgacctgacccaggtggtgagcctggtggtggagagagagaagcagaagagcgaggccaaggacagaaaggtgctggagatcctgcaggtgaaggacgccaagatccaggagttcgagcagagagagagcgtgctgaagcaggagatcaacgacctggtgaagagaaagatcgccgtggacgaggagaacgccttcctgagaaaggagttcagcgacctggagaagaagttcaaggacaagagccaggagatcaaggacaccaaggagtgcgtgcagaacaaggaggagcagaacagactggtgatcaagaacctggaggaggagaacaagaagctgagcaccagatgcaccgacctgctgaacgacctggagaagctgagaaagcaggaggcccacctgagaaaggagaagtacagcaccgacgccaagatcaagaccttcgaggacaacctgatcgaggccagaaaggaggtggaggtgagccagagcaagtacaacgccctgagcctgcagctgagcaacaagcagaccgagctgatccagaaggacatggacatcaccctggtgagacaggagctgcaggagctgcagaacctgtacaagcagaacagcacccacaccgcccagcaggccgagctgatccagcagctgcaggtgctgaacatggacacccagaaggtgctgagaaaccaggaggacgtgcacaccgccgagagcatcagctaccagaagctgtacaacgagctgcacatctgcttcgagaccaccaagagcaacgaggccatgctgagacagagcgtgaccaacctgcaggaccagctgctgcagaaggagcaggagaacgccaagctgaaggagaagctgcaggagagccagggcgcccccctgcccctgccccaggagagcgaccccgactacagcgcccaggtgccccacagacccagcctgagcagcctggagaccctgatggtgagccagaagagcgagatcgagtacctgcaggagaagctgaagatcgccaacgagaagctgagcgagaacatcagcgccaacaagggcttcagcagaaagagcatcatgaccagcgccgagggcaagcacaaggagccccccgtgaagagaagcagaagcctgagccccaagagcagcttcaccgacagcgaggagctgcagaagctgagaaaggccgagagaaagatcgagaacctggagaaggccctgcagctgaagagccaggagaacgacgagctgagagacgcccacgagaagagaaaggagagactgcagatgctgcagaccaactacagagccgtgaaggagcagctgaagcagtgggaggagggcagcggcatgaccgagatcagaaagatcaagagagccgacccccagcagctgagacaggaggacagcgacgccgtgtggaacgagctggcctacttcaagagagagaaccaggagctgatgatccagaagatgaacctggaggaggagctggacgagctgaaggtgcacatcagcatcgacaaggccgccatccaggagctgaacagatgcgtggccgagagaagagaggagcagctgttcagaagcggcgaggacgacgaggtgaagagaagcacccccgagaagaacggcaaggagatgctggagcagaccctgcagaaggtgaccgagctggagaacagactgaagagcttcgagaagagaagcagaaagctgaaggagggcaacaagaagctgatgaaggagaacgacttcctgaagagcctgctgaagcagcagcaggaggacaccgagaccagagagaaggagctggagcagatcatcaagggcagcaaggacgtggagaaggagaacaccgagctgcaggtgaagatcagcgagctggagaccgaggtgaccagcctgagaagacaggtggccgaggccaacgccctgagaaacgagaacgaggagctgatcaaccccatggagaagagccaccagagcgccgacagagccaagagcgagatggccaccatgaaggtgagaagcggcagatacgactgcaagaccaccatgaccaaggtgaagttcaaggccgccaagaagaactgcagcgtgggcagacaccacaccgtgctgaaccacagcatcaaggtgatgagcaacgtgttcgagaacctgagcaaggacggctgggaggacgtgagcgagagcagcagcgacagcgaggcccagaccagccagaccctgggcaccatcatcgtggagaccagccagaagatcagccccaccgaggacggcaaggaccagaaggagagcgaccccaccgaggacagccagacccagggcaaggagatcgtgcagacctacctgaacatcgacggcaagacccccaaggactacttccacgacaagaacgccaagaagcccaccttccagaagaagaactgcaagatgcagaagagcagccacaccgccgtgcccaccagagtgaacagagagaagtacaagaacatcaccgcccagaagagcagcagcaacatcatcctgctgagagagagaatcatcagcctgcagcagcagaacagcgtgctgcagaacgccaagaagaccgccgagctgagcgtgaaggagtacaaggaggtgaacgagaagctgctgcaccagcagcaggtgagcgaccagagattccagaccagcagacagaccatcaagaagctgaacctggacctggccggcctgagaaaggagaaggaggacctgctgaagaagctggagagcagcagcgagatcaccagcctggccgaggagaacagccaggtgaccttccccagaatccaggtgaccagcctgagccccagcagaagcatggacctggagatgaagcagctgcagtacaagctgaagaacgccaccaacgagctgaccaagcagagcagcaacgtgaagaccctgaagttcgagctgctggccaaggaggagcacatcaaggagatgcacgagaagatcagcagaatggagagagacatcaccatgaagagacacctgatcgaggacctgaagttcagacagaaggtgaacctggagagcaacaagagcttcagcgagatgctgcagaacctggacaagaaggtgaagaccctgaccgaggagtgcagcaacaagaaggtgagcatcgacagcctgaagcagagactgaacgtggccgtgaaggagaagagccagtacgagcagatgtaccagaagagcaaggaggagctggagaagaaggacctgaagctgaccctgctggtgagcagaatcagcgagaccgagagcgccatggccgagatcgagaccgccgccagcaagcagctgcaggagctggccctgcagagcgagcaggtgctggagggcgcccagaagaccctgctgctggccaacgagaaggtggaggagttcaccaccttcgtgaaggccctggccaaggagctgcagaacgacgtgcacgtggtgagaagacagatcagagagctgaagaagatgaagaagaacagagacgcctgcaagaccagcacccacaaggcccagaccctggccgccagcatcctgaacatcagcagaagcgacctggaggagatcctggacaccgaggaccaggtggagatcgagaagaccaagatcgacgccgagaacgacaaggagtggatgctgtacatccagaagctgctggagggccagctgcccttcgccagctacctgctggaggccgtgctggagaagatcaacgagaagaagaagctggtggagggctacttcaccatcatgaaggacatcagatag

SEQ ID NO: 194761 - protein, 308 aa, Artificial Sequence
  derived and/or modified sequence
MQPSGHRLRDVEHHPLLAENDNYDSSSSSSSEADVADRVWFIRDGCGMICAVMTWLLVAYADFVVTFVMLLPSKDFWYSVVNGVIFNCLAVLALSSHLRTMLTDPGAVPKGNATKEYMESLQLKPGEVIYKCPKCCCIKPERAHHCSICKRCIRKMDHHCPWVNNCVGEKNQRFFVLFTMYIALSSVHALILCGFQFISCVRGQWTECSDFSPPITVILLIFLCLEGLLFFTFTAVMFGTQIHSICNDETEIERLKSEKPTWERRLRWEGMKSVFGGPPSLLWMNPFVGFRFRRLPTRPRKGGPEFSV

SEQ ID NO: 194762 - DNA, 927 bp, Artificial Sequence
  derived and/or modified sequence
atgcagcccagcggccacagactgagagacgtggagcaccaccccctgctggccgagaacgacaactacgacagcagcagcagcagcagcagcgaggccgacgtggccgacagagtgtggttcatcagagacggctgcggcatgatctgcgccgtgatgacctggctgctggtggcctacgccgacttcgtggtgaccttcgtgatgctgctgcccagcaaggacttctggtacagcgtggtgaacggcgtgatcttcaactgcctggccgtgctggccctgagcagccacctgagaaccatgctgaccgaccccggcgccgtgcccaagggcaacgccaccaaggagtacatggagagcctgcagctgaagcccggcgaggtgatctacaagtgccccaagtgctgctgcatcaagcccgagagagcccaccactgcagcatctgcaagagatgcatcagaaagatggaccaccactgcccctgggtgaacaactgcgtgggcgagaagaaccagagattcttcgtgctgttcaccatgtacatcgccctgagcagcgtgcacgccctgatcctgtgcggcttccagttcatcagctgcgtgagaggccagtggaccgagtgcagcgacttcagcccccccatcaccgtgatcctgctgatcttcctgtgcctggagggcctgctgttcttcaccttcaccgccgtgatgttcggcacccagatccacagcatctgcaacgacgagaccgagatcgagagactgaagagcgagaagcccacctgggagagaagactgagatgggagggcatgaagagcgtgttcggcggcccccccagcctgctgtggatgaaccccttcgtgggcttcagattcagaagactgcccaccagacccagaaagggcggccccgagttcagcgtgtag

SEQ ID NO: 194763 - DNA, 927 bp, Artificial Sequence
  derived and/or modified sequence
atgcagccttctggtcatcgtctacgggatgtcgaacatcaccccctgcttgcggaaaacgataattatgactcaagctcaagttcaagcagcgaggccgatgtggcggaccgggtctggttcatacgggatgggtgtggtatgatctgcgctgtgatgacatggctgttggtagcttatgccgacttcgtggtcactttcgtgatgctcctcccctcaaaagatttttggtatagtgtcgttaacggcgtgatatttaactgccttgctgttcttgctctgtcttcacacttacgcactatgctgacagatccaggtgccgtcccaaaggggaatgccactaaagaatacatggagagcctgcagctcaagcctggagaggttatctacaagtgccctaagtgctgctgcatcaaaccagagcgcgcgcaccactgctcaatatgtaagaggtgcatccgaaagatggaccaccattgcccatgggtcaataactgcgtcggagaaaagaatcagagattcttcgtgctgttcacaatgtacatcgcactgtccagtgtccacgcacttattctttgcggatttcagttcatcagttgtgtacgtggccagtggactgaatgctccgacttcagcccgcctattactgtaatcttgctgatattcctatgcctcgagggactactttttttcacattcaccgcagtaatgttcgggacccagattcactccatatgcaatgatgaaaccgagattgaacggctcaagtccgagaagccaacctgggagcgtaggctgcgctgggaagggatgaaatccgtgttcggaggacccccttccctgctatggatgaaccctttcgttgggttcaggttccgcaggttgccaacgcgcccaagaaagggagggcctgaattcagcgtgtag

SEQ ID NO: 194764 - DNA, 927 bp, Artificial Sequence
  derived and/or modified sequence
atgcagcccagcggccaccggctgagagatgtggagcaccaccccctgctggctgaaaatgacaactatgacagcagcagcagcagcagcagcgaggctgatgtggccgacagagtgtggttcatcagagatggctgcggcatgatctgtgctgtgatgacctggctgctggtggcctatgctgactttgtggtgacctttgtgatgctgctgcccagcaaggacttctggtacagcgtggtgaatggagtcatcttcaactgcctggccgtgctggccctgagcagccacctgcggaccatgctgacagatcctggagctgtgcccaagggaaatgccaccaaggagtacatggagagcctgcagctgaagccaggagaggtgatctacaagtgccccaagtgctgctgcatcaagccagagcgggcccaccactgcagcatctgcaagcgctgcatcaggaagatggaccaccactgcccctgggtgaacaactgtgtgggggagaagaaccagcgcttctttgtgctcttcaccatgtacatcgccctgagctctgtgcacgccctgatcctgtgtggcttccagttcatcagctgtgtgcggggccagtggacagaatgtagtgacttcagcccccccatcaccgtcatcctgctgatcttcctgtgcctggagggcctgctcttcttcaccttcaccgctgtgatgtttggcacccagatccacagcatctgcaatgatgaaacagaaattgaaaggctgaagtctgagaagcccacctgggagcggcggctgcgctgggagggcatgaagtctgtgtttggaggcccccccagcctgctgtggatgaacccctttgtgggcttccgcttccggcggctgcccacccggcccaggaaaggaggccctgagttctctgtgtag

SEQ ID NO: 194765 - DNA, 927 bp, Artificial Sequence
  derived and/or modified sequence
atgcagcccagcggccaccggctgcgggacgtggagcaccaccccttactggccgagaacgacaactacgattcctcctcttcttcaagttctgaggctgatgtggctgaccgcgtgtggtttattagggatgggtgcggcatgatttgcgcagtgatgacttggctcttggtcgcctatgccgattttgtcgtgacattcgtgatgttactacccagtaaagacttctggtactctgtggtaaatggagttatattcaattgcctcgccgtgttggcactgtcatcccatctacgaaccatgctgacagatcccggagccgtccccaaggggaatgctaccaaggagtacatggaaagtctgcaactgaaaccgggcgaagttatctacaagtgccctaagtgttgctgtataaagcctgagagagcgcatcactgctccatctgtaagcggtgtatacggaaaatggatcatcactgcccttgggttaataattgcgtgggcgaaaagaaccagagattttttgtcctttttacaatgtacattgctttaagttccgttcacgctctgatactttgcggattccagtttatctcgtgtgtgagaggacagtggacagagtgctccgatttctctccccccattacagtgatccttctgatctttctgtgtctggagggactgctcttttttacatttactgccgttatgtttgggacacagatccactcaatctgtaatgatgagacggagattgagcgacttaaatccgagaagcctacctgggaacggcgattgagatgggaaggaatgaagtcagtgtttggtggtcctccttccctgctgtggatgaaccccttcgttggcttcaggttccggcgtctgcccactaggccacgtaagggcgggcctgaattttctgtgtag

SEQ ID NO: 194766 - DNA, 927 bp, Artificial Sequence
  derived and/or modified sequence
atgcagccgagcggccaccgcctgcgagacgtcgaacatcatccactactggcggagaacgataactacgattcttctagctcttccagttcagaggccgacgtcgctgatcgggtttggttcatccgcgatggttgcgggatgatctgtgccgtgatgacttggctgcttgtggcttacgccgactttgtggtgacttttgtcatgctcctgccctctaaagatttttggtatagtgtggtaaatggagtgatctttaactgcctggcggtgctggccctgtcctcccacctgagaacaatgttaacagatcccggagctgtgcccaaaggcaatgctactaaggaatacatggagtcgctccaactcaaaccaggggaagtgatctacaaatgccctaagtgctgttgcatcaagccagaacgagcccatcactgctccatctgcaagcgttgcatcagaaaaatggaccatcactgcccctgggttaacaattgcgtgggcgagaagaatcaacgtttcttcgtgctctttacaatgtatatcgctctctcttctgtacacgcgctgattctctgtggtttccagttcatatcatgcgttcgaggacagtggactgagtgctcagatttctcaccacctattacagttatccttctgattttcctgtgtcttgaaggactgcttttcttcactttcaccgctgttatgttcggaacacagatccactccatctgtaatgacgagacagagatcgaaaggctgaagagtgagaaaccaacttgggaaaggcgcctgagatgggagggtatgaagagcgtgtttggaggccctcctagtctcctgtggatgaatcccttcgttgggttccgcttccgccgtcttcccacaagaccacgaaagggaggccctgagttttccgtatag

SEQ ID NO: 194767 - DNA, 3442 bp, Artificial Sequence
  derived and/or modified sequence
acttccggcgctcgcaccgccccgctctccagccaaggctccgggctgaggcatttgcttggctgcagcctccttccgacctgcccggcgggacccaggggaccaagccgagccgagccgcggggcccgctccagcccggccatgagcgcggccgcatgatgcgtccctgcctcggccgctgcagtcgccgccgccgccgccgcaggccgggaggagccgcagcgccgggcgaccccgcccgggcctcggatccgatcacataggacagtatgcaccttaagatcctgaagaaacggcacaaaatgttcaagtgatgtttagaaataacttgtgagggtgcgtcagggaaatcatgcagccatcaggacacaggctccgggacgtcgagcatcatcctctcctggctgaaaatgacaactatgactcttcatcgtcctcctcctccgaggctgacgtggctgaccgggtctggttcatccgtgacggctgcggcatgatctgtgctgtcatgacgtggcttctggtcgcctatgcagacttcgtggtgactttcgtcatgctgctgccttccaaagacttctggtactctgtggtcaacggggtcatctttaactgcttggccgtgcttgccctgtcatcccacctgagaaccatgctcaccgaccctggggcagtacccaaaggaaacgctacgaaagaatacatggagagcttgcagctgaagcccggggaagtcatctacaagtgccccaagtgctgctgtattaaacccgagcgcgcccaccactgcagtatttgcaaaagatgtattcggaaaatggatcatcactgcccgtgggtgaacaattgtgtaggagaaaagaatcaaagattttttgtgctcttcactatgtatatagctctgtcttcagtccatgctctgatcctttgtggatttcagttcatctcctgtgtccgagggcagtggactgaatgcagtgatttttcacctccgataactgtaatcctgttgatcttcctgtgccttgagggtcttctgtttttcactttcactgcagttatgtttggcacccaaatccactccatatgcaacgacgagacggagatcgagcgattgaaaagtgagaagcccacatgggagcggaggctgcgatgggaagggatgaagtccgtctttggggggcccccctcactcctctggatgaatccctttgtgggcttccgatttaggcgactgcccacgagacccagaaaaggtggcccggagttctcagtgtgaggcgtggctcatcagactgaaacttgctcacagacttccagttatttatttggggtctgaaggatatcaacagctcatctgtgaccaacagggcaactggaacctacacaaaccaattgcttgcagcaagcagagttttatatatttatagtcacagatggcagaggaagaggctctcagtccccacctgtacaacaacggaaaggtgtgtggccacacgaagaagccaaacgccgtggcctcctgcagagctggggcttctgtggagaatacttcgggttattacatgggttattcaaatcctgggtcctgagctgctgtttccaatcatgaagaaaaacagtgaatccagtgaacagggattctccaagcagtcatttcagggggctcctgctgaccccgccactcagcagtgcactccccggatcacagcagggcgtttacatagaaagacgttttggtctcgattagctccgatgctttgcactgaagttgcaaaagatctgtgcactgaacagtgaaggtggcttccggcacactccccgctgccccggaagagacatcctttgaccctctcagcaagtctgtgtgtgtgcgtgtctgtgcgtgtgcgcgcgtgtgtgcatgtgtgtcaaaattgccagtgttgtttaggcaatgtaacatttaccggctgtgtacagcaaacaagctattttttagaaaccgacgtttcagggaagaggggagagagccgcggggtcctgcccgtggttactatgaatgtattgctgttggaggacatctcgatccaaagaacagccgttcctgtgcggcccttcgttgccctcctgctttcattttttaaagaaatcttgagtgcttgagggccttggaactgattttttttttttgttccagccaaattagcagtgtataaatggcacctaggtaagagcagagctgcggctcggtgacttgatacttggggcagcccgatgctgtgtgtggggcaggggaggcatccttactggagaggcagggcccagccattgggcacctctgggaaggggaggggaccatgaggcagccagcccctggcaggggcgactgtgccaccgcaggcagcgctccagtcgggaatggccaggatggcgccctcttgttggagtttttggttagcttttacgttttcttctccacccacggcacaggtgataaaataggatccttggtgcggagcttaaaattatgccagaaagccaacagctcccctcgtggggccttgccttaaacttgcctggtttgtacattttttgccggacgcatcaagaagcaatctgtgacaaagtctgagggtcttcctttatgcttgccctccacactaagagaagttggcgtctccctcctgggaattgttttgcctttctgttcatctgtgaactgttttttgtttttaattactctgtaccccatccgaatcagggcttctaccactgctgatgcaaaaccacaaagggacctacctgagccaccgtcctagccaagcgagcaaacctgcagggggtttggaagtggacttggtcaccgcagaagcgtgtgcgccgttgggggaagagctgcgtcacagccagagggacaaagtgtgggtgatcctggagacgccagtttccgagattgttctgcatattcatttgcacattgttgtctgggttggacatgcgtgtgggcttcagtgtgaggcttttaatatgtatatcctgttatcaataaaacaattatccaagtggttgaatcctgtgagacttggcaagtgtgtgcaaatcaagtatacttgacttttcaacctcttctttcaatgtaacttttatatgaaataaagtaatcaattaacagttctcaaatggcttccaaagcgcccgttcttcctggatggtggtgttttcagggggtgcctttccgtgcttcgtgggcccagccccaggctgttaaggtcactcccaaacagtttccagaaactctaaatgcttttgtgcccatgacaagtgacctgggcactcaagcgcgactcacaaatgttgcccagtgagtactgttgcttgttgaatgtttaattcgactcccatcgttttacttagtcctttttttagtgcacgttgaaataaaaacaatgtttcaaaatc

SEQ ID NO: 194768 - protein, 1178 aa, Artificial Sequence
  derived and/or modified sequence
MLRMKLPLKPTHPAEPPPEAEEPEADARPGAKAPSRRRRDCRPPPPPPPPAGPSRGPLPPPPPPRGLGPPVAGGAAAGAGMPGGGGGPSAALREQERVYEWFGLVLGSAQRLEFMCGLLDLCNPLELRFLGSCLEDLARKDYHYLRDSEAKANGLSDPGPLADFREPAVRSRLIVYLALLGSENREAAGRLHRLLPQVDSVLKSLRAARGEGSRGGAEDERGEDGDGEQDAEKDGSGPEGGIVEPRVGGGLGSRAQEELLLLFTMASLHPAFSFHQRVTLREHLERLRAALRGGPEDAEVEVEPCKFAGPRAQNNSAHGDYMQNNESSLIEQAPIPQDGLTVAPHRAQREAVHIEKIMLKGVQRKRADKYWEYTFKVNWSDLSVTTVTKTHQELQEFLLKLPKELSSETFDKTILRALNQGSLKREERRHPDLEPILRQLFSSSSQAFLQSQKVHSFFQSISSDSLHSINNLQSSLKTSKILEHLKEDSSEASSQEEDVLQHAIIHKKHTGKSPIVNNIGTSCSPLDGLTMQYSEQNGIVDWRKQSCTTIQHPEHCVTSADQHSAEKRSLSSINKKKGKPQTEKEKIKKTDNRLNSRINGIRLSTPQHAHGGTVKDVNLDIGSGHDTCGETSSESYSSPSSPRHDGRESFESEEEKDRDTDSNSEDSGNPSTTRFTGYGSVNQTVTVKPPVQIASLGNENGNLLEDPLNSPKYQHISFMPTLHCVMHNGAQKSEVVVPAPKPADGKTIGMLVPSPVAISAIRESANSTPVGILGPTACTGESEKHLELLASPLPIPSTFLPHSSTPALHLTVQRLKLPPPQGSSESCTVNIPQQPPGSLSIASPNTAFIPIHNPGSFPGSPVATTDPITKSASQVVGLNQMVPQIEGNTGTVPQPTNVKVVLPAAGLSAAQPPASYPLPGSPLAAGVLPSQNSSVLSTAATSPQPASAGISQAQATVPPAVPTHTPGPAPSPSPALTHSTAQSDSTSYISAVGNTNANGTVVPPQQMGSGPCGSCGRRCSCGTNGNLQLNSYYYPNPMPGPMYRVPSFFTLPSICNGSYLNQAHQSNGNQLPFFLPQTPYANGLVHDPVMGSQANYGMQQMAGFGRFYPVYPAPNVVANTSGSGPKKNGNVSCYNCGVSGHYAQDCKQSSMEANQQGTYRLRYAPPLPPSNDTLDSAD

SEQ ID NO: 194769 - DNA, 96 bp, Artificial Sequence
  derived and/or modified sequence
atgagacccggctggagccacctgcccctgtgccccaccctgcaggacgccgtgctgggccacttcctgagccacctgggcagaagacacctgtag

SEQ ID NO: 194770 - DNA, 3537 bp, Artificial Sequence
  derived and/or modified sequence
atgttaagaatgaaacttccattgaagcctactcaccccgctgaaccaccccctgaggccgaagaacccgaggccgacgctcgcccaggggctaaagctccttctcggaggcgacgtgactgccgccctcccccccctccaccaccccctgccggaccctcacgggggccactgcctcccccacccccaccccgcggcctggggccacctgttgccggtggagctgctgctggcgccggaatgcctgggggagggggaggtccgagcgccgccttgcgagagcaagaacgcgtgtatgagtggtttgggctggtccttgggagcgcccaacggctcgagtttatgtgcggactcttggacctctgtaatcctctcgagctgcgtttcctggggagctgtctcgaagatttggctaggaaggactatcactatctgagggacagtgaggccaaagctaatggcctctctgatcccggacctcttgcagactttagggagccggccgtccggagtaggctgattgtatacctcgctctgttggggtcggagaacagagaagcggcaggtagactgcaccgtctgctgccccaggtggactccgttctgaaaagcctgcgcgcggccaggggggaggggagtagagggggggccgaggatgaaaggggggaggacggcgacggcgagcaggacgctgaaaaggacgggtccggccctgaaggcgggatcgtggaacccagagtgggaggaggactgggatcgagggctcaggaagagttactcctcctgtttacaatggctagtttacaccccgcgtttagtttccatcagagggtgacgttacgggagcacttagaacgtctccgcgctgcactgcgcgggggacctgaggatgccgaggtggaggtcgagccgtgcaagtttgctggtccacgggcgcagaacaactctgcccatggtgactacatgcagaacaatgaatcctcactgattgaacaggctcctattccccaggatggcctgaccgttgccccgcacagagcgcagcgggaagccgtgcacattgagaaaataatgcttaaaggcgtacaacgtaagagagcagacaagtattgggagtacacatttaaagtaaactggtcggacctcagcgtgacgacggtgaccaagacacaccaggaacttcaggaatttctgctcaagctgcccaaggaactgagtagcgagactttcgataaaacaatcctgcgcgcccttaatcagggctctctgaagcgtgaagaacgccgacaccctgatttggagcctatcctgaggcaactcttctcgagctccagtcaggctttcctccaaagtcaaaaggtgcacagcttttttcaatcgatctcatctgactctctgcattcaatcaacaatctgcagtctagcctgaagacctctaaaatcttggagcacttgaaggaagactcgtccgaggcttctagccaggaggaggatgtcctgcagcacgcaatcattcacaagaaacacactggtaagtcacctattgtcaacaacatcggcacaagctgtagccccctggatgggctgactatgcaatactctgaacaaaatggaattgtagactggcgtaagcagtcatgtacaactattcagcatccagagcactgcgtcacatccgcagaccaacacagcgcagaaaaaaggtcgttatcctcaattaacaaaaagaaagggaaaccccagacggaaaaggagaagatcaagaagaccgacaacagactcaactcgcgcattaacggcataagattgtctacgccccagcatgctcatggaggaaccgtgaaagatgtgaatctagatatcggctccgggcatgatacttgtggcgaaacctcaagtgagtcctatagttcccccagttccccccggcatgacggacgcgagtctttcgagagtgaagaggaaaaagatagagacacggacagcaacagcgaggactccgggaatccgagcactaccagattcaccgggtacggatcagtaaaccagaccgttacggttaagccaccggtccagattgcctcattagggaacgagaacggcaacttgttggaagatcccctcaactctcctaagtaccagcacatttcattcatgcccacactgcactgcgtgatgcacaatggtgcccagaaaagcgaagtcgtggtgccagctcccaaacccgcggatgggaagacaattgggatgctggtgcctagccccgtggcaatatccgctatccgcgaatccgcaaatagcacccccgtcggcatcttgggccccacagcatgcacaggtgagtcagagaaacacctcgagttgctagcatcccctttacctataccctctacattcctgccacattccagtacccccgccctacacttgaccgttcagagactgaagcttccgccaccccaggggtccagcgagtcttgtaccgtgaacattcctcagcagccgcctggctcgctctctattgcttctcccaacacggctttcatacccattcataatcccgggagctttccgggatcacctgtggccaccacggaccccatcactaaatcagcctcacaggttgtgggtcttaaccaaatggtgcctcagatagagggaaacacgggcacggtcccacagcccaccaatgtgaaagtggtcttacctgccgccgggctgtctgcagctcaacctccagcttcctatccattgcccggctcaccgctggcggccggggtgttacccagccagaacagtagcgtactaagtacagctgcaactagcccacaacctgcttctgctgggatcagccaggcgcaggccaccgttcccccagccgtgcctacccacacaccaggcccagctccatccccttcccctgctttaacgcactcgaccgcacagtctgactccacttcctacattagcgctgtgggtaacacaaacgcaaacgggacagtggttccaccccaacagatgggatcggggccgtgtggctcctgtgggcgtcgatgtagctgcggaaccaacggtaacctgcagttgaacagctactactaccccaatcccatgccagggccaatgtacagagtccccagcttctttaccctgccttccatttgtaatggctcatacttaaaccaggcgcatcagtccaatggcaaccagcttcctttctttctcccccagaccccctatgccaatggcctcgtgcatgatcctgtgatgggctcccaagcaaattacggcatgcaacagatggccgggttcggacgtttttacccagtttaccctgcgccaaatgtcgtggctaatacctctggctcagggccaaaaaaaaatgggaatgtgagttgttacaattgcggagtgtcagggcattatgcccaggattgtaaacaatcatccatggaggccaatcagcaaggtacctatagactgcgctacgcccccccattgccccctagcaacgacaccctggactccgccgattag

SEQ ID NO: 194771 - DNA, 3537 bp, Artificial Sequence
  derived and/or modified sequence
atgctgaggatgaagctgcccctgaagcccacccaccctgctgagcccccacctgaggccgaggagcctgaggctgatgcccggcctggggccaaggcccccagcagaagaagaagagactgcaggcctcctcctcctcctcctcctcctgctggccccagccggggccccctgcccccacctcctccaccccggggcctgggcccccctgtggccggcggcgctgctgctggagctggcatgcctgggggcggcggcggccccagcgctgccctgcgggagcaggagcgggtgtatgagtggtttggcctggtgctgggcagcgcccagaggctggagttcatgtgtggcctgctggacctgtgcaaccccctggagctgcgcttcctgggcagctgcctggaggacctggccaggaaggactaccactacctgcgggacagcgaggccaaggccaacggcctgagtgaccccggccccctggccgacttccgggagcctgctgtgcgcagccgcctcatcgtgtacctggccctgctgggctctgaaaatcgggaggccgccggccgcctgcaccggctgctgccccaggtggacagcgtgctgaagagcctgcgggccgcccggggggagggcagcagaggaggagcagaagatgaaagaggagaagatggagatggagagcaggatgctgagaaggatggcagcggccctgagggcggcatcgtggagccccgggtgggcggcggcctgggcagccgggcccaggaggagctgctgctgctcttcaccatggccagcctgcacccagccttctccttccaccagagggtgaccctgcgggagcacctggagcggctgcgggccgccctgcggggcggcccagaagatgctgaggtggaggtggagccctgcaagtttgctggcccccgggcccagaacaacagcgcccacggggactacatgcagaacaatgaaagcagcctcatcgagcaggcccccatcccccaggacggcctgactgtggccccccaccgggcccagcgggaggccgtgcacatcgagaagatcatgctgaagggcgtgcagaggaagagagctgacaagtactgggagtacaccttcaaggtgaactggagcgacctgtctgtgaccaccgtgaccaagacccaccaggagctgcaggagttcctgctgaagctgcccaaggagctgagcagcgagacctttgacaagaccatcctgcgggccctgaaccagggcagcctgaagcgggaggagcggcggcacccagacctggagcccatcctgcggcagctgttcagcagcagcagccaggccttcctgcagagccagaaggtgcacagcttcttccagagcatcagcagtgacagcctgcacagcatcaacaacctgcagagcagcctgaagaccagcaagatcctggagcacctgaaggaggacagcagcgaggccagcagccaggaggaggatgtgctgcagcacgccatcatccacaagaagcacacaggcaagagccccatcgtgaacaacatcggcaccagctgcagccccctggatggcctgaccatgcagtacagcgagcagaatggaattgtggactggaggaagcagagctgcaccaccatccagcaccctgagcactgtgtgaccagcgctgaccagcacagcgctgagaagaggagcctgagcagcatcaacaagaagaagggcaagccccagacagagaaggagaagatcaagaagacagacaaccggctgaacagccgcatcaatggcatccggctgagcaccccccagcacgcccacggcggcaccgtgaaggatgtgaacctggacatcggcagcggccatgacacctgtggggagaccagcagcgagagctacagcagccccagcagccccaggcatgatggccgggagagctttgagagcgaggaggagaaggaccgggacacagacagcaacagtgaagattctggcaaccccagcaccacccgcttcaccggctacggctctgtgaaccagacagtgacagtgaagccccctgtgcagatcgccagcctgggcaatgaaaatggaaacctgctggaggaccccctgaacagccccaagtaccagcacatctccttcatgcccaccctgcactgtgtgatgcacaacggggcccagaagtctgaggtggtggtgcctgcccccaagccagcagatggcaagaccatcggcatgctggtgcccagccctgtggccatcagcgccatccgggagagcgccaacagcacccctgtgggcatcctgggccccacagcctgcacaggagagagcgagaagcacctggagctgctggccagccccctgcccatccccagcaccttcctgccccacagcagcaccccagccctgcacctgactgtgcagaggctgaagctgcccccaccccagggcagcagcgagagctgcaccgtgaacatcccccagcagcccccaggcagcctgagcatcgccagccccaacacagccttcatccccatccacaaccctggcagcttccctggcagccctgtggccaccacagaccccatcaccaagagcgccagccaggtggtgggcctgaaccagatggtgccccagatcgagggcaacacaggaacagtgccccagcccaccaacgtgaaggtggtgctgcctgctgctggcctgtctgctgcccagcccccagccagctaccccctgcccggcagccccctggccgccggcgtgctgcccagccagaacagctctgtgctgagcacagctgccaccagcccccagcctgccagcgctggcatcagccaggcccaggccaccgtgcccccagctgtgcccacccacaccccaggccctgcccccagccccagccctgccctgacccacagcacagcccagagcgacagcaccagctacatctctgctgtgggcaacaccaatgccaacggcaccgtggtgcccccccagcagatgggcagcggcccctgtggcagctgtggccgccgctgcagctgtggcaccaacggcaacctgcagctgaacagctactactaccccaaccccatgcctggccccatgtacagagtgcccagcttcttcaccctgcccagcatctgcaatggcagctacctgaaccaggcccaccagagcaatggaaaccagctgcccttcttcctgccccagaccccctatgccaacggcctggtgcatgaccctgtgatgggcagccaggccaactacggcatgcagcagatggccggcttcggccgcttctaccctgtgtacccagccccaaatgtggtggccaacaccagcggcagcggccccaagaagaatggaaatgtgtcctgctacaactgtggggtgtctggccactacgcccaggactgcaagcagagctccatggaggccaaccagcagggcacctaccgcctgcgctatgccccacccctgccccccagcaatgacaccctggacagcgctgactag

SEQ ID NO: 194772 - DNA, 3537 bp, Artificial Sequence
  derived and/or modified sequence
atgctgcggatgaagctgcccctgaagcccacccaccccgccgagcccccacccgaagctgaggaacctgaggcggatgcaagaccaggagctaaagccccaagccgcaggcggagggactgtcgacccccccctcctccgccccctcctgcggggccttccagaggcccactcccaccccctcccccgccccgaggtctgggtccccctgtggcagggggcgccgcagccggcgccggtatgccaggcggggggggcggaccatctgctgctttgcgtgagcaggagagggtctacgagtggtttggccttgtgctgggttcagctcagaggctcgagttcatgtgcgggctgctggacctgtgcaacccactggaattgcgctttctgggtagttgtcttgaagatctggccagaaaggactaccattacctccgggattccgaggcgaaagcaaatggattatccgatccaggacctctcgctgacttccgggagcctgcggtacggtctcggctaatcgtctacttagccctgttggggagcgagaacagggaggccgcggggcgcctgcataggttgttacctcaagtcgatagcgttctgaagagcctgagggctgctcgcggtgagggaagccgaggaggtgcagaggacgaacggggcgaagacggcgacggtgagcaggacgctgagaaagacgggtctgggcccgagggcggaatcgtggagcctcgtgtcggtgggggcctcggttcaagagcgcaagaggaacttctgctgttatttacgatggcctcattacacccagcattcagcttccaccagcgtgttaccttacgtgagcatctggagaggctgcgcgccgctctgcgcggggggccggaagacgctgaggtcgaggttgaaccctgtaaattcgccggccctcgggctcagaacaactcggcgcacggtgattacatgcagaataatgagagcagcttgatcgagcaggcacctataccccaggacgggctcacagtggccccacacagggcccaacgcgaggccgtccacatcgagaaaatcatgctgaagggagtccaacggaagcgggccgacaagtattgggaatacacttttaaggtcaattggtctgacttaagcgttactacagtgactaagacacaccaggaattacaggagtttctgttgaaactaccaaaagagttgtcatcagaaacgtttgataagacgatccttcgcgccctgaaccagggcagtttgaaacgagaggagcgacgccatcctgatctcgagccgatcctgcgacaactgttcagttcctctagccaggcctttcttcagagtcagaaagtgcattcatttttccagtccatctcctcagacagtctccactccattaataatctgcagagttccctgaaaacttcaaagatcctcgagcacctcaaggaggattcctccgaggcgagcagtcaggaagaagatgtgctgcagcacgcgatcatccataaaaagcacaccggaaagagtcctatcgtgaataatattggtacttcctgttccccccttgatggactgacaatgcaatacagcgagcagaacggtatagttgattggagaaaacagtcctgcacaacgatacaacatcccgaacactgcgtaactagcgccgaccaacactcggccgaaaaacgttctctctcctctatcaacaaaaaaaagggcaagccacagaccgaaaaagagaagattaagaagaccgacaacaggttaaattctcgtattaatggaatccgactgagtactccacagcacgctcacggaggtactgtaaaggatgttaatctcgatattggaagcggtcacgatacatgtggcgagacctccagcgagagttactcctccccctccagtccgcgtcacgacggtcgagaatcatttgagagtgaggaggagaaagatagggatacagattccaacagcgaagactccgggaatccttccaccactcgcttcaccggatacgggtccgtcaatcagaccgttacggttaaacccccagtccaaatcgcaagtcttggaaatgagaacggcaaccttcttgaagatccactaaactcaccgaagtatcaacacatttcatttatgcccactctgcactgcgtcatgcacaacggtgcacagaaatcagaggttgtggtccccgcccccaaacccgctgatggcaagacaattgggatgctcgtgccatcccccgtggccatttcagcaatccgcgagagtgccaattcaaccccggtgggcatcctgggcccgactgcctgcacgggagaatctgaaaagcacctcgaactacttgctagtccgttacctattccttcaaccttcttaccccacagctctactccagctcttcacctgactgtgcagcggttaaagctcccaccaccacagggctccagcgagagctgtaccgtaaacatcccacagcagccccccggcagcctgagtatcgccagtcctaacaccgcattcatccccatccataatccaggatcgttccctggatcccctgttgctacaactgaccctataacgaagtcagcatctcaggtggttggacttaatcaaatggtgccacagatcgaggggaacaccgggaccgtcccccagcctactaacgtgaaggtggtgctcccggccgccgggctgtcggcagctcaaccacctgcttcttatccattaccaggcagcccactggctgctggcgtcctcccctctcagaacagcagtgtgttgtctactgcagccacatctccccagcctgctagcgctggaattagccaagcccaggcaactgttcctcccgctgtgcctacccacactccaggaccagcccccagcccctctccagctctgactcacagcaccgcccagtctgatagtacctcctatattagcgccgtcggaaatacaaacgctaatgggaccgtcgttccaccccagcagatgggatccggaccctgtggcagctgcggccgcaggtgttcctgcggcaccaacggcaatctgcagctgaacagctactattatccaaatcctatgccaggcccaatgtacagggtccctagtttttttactctgccatctatttgcaacggcagttatttgaatcaagcccatcagtccaatggcaatcagctgccgttcttcctcccacagactccctacgcaaatggattggtgcatgaccctgtcatgggctcacaagccaactacgggatgcagcaaatggcaggcttcggccgtttttatcctgtctaccccgcccctaatgtggtggctaatacgagtggcagcggtccaaaaaagaacggaaacgtttcttgctacaactgcggcgtttccggacactatgctcaggactgcaagcagtcctcaatggaggccaaccagcagggaacctaccgccttcggtatgcccctcctttgccccccagtaatgacacccttgattccgctgactag

SEQ ID NO: 194773 - DNA, 3537 bp, Artificial Sequence
  derived and/or modified sequence
atgcttaggatgaagctgcccttaaagccgacacaccctgccgagcctccacccgaagctgaagagccagaggccgatgctcgaccgggagctaaggccccttcaaggcggagacgcgattgccgaccccctcctccgccaccaccacccgcaggcccatccagaggtccactacccccaccccctcccccacgcggtctcggaccgccagttgctggaggggctgccgcaggcgcaggcatgccgggagggggtgggggacccagtgccgctttaagggagcaggaacgggtttacgaatggtttggactggtgctagggagcgctcagcggctggagttcatgtgcggcctgctggatctgtgtaacccgctggagctgagatttctcggctcctgtctcgaagacctggccaggaaggattatcattatttgagggacagcgaggccaaagcgaacgggctttcagaccccggacccctggcggacttccgagagccagctgtgagaagtcgcctgatcgtgtatttggctcttctgggtagtgaaaacagagaggctgccggaagactgcatcggctgttaccccaggtcgatagcgtgctgaaaagcctgcgcgcagcaaggggggaaggcagccgcggaggggctgaagatgagcgtggggaagatggcgatggggaacaggacgccgagaaggacgggtcagggcctgaagggggtatcgtggagcctcgggtgggcggagggcttggcagtcgggctcaggaggagttgctactgctctttaccatggcctcattacatcccgcttttagtttccatcagcgagtgactttgagggagcacctagagcggctgcgggctgccctcagaggcggacctgaggacgcagaggtcgaggttgagccgtgcaagttcgccggtcctcgggcacagaataactctgcacatggggattacatgcaaaacaatgaaagttcactgattgagcaggccccaatcccccaggacggactgactgtggctccccaccgcgcacagcgggaggctgtgcatatcgagaagatcatgttgaaaggagtacagagaaaaagggcagacaagtactgggaatatacttttaaggtgaactggtctgatttgagcgtcaccactgtgactaaaacccaccaggagttacaggagttcctgcttaagctgccaaaggaactaagcagcgagacatttgacaagaccatcctgcgtgcacttaaccaaggctcactaaaaagggaggaacgacggcacccagaccttgagccgatactgcgacaactcttttctagtagctcccaagcatttttgcaaagccagaaggtccactcattctttcaaagtatcagttctgattctctccatagcattaacaatttacagagcagcctcaagacctccaagatcctggagcacctcaaagaagatagcagtgaggctagtagtcaagaggaagacgtgcttcagcacgccattattcacaaaaagcacaccggtaagtcaccaatcgtgaacaatattggcacgtcatgctctcccctggacggattaaccatgcagtattccgaacagaacggaatcgtcgattggaggaaacagtcttgtacaactattcaacacccggaacattgtgtcacttccgccgaccagcattctgcagagaagcgatcactgtcctcgatcaataagaaaaagggcaagccacaaaccgaaaaggagaaaatcaaaaaaactgataatcgtctgaatagccgaatcaatggaatccgattgtcgaccccacagcatgcacacgggggaaccgtgaaagacgtgaaccttgacataggatccggccatgatacatgtggggagactagctcggagagttattctagcccttccagtccacggcacgatggaagagagtctttcgagtcagaggaagagaaagatcgcgacacggacagcaacagcgaagatagcggcaatccctctacaacccgcttcactggatacggctccgtcaaccagacagtgactgtgaaaccaccggtgcagattgccagtttgggcaacgaaaacggcaatctgttggaggatcctctgaactcgcctaaataccagcacatcagcttcatgccgacactccattgtgtgatgcacaatggggcacagaaaagcgaggttgtggtgccggcacctaagcccgcagatggaaaaaccataggaatgctggttccttccccagtcgctatttcggctattagggaatccgccaattctacgccggtggggatcctcggtcctactgcctgcaccggcgaatctgagaagcatctagagctactcgccagtcctctgccaatcccaagcaccttcctccctcactcttcaacccccgcactgcatctaaccgtgcagaggctcaaactgcctcccccacagggaagctccgagtcatgcaccgttaatatccctcagcagccccctggatctctgtcaatcgccagcccaaacacagcattcatccctattcacaacccaggttcattcccaggctctccagttgccaccaccgatcctattaccaaatccgcctcccaggtcgtcggtctcaatcagatggtgccccaaatcgaagggaacacagggaccgtgccccagcccacgaacgtcaaggtagttctgccagccgctgggctgagcgccgctcagccacctgcgagctaccccctccctgggagtccccttgcggcaggagtcctcccaagccaaaacagctctgttctatccactgcagccacatcccctcagccggcaagcgccggaattagtcaagcacaggcaaccgtcccacccgctgtgccaacccatactcccggacctgctccaagcccttctcctgccctgacgcacagtacagcacagagcgatagcacctcttatattagcgccgtagggaacactaacgcaaacggtactgtcgtgccccctcagcagatgggatcagggccatgtgggagctgcgggagaagatgtagttgtggtaccaatggaaacctgcaacttaactcgtattattaccccaatccaatgccaggcccaatgtacagggttccttccttctttacgctccctagcatttgcaacggcagctatctgaatcaggctcaccaatctaatggtaaccagctgccctttttcttgccacaaaccccctacgcaaatggcctggtgcatgatcctgtgatggggagtcaggctaactacggaatgcagcagatggcaggatttggcagattttatccggtatatccagctccgaacgttgtggcaaatacatctggaagcggccctaagaagaatggtaacgttagctgctacaattgcggtgtctccggacattacgcccaggattgcaagcagagcagcatggaggccaaccagcagggaacctaccgattgaggtacgccccaccattacctccctctaacgatactctcgactccgccgattag

SEQ ID NO: 194774 - DNA, 5518 bp, Artificial Sequence
  derived and/or modified sequence
atgctgaggatgaagctgccgctgaagccaacgcaccccgcggagccgccgcccgaggcggaggagcccgaggcggacgcgcggccgggcgcgaaggcgccttcgcgccgccgccgcgactgccgccccccgccgccgccgccgccgcccgcgggcccgtcgcggggccctctgccgccgccgccgccgccccggggactcgggccgcctgttgctggtggagcggcggcgggggcgggtatgccgggcggcggcggggggccctcggcggcgctgcgcgagcaggagcgggtatacgagtggttcgggctggtgctgggctcggcgcagcgcctggagttcatgtgcgggctgctggacctgtgcaacccgctggagctgcgcttccttggctcgtgcctggaggacctggcgcgcaaggactaccactacctgcgcgactcggaggccaaggccaacggcctctcggacccggggccgctggccgacttccgagagcccgcggtgcgctcgcgcctcatcgtctacctggcgctgctgggctcggagaaccgggaggccgctggccgtctgcaccgcctgctaccccaggtggactcggtgctcaaaagcctgcgcgcggcccggggcgagggctcgcggggcggcgcggaggacgagcgcggcgaggacggcgacggcgagcaggacgccgagaaggacggctcaggcccggaaggcggcattgtggagccccgggtcggcggcgggcttggctccagggcccaggaggaactgctgctgctcttcaccatggcctcgctgcacccggctttctccttccaccagcgggtcaccctgagggaacacttggagaggctccgcgccgcgctccgcgggggccccgaggacgcggaggtggaggtagagccgtgcaagtttgccggccccagggcccagaacaactctgctcatggtgattacatgcaaaataacgagagcagcttaatagagcaagctccaatacctcaggacggacttaccgtggcacctcacagagctcagcgagaagctgtacacattgagaagataatgttgaaaggagtccagagaaaaagagctgacaaatactgggagtacactttcaaagtaaattggtctgatctttcagtcacaacagtaacaaaaacccaccaagaactacaggaatttctactgaagcttccaaaggaactgtcttcagagacttttgacaagaccatcttaagagccctgaatcagggttccttgaaaagggaggaacggcgacatcctgacctagagcccatcctaaggcagctattttcaagttcatcacaagcttttctacaaagtcagaaagtacacagcttctttcagtccatatcatcagactccctacacagtatcaataacttacaatcctctctgaagacttctaagatattagaacacttaaaagaagacagctctgaagcttcaagtcaagaagaagatgtgttgcagcatgccataatccacaagaagcatactgggaaaagtcccattgtgaacaatattggtacaagttgttctccattggatgggcttaccatgcaatattctgaacagaatggaattgtggattggaggaagcaaagctgtaccaccattcaacacccagagcactgtgtgacctcggctgaccagcattctgctgaaaaacggagtttatcttcaataaataagaagaaaggaaagccacaaacagaaaaggagaaaattaagaaaactgacaacagattgaatagtagaataaatggtattagactctccactcctcagcatgcccatggtggtactgtgaaagatgtgaatttggacattggctctggacatgacacatgtggagaaacatcttcagagagttacagttctccatctagtccccgacatgatggaagagaaagttttgaaagtgaagaagagaaagacagagacacagacagcaattctgaggattctgggaatccatcaacaactaggtttacaggttacggttctgtcaaccagactgtcactgtcaagccacctgttcaaattgcttcactaggaaatgagaatggaaaccttttagaagatcccttaaactcacccaagtatcagcatatttcttttatgccaacgttacactgtgtcatgcacaatggtgcccagaagtctgaagttgtcgttcctgcacccaaacccgctgatggcaaaaccatagggatgcttgttcctagtcctgttgctatttctgcaataagggagtctgcaaattcaacccctgttggaatactagggccaacagcttgcactggagaatcggaaaagcaccttgagttactggcttcccctttacctattccatcaaccttccttccacacagtagtactcccgctttgcatcttacagttcagaggctaaagttgccaccaccacagggatcttctgagagctgcacagttaacatcccacaacaaccacccggaagcctgagcatcgcatcaccaaacactgcctttattcctatccataacccaggtagtttcccaggctctcctgttgctaccacggaccccatcacaaaatctgcatcccaagtggtaggactcaatcaaatggtgcctcaaattgagggaaacacagggacagtccctcagcctaccaatgtgaaggtagttcttccagcagctggcctctcagctgctcagccaccagcttcctaccccttaccaggctctccccttgctgccggcgtgttacccagccagaactccagtgtgctcagcacagcagcaacttctccccagccagcgagcgcaggtatcagccaggcccaggcaactgttcctcctgcagttcctacccacaccccaggccctgccccgagcccaagccctgccttgacacacagtaccgcgcagagtgacagcacctcttacatcagtgctgtggggaacacgaacgctaatgggacagtagtgccaccgcagcagatgggctcaggtccttgtggttcttgtgggcgaaggtgcagctgtgggaccaatggaaaccttcagctaaatagttactattatcctaatccaatgcctggaccaatgtaccgagtcccttcattctttactctgccatccatttgcaatggcagctacctcaaccaagcacatcagagcaatggaaaccaacttcctttttttctgcctcagactccatatgcaaatggactggtacatgacccagtcatggggagccaagccaactatggcatgcagcagatggcaggatttgggagattctatcctgtatatccagcacctaacgtagttgccaacaccagtggttcggggcccaagaagaatgggaatgtctcatgttacaattgtggtgtaagcggacactatgcacaggactgtaagcagtcgtccatggaggccaatcaacaaggcacttacagactgagatacgcacctcccctccccccttctaatgatacgttggattctgcagactgaaacgagtaaagcttgcctacttaatacactcaagtgtggggagtcatggggtgtggaggggaggaaaggaaaggtattttgtttctttgtctatacatttcctagatttctatgcagttgggatttttcatttctcttgtaccaatgtccaaaacaagaaagaatgcaatgcttttgagcctctggtctcctggttcaacaacaggcttatatgtatgatacatgtaatttaaaccttcagacaaacttaaatgttggtgcgtgcttttttttttttttttacactgaatacttgctgtgtgcaatgtttactgaatctttaaaactgtgtatttgaccttttttttacaacactggtgacagtcatatggttttgaaaaaaaaaagaaattttgcttcttcccagcttttctcactttcaccctaaacgacacttcctccccagccagcctcactctgtctccggcccgcagcaggagcagccagcagtgcattcaccccacttttgtaaactgctctgcatataaaccaagggcagaatgtttcaccctgatcttatgggaggaatcaaactcccaaaatagtgtgtatatatgtaataaacagcgtcacgtaaatacatatatgcagtgcttgttgtccaaatagaaatgaaaataagtggaagagagaggaagaagtcaaaccatatgaaactgaaaaaatatgacgtacgaaatggacaaaaagctttttctgaaaccaactttttacttccatcatccttttttagcctgttgcttcagagagacacaaagtgaacacactggtgtgaatgtcgctctctgtgtgcttgtgtttgtaatgaaagtctacagccaattttacttgtctaccaccgtgttgtgctcaaagagacactacttgagtgaagatttcttctttccctgtaccagctgttacagtgttacgttgtgtttaaaatgtgtatggtttattgcaatctgaacagagctatgggtttctaccataagtcaggttgtttgttccctaacctgtctctcatagcaaagtcacttttataacagtttaccactatgcttgattataatgtgaaaggcggaattctgagtgtgttaagatggtattaatcatgtcggtgtcatgtcactaagtttaatgctgctgtttttaaaaaaaaaaaaaagtttttttaaaaagccaatctatgtactaaattgcttccaggtaatttttgatttcctaaagtgcactgaggttatctggaagattgggtgtattttttggtgactgctgcattcatcagcaatgaacagtttccactgtatagtcctaggggtcagggggtgggggtttcattttccattcctcagcacagagcagaaatgatagatttttattgtttggagtaacgttggtatgcagcagaggaacgtaaacatttggtcttggttcagaagcctaacagattgctagacaagagaaaaaacttgaagaaaaaagaagcttaatttcatgcttcataagtagcatttatatttatagcaccaatgtacattttgaaactttctttcaggggtgggagttatggggaaggggtgggtgtgaaggggtagatgaaagctttaatttagaaagaaagttcaagtaaaggaaattattttgattaaatatattttatttgatctgggtatttttggaccacattattaaattaattgttaagctgcagttgagttgttcaagtgagagttttgataagccacttatgggccgcgttgtgaatcacttgccagttgtactttatggagcttattttatgatttaaaatactgtactgtacataggaggtatgttaccttctccttatttgtatgtttaccatatactttgatatttgaaatgttatgtactggaaaggccacttatatttctagaacagattggattttatgcaaccttttttccttgaattaacagc

SEQ ID NO: 194775 - DNA, 3537 bp, Artificial Sequence
  derived and/or modified sequence
atgctgagaatgaagctgcccctgaagcccacccaccccgccgagcccccccccgaggccgaggagcccgaggccgacgccagacccggcgccaaggcccccagcagaagaagaagagactgcagaccccccccccccccccccccccccgccggccccagcagaggccccctgccccccccccccccccccagaggcctgggcccccccgtggccggcggcgccgccgccggcgccggcatgcccggcggcggcggcggccccagcgccgccctgagagagcaggagagagtgtacgagtggttcggcctggtgctgggcagcgcccagagactggagttcatgtgcggcctgctggacctgtgcaaccccctggagctgagattcctgggcagctgcctggaggacctggccagaaaggactaccactacctgagagacagcgaggccaaggccaacggcctgagcgaccccggccccctggccgacttcagagagcccgccgtgagaagcagactgatcgtgtacctggccctgctgggcagcgagaacagagaggccgccggcagactgcacagactgctgccccaggtggacagcgtgctgaagagcctgagagccgccagaggcgagggcagcagaggcggcgccgaggacgagagaggcgaggacggcgacggcgagcaggacgccgagaaggacggcagcggccccgagggcggcatcgtggagcccagagtgggcggcggcctgggcagcagagcccaggaggagctgctgctgctgttcaccatggccagcctgcaccccgccttcagcttccaccagagagtgaccctgagagagcacctggagagactgagagccgccctgagaggcggccccgaggacgccgaggtggaggtggagccctgcaagttcgccggccccagagcccagaacaacagcgcccacggcgactacatgcagaacaacgagagcagcctgatcgagcaggcccccatcccccaggacggcctgaccgtggccccccacagagcccagagagaggccgtgcacatcgagaagatcatgctgaagggcgtgcagagaaagagagccgacaagtactgggagtacaccttcaaggtgaactggagcgacctgagcgtgaccaccgtgaccaagacccaccaggagctgcaggagttcctgctgaagctgcccaaggagctgagcagcgagaccttcgacaagaccatcctgagagccctgaaccagggcagcctgaagagagaggagagaagacaccccgacctggagcccatcctgagacagctgttcagcagcagcagccaggccttcctgcagagccagaaggtgcacagcttcttccagagcatcagcagcgacagcctgcacagcatcaacaacctgcagagcagcctgaagaccagcaagatcctggagcacctgaaggaggacagcagcgaggccagcagccaggaggaggacgtgctgcagcacgccatcatccacaagaagcacaccggcaagagccccatcgtgaacaacatcggcaccagctgcagccccctggacggcctgaccatgcagtacagcgagcagaacggcatcgtggactggagaaagcagagctgcaccaccatccagcaccccgagcactgcgtgaccagcgccgaccagcacagcgccgagaagagaagcctgagcagcatcaacaagaagaagggcaagccccagaccgagaaggagaagatcaagaagaccgacaacagactgaacagcagaatcaacggcatcagactgagcaccccccagcacgcccacggcggcaccgtgaaggacgtgaacctggacatcggcagcggccacgacacctgcggcgagaccagcagcgagagctacagcagccccagcagccccagacacgacggcagagagagcttcgagagcgaggaggagaaggacagagacaccgacagcaacagcgaggacagcggcaaccccagcaccaccagattcaccggctacggcagcgtgaaccagaccgtgaccgtgaagccccccgtgcagatcgccagcctgggcaacgagaacggcaacctgctggaggaccccctgaacagccccaagtaccagcacatcagcttcatgcccaccctgcactgcgtgatgcacaacggcgcccagaagagcgaggtggtggtgcccgcccccaagcccgccgacggcaagaccatcggcatgctggtgcccagccccgtggccatcagcgccatcagagagagcgccaacagcacccccgtgggcatcctgggccccaccgcctgcaccggcgagagcgagaagcacctggagctgctggccagccccctgcccatccccagcaccttcctgccccacagcagcacccccgccctgcacctgaccgtgcagagactgaagctgccccccccccagggcagcagcgagagctgcaccgtgaacatcccccagcagccccccggcagcctgagcatcgccagccccaacaccgccttcatccccatccacaaccccggcagcttccccggcagccccgtggccaccaccgaccccatcaccaagagcgccagccaggtggtgggcctgaaccagatggtgccccagatcgagggcaacaccggcaccgtgccccagcccaccaacgtgaaggtggtgctgcccgccgccggcctgagcgccgcccagccccccgccagctaccccctgcccggcagccccctggccgccggcgtgctgcccagccagaacagcagcgtgctgagcaccgccgccaccagcccccagcccgccagcgccggcatcagccaggcccaggccaccgtgccccccgccgtgcccacccacacccccggccccgcccccagccccagccccgccctgacccacagcaccgcccagagcgacagcaccagctacatcagcgccgtgggcaacaccaacgccaacggcaccgtggtgcccccccagcagatgggcagcggcccctgcggcagctgcggcagaagatgcagctgcggcaccaacggcaacctgcagctgaacagctactactaccccaaccccatgcccggccccatgtacagagtgcccagcttcttcaccctgcccagcatctgcaacggcagctacctgaaccaggcccaccagagcaacggcaaccagctgcccttcttcctgccccagaccccctacgccaacggcctggtgcacgaccccgtgatgggcagccaggccaactacggcatgcagcagatggccggcttcggcagattctaccccgtgtaccccgcccccaacgtggtggccaacaccagcggcagcggccccaagaagaacggcaacgtgagctgctacaactgcggcgtgagcggccactacgcccaggactgcaagcagagcagcatggaggccaaccagcagggcacctacagactgagatacgccccccccctgccccccagcaacgacaccctggacagcgccgactag

SEQ ID NO: 194776 - DNA, 2349 bp, Artificial Sequence
  derived and/or modified sequence
atggccgccgccatggagaccgagcagctgggagtggagatattcgagactgcagattgtgaggagaatattgaatcgcaggacaggccaaagttggaacctttctatgtggaacggtacagttggtcccagctgaagaagctccttgccgatactcgaaagtatcacggttacatgatggctaaggctccacacgactttatgttcgtcaagagaaatgaccctgacggtcctcatagtgaccgcatctattatttggctatgtctggcgagaaccgcgagaacactttgttctactctgagatacctaagactataaacagagccgcagtgcttatgttgtcctggaaaccactgctggatctctttcaggccactcttgattacgggatgtatagccgggaggaagaattgttgcgggaaaggaaaaggatcggtactgtcggtatcgcctcctacgactaccaccagggatctggtacgtttttatttcaggccggctcaggcatctaccacgttaaagatggagggcctcaggggtttacgcagcaacccttgcggcccaacctggttgagaccagttgcccaaatataagaatggatcccaagctgtgtccggccgatccggactggatcgcgtttatccatagtaacgacatttggatttctaatattgtgacccgggaagagcgccggttgacatatgtgcataacgagctggcaaacatggaagaagatgccaggagtgccggcgtagccaccttcgtacttcaagaggagtttgaccggtattccggctattggtggtgccctaaagccgaaaccactccatcgggcgggaaaatcctcaggatcctgtacgaggagaacgacgagtctgaggttgagataatccatgtgacgtcacctatgctcgaaacacgtcgggcagattccttcagatatcctaagacgggcaccgccaatccgaaagtcactttcaaaatgagcgagattatgatcgacgcagaaggtagaattattgacgtcatcgataaagagctgatccagccctttgagatcctgtttgagggagtggagtacatagcccgagccggctggactccagagggcaagtacgcttggagtattctgctagatcgcagccagaccaggcttcagatcgtgcttatcagcccagaactatttataccggtggaagatgacgtcatggagagacaacgcctgattgagtcggttccagactccgtcacacccctgatcatctacgaagagacgacggatatatggataaacatacacgatatcttccatgtgttcccgcagtcccacgaagaagagatcgagttcatctttgcttctgagtgtaaaactggcttcaggcatctgtataagatcacatctatcctcaaagaaagcaaatataaaagatccagcggtggtttgcccgcaccatccgattttaagtgtccaatcaaagaggagatagcaatcactagcggggagtgggaagttctggggagacatggcagcaacattcaagttgacgaggtgcgccgacttgtttattttgaagggaccaaagactctccactggaacaccatctgtacgtggtgagctacgtaaaccccggcgaggtaacccgcctgaccgaccggggttactcccactcctgctgtatcagtcagcactgcgacttcttcatatctaaatactctaatcaaaaaaatcctcattgtgttagcctctacaaactatcttcacccgaagatgaccctacttgtaaaactaaagagttctgggctactatactcgacagcgccgggcctctgcccgactatacgcctcctgaaattttctcattcgaatcgactacaggtttcacactatatgggatgctgtacaagccgcacgacttacagccagggaaaaagtacccaactgttcttttcatttatggcgggccacaggtggctattgctggagctcccgtgaccctgtggatcttctacgacaccggatatacagaaaggtatatgggacatcctgaccagaacgaacaaggctattacctgggcagcgtggctatgcaggcagagaagttcccaagtgagccgaatagactgctgttactccacgggtttctcgacgaaaacgtccactttgcccatacaagcatactcttgtcttttctggtacgggccggcaaaccttacgatttgcaaatctatccacaggaaaggcattccatccgggtcccagagagtggcgagcactacgaactgcacttgctgcattacctgcaggaaaacctcgggtcacgtatagctgccctcaaagtcatttag

SEQ ID NO: 194777 - DNA, 2349 bp, Artificial Sequence
  derived and/or modified sequence
atggctgctgccatggagacagagcagctgggcgtggagatctttgaaacagctgactgtgaggagaacatcgagagccaggaccggcccaagctggagcccttctacgtggagcgctacagctggagccagctgaagaagctgctggccgacaccaggaagtaccacggctacatgatggccaaggcccctcatgacttcatgtttgtgaagagaaatgaccctgatggcccccacagcgaccgcatctactacctggccatgtctggagaaaatcgggagaacaccctcttctacagcgagatccccaagaccatcaacagagctgctgtgctgatgctgtcctggaagcccctgctggacctcttccaggccaccctggactatggcatgtacagccgggaggaggagctgctgcgggagaggaagagaattggaacagtgggcatcgccagctatgactaccaccagggcagcggcaccttcctgttccaggccggcagcggcatctaccacgtgaaggatggcggcccccagggcttcacccagcagcccctgcggcccaacctggtggagaccagctgccccaacatccgcatggaccccaagctgtgcccagctgaccctgactggatcgccttcatccacagcaatgacatctggatcagcaacatcgtgacccgggaggagcggcggctgacctacgtgcacaatgagctggccaacatggaggaggatgcccggtctgctggggtggccacctttgtgctgcaggaggagtttgaccgctacagcggctactggtggtgccccaaggccgagaccacccccagcggcggcaagatcctgcgcatcctgtatgaagaaaatgatgaaagtgaggtggagatcatccacgtgaccagccccatgctggagacccggcgggctgacagcttccgctaccccaagacaggaacagccaaccccaaggtgaccttcaagatgtctgagatcatgattgatgctgagggccgcatcattgatgtgattgacaaggagctgatccagccctttgagatcctgtttgagggcgtggagtacatcgcccgggccggctggaccccagagggcaagtatgcctggagcatcctgctggacaggagccagacccggctgcagatcgtgctgatcagccctgagctgttcatccctgtggaggatgatgtgatggagcggcagaggctcatcgagagcgtgcctgacagcgtgacccccctcatcatctatgaggagaccacagacatctggatcaacatccatgacatcttccacgtgttcccccagagccatgaggaggagattgagttcatctttgccagcgagtgcaagacaggcttccgccacctgtacaagatcaccagcatcctgaaggagagcaagtacaagaggagcagcggcggcctgcctgcccccagcgacttcaagtgccccatcaaggaggagatcgccatcaccagcggggagtgggaggtgctgggcagacatggcagcaacatccaggtggatgaggtgcggcggctggtgtactttgagggcaccaaggacagccccctggagcaccacctgtatgtggtgtcctatgtgaaccctggagaggtgacccggctgacagaccggggctacagccacagctgctgcatcagccagcactgtgacttcttcatcagcaagtacagcaaccagaagaacccccactgtgtgtccctgtacaagctgagcagcccagaagatgaccccacctgcaagaccaaggagttctgggccaccatcctggacagcgctggccccctgcctgactacaccccacctgagatcttctcctttgagagcaccaccggcttcaccctgtatggcatgctgtacaagccccatgacctgcagcccgggaagaagtaccccaccgtgctcttcatctatggaggcccccaggtggccatcgccggggcccctgtgaccctgtggatcttctatgacaccggctacacagagcgctacatgggccacccagaccagaatgagcagggctactacctgggctctgtggccatgcaggccgagaagttccccagcgagcccaaccggctgctgctgctgcacggcttcctggatgaaaatgtgcactttgcccacaccagcatcctgctgtccttcctggtgcgggccggcaagccctatgacctgcagatctacccccaggagcggcacagcatccgggtgcctgagagcggggagcactatgagctgcacctgctgcactacctgcaggagaacctgggcagcagaattgctgccctgaaggtgatctag

SEQ ID NO: 194778 - DNA, 2349 bp, Artificial Sequence
  derived and/or modified sequence
atggccgccgccatggagaccgagcagctgggcgtggagatcttcgaaacggcggattgcgaggagaacatcgaaagccaagatcgccctaagctcgagccattttatgtcgagcgctattcctggagccagcttaaaaaactgctggctgacacacgcaaataccatgggtatatgatggctaaggctcctcacgactttatgtttgtgaaacggaacgatcctgacggaccgcactcggacagaatctattacctagcgatgagcggagaaaatcgggagaacacgctcttttacagcgaaattccaaagactatcaatcgtgcagccgttctcatgcttagttggaagccactcctcgatctgtttcaagcgacactagactatggtatgtattcaagagaggaggagctcctgcgggagcggaagagaataggaaccgtggggattgcctcctatgactatcatcaagggagtgggacttttttgttccaagctggcagcgggatatatcacgtcaaggatggcgggccacaaggcttcacccagcaacccctgcgccccaacttggtcgaaactagctgtccgaatattaggatggaccccaaattgtgtcccgccgatcccgattggatcgcattcatccactcaaatgacatttggatctcaaacattgtgacccgcgaggaacgtaggctgacctacgttcataacgagctggccaatatggaggaggacgctcgatctgccggcgtggcaactttcgtgctgcaggaagagttcgatagatacagcggctattggtggtgccccaaggcggagaccaccccctccggtggtaagatcctgcggattctctacgaagagaacgatgaatcggaggtggaaatcattcatgtcacctcccctatgcttgagaccagacgcgcggactcctttcgctatcccaaaaccggcactgccaatccgaaggtgacttttaaaatgagcgaaatcatgatcgacgcggaaggaagaattattgacgtcattgataaggaactgattcagccattcgagattttattcgagggtgtagagtacatcgcccgggcaggatggactcctgaaggcaaatatgcctggtctatactgctcgacaggtctcagacacggctgcagatagtcttaatttctccagaattattcattccagtggaggatgacgttatggaaaggcagcgcttgatcgaatctgtgcccgacagcgttacgcctctaattatttatgaggagactaccgacatctggataaacatccacgacatctttcatgtgtttcctcagagtcatgaggaggagatcgagtttatattcgctagcgaatgtaagaccggtttcaggcacctctataaaatcacaagcatactcaaagagtccaagtacaaacgctcttccggagggctgccggcaccctctgactttaaatgccctataaaggaagagattgcaatcacgtcaggtgaatgggaggtgctgggacgccacggaagcaatattcaagtggatgaagtccgtcgcctcgtgtattttgagggcactaaagacagccccctcgaacatcacctctacgtcgtctcctatgtcaacccaggagaggtcacacgcctcacggaccgaggttactcacacagctgttgtatatctcagcattgtgacttctttatttctaagtattcgaatcagaagaacccgcattgcgtctcactctacaagctctctagtccagaggatgaccccacttgtaagaccaaagaattttgggcaacaatcttggattcagctgggccgctgcccgattatacacccccagaaattttctcttttgagtccaccaccggcttcactctctacggtatgctgtacaagccccacgacctccagcccggcaagaaatatcctacagtgctatttatttacggaggacctcaggtggctatcgctggcgcccctgttaccttgtggattttctacgacactgggtacactgaacgctacatgggccatcccgatcaaaacgaacagggatactaccttggaagcgtggctatgcaggccgagaaatttccatctgagcctaaccgtctgctactgctccatggcttcctggacgaaaacgttcattttgcccatacttcaattctcttgagcttcttggtgcgggctggcaagccttacgatttgcagatttatccgcaagagagacacagcattagggttcccgagtctggcgaacattacgaattacacctcctccattacctgcaggagaatctggggtctaggatcgccgccttgaaagtcatatag

SEQ ID NO: 194779 - DNA, 2349 bp, Artificial Sequence
  derived and/or modified sequence
atggcggcagcaatggaaaccgagcagctgggtgtcgaaatctttgaaacagcagactgtgaagaaaatatcgagagtcaggataggccaaagctggagcccttctatgtagagcggtacagttggtcccaactgaagaaactcctcgccgatacacgtaaatatcatggctacatgatggcaaaggcccctcacgacttcatgttcgtgaagcgcaatgatccggacggtccacatagtgaccggatctattaccttgccatgtcgggggagaacagagaaaacactctgttttattcagaaatacccaaaacaatcaatcgagctgcggtcctgatgctgagttggaaacctctgcttgacctctttcaggctacattagattatgggatgtattcacgggaggaggagctgctgcgggagcgcaagaggattggaaccgtgggtattgccagttatgattaccatcagggcagtgggactttcctgttccaggccggaagtggaatttaccacgtgaaggatgggggaccacagggatttacacaacagcctcttcggccaaacctggtcgaaacctcttgtcccaatatccgaatggaccccaagctctgcccagccgatcctgactggattgcgttcatccatagcaacgacatctggatttctaatatcgtgactcgcgaagaacgcaggcttacttatgtgcataatgagctggccaatatggaagaagatgccagaagtgcaggtgtcgccacgttcgttttacaggaagaatttgacaggtatagcggctattggtggtgtccgaaagctgaaacaactccatccggaggcaaaattctgcgtatactctacgaggagaacgacgagagcgaggtggaaattatacacgtcacttcccccatgctggaaacgaggagagctgattctttcaggtaccccaagactggaacggcaaaccccaaggtgacattcaagatgtctgaaattatgatcgacgcagaggggagaatcattgacgtgatagataaggagctaatacaaccttttgaaatcttattcgagggtgtagagtacatcgcacgcgctgggtggactcctgagggcaagtacgcctggagtatactgctcgacaggtcgcaaacaagactgcaaatagtgctcatctcaccagagttatttatccctgtcgaagatgacgtgatggagcgacaacggttgattgaatcggttcctgattcagtcacccctctcatcatctatgaagaaacaactgatatctggattaacattcatgatatcttccacgtgttccctcagtcccatgaggaggagatcgaatttatctttgcctctgaatgtaagaccggctttcgccacttgtataagatcacttcgatactcaaggagagcaagtacaagagaagttccgggggtctccccgcaccaagtgacttcaaatgtccaattaaggaagaaatcgctatcacgagcggagaatgggaggttctgggacggcacggctctaatattcaggtggatgaggtgaggagattggtctatttcgagggtaccaaggactctccactggaacatcacctgtatgttgtctcttacgtgaatcccggagaagtcacccgcctcacggatcgtgggtactcccactcttgttgcatctctcagcactgtgatttctttatatcaaaatattcaaaccagaagaatcctcattgcgtatccctctacaaactgtcctcacccgaggatgaccccacctgcaagactaaggaattctgggccacaattttagattcggccggacctttgcccgattacacacccccagaaattttcagcttcgagagcacaaccggctttactctatatggcatgctttataaaccacacgatcttcagcccggaaagaaatatccaactgtcctgtttatttatgggggaccgcaggttgctatcgcaggggctccagtgacgctgtggattttttatgatacaggatacactgagcgatatatgggacacccggaccagaacgagcagggctactacttggggtccgtcgctatgcaagccgaaaagttcccatccgaacccaatcgtctgctgctcctgcatggctttctggatgagaatgttcatttcgctcacacttcgatacttctgtcattcttggtgcgcgcaggtaagccctacgacctgcaaatctatcctcaggagaggcactcaattcgagtacccgagagcggcgagcactatgagctccaccttcttcactatctccaagaaaatctgggatctcgcattgcagcactcaaggtaatttag

SEQ ID NO: 194780 - DNA, 2349 bp, Artificial Sequence
  derived and/or modified sequence
atggccgccgccatggagaccgagcagctgggcgtggagatcttcgagaccgccgactgcgaggagaacatcgagagccaggacagacccaagctggagcccttctacgtggagagatacagctggagccagctgaagaagctgctggccgacaccagaaagtaccacggctacatgatggccaaggccccccacgacttcatgttcgtgaagagaaacgaccccgacggcccccacagcgacagaatctactacctggccatgagcggcgagaacagagagaacaccctgttctacagcgagatccccaagaccatcaacagagccgccgtgctgatgctgagctggaagcccctgctggacctgttccaggccaccctggactacggcatgtacagcagagaggaggagctgctgagagagagaaagagaatcggcaccgtgggcatcgccagctacgactaccaccagggcagcggcaccttcctgttccaggccggcagcggcatctaccacgtgaaggacggcggcccccagggcttcacccagcagcccctgagacccaacctggtggagaccagctgccccaacatcagaatggaccccaagctgtgccccgccgaccccgactggatcgccttcatccacagcaacgacatctggatcagcaacatcgtgaccagagaggagagaagactgacctacgtgcacaacgagctggccaacatggaggaggacgccagaagcgccggcgtggccaccttcgtgctgcaggaggagttcgacagatacagcggctactggtggtgccccaaggccgagaccacccccagcggcggcaagatcctgagaatcctgtacgaggagaacgacgagagcgaggtggagatcatccacgtgaccagccccatgctggagaccagaagagccgacagcttcagataccccaagaccggcaccgccaaccccaaggtgaccttcaagatgagcgagatcatgatcgacgccgagggcagaatcatcgacgtgatcgacaaggagctgatccagcccttcgagatcctgttcgagggcgtggagtacatcgccagagccggctggacccccgagggcaagtacgcctggagcatcctgctggacagaagccagaccagactgcagatcgtgctgatcagccccgagctgttcatccccgtggaggacgacgtgatggagagacagagactgatcgagagcgtgcccgacagcgtgacccccctgatcatctacgaggagaccaccgacatctggatcaacatccacgacatcttccacgtgttcccccagagccacgaggaggagatcgagttcatcttcgccagcgagtgcaagaccggcttcagacacctgtacaagatcaccagcatcctgaaggagagcaagtacaagagaagcagcggcggcctgcccgcccccagcgacttcaagtgccccatcaaggaggagatcgccatcaccagcggcgagtgggaggtgctgggcagacacggcagcaacatccaggtggacgaggtgagaagactggtgtacttcgagggcaccaaggacagccccctggagcaccacctgtacgtggtgagctacgtgaaccccggcgaggtgaccagactgaccgacagaggctacagccacagctgctgcatcagccagcactgcgacttcttcatcagcaagtacagcaaccagaagaacccccactgcgtgagcctgtacaagctgagcagccccgaggacgaccccacctgcaagaccaaggagttctgggccaccatcctggacagcgccggccccctgcccgactacaccccccccgagatcttcagcttcgagagcaccaccggcttcaccctgtacggcatgctgtacaagccccacgacctgcagcccggcaagaagtaccccaccgtgctgttcatctacggcggcccccaggtggccatcgccggcgcccccgtgaccctgtggatcttctacgacaccggctacaccgagagatacatgggccaccccgaccagaacgagcagggctactacctgggcagcgtggccatgcaggccgagaagttccccagcgagcccaacagactgctgctgctgcacggcttcctggacgagaacgtgcacttcgcccacaccagcatcctgctgagcttcctggtgagagccggcaagccctacgacctgcagatctacccccaggagagacacagcatcagagtgcccgagagcggcgagcactacgagctgcacctgctgcactacctgcaggagaacctgggcagcagaatcgccgccctgaaggtgatctag

SEQ ID NO: 194781 - protein, 2540 aa, Artificial Sequence
  derived and/or modified sequence
MLTDSGGGGTSFEEDLDSVAPRSAPAGASEPPPPGGVGLGIRTVRLFGEAGPASGVGSSGGGGSGSGTGGGDAALDFKLAAAVLRTGGGGGASGSDEDEVSEVESFILDQEDLDNPVLKTTSEIFLSSTAEGADLRTVDPETQARLEALLEAAGIGKLSTADGKAFADPEVLRRLTSSVSCALDEAAAALTRMKAENSHNAGQVDTRSLAEACSDGDVNAVRKLLDEGRSVNEHTEEGESLLCLACSAGYYELAQVLLAMHANVEDRGNKGDITPLMAASSGGYLDIVKLLLLHDADVNSQSATGNTALTYACAGGFVDIVKVLLNEGANIEDHNENGHTPLMEAASAGHVEVARVLLDHGAGINTHSNEFKESALTLACYKGHLDMVRFLLEAGADQEHKTDEMHTALMEACMDGHVEVARLLLDSGAQVNMPADSFESPLTLAACGGHVELAALLIERGANLEEVNDEGYTPLMEAAREGHEEMVALLLAQGANINAQTEETQETALTLACCGGFSEVADFLIKAGADIELGCSTPLMEASQEGHLELVKYLLASGANVHATTATGDTALTYACENGHTDVADVLLQAGADLEHESEGGRTPLMKAARAGHLCTVQFLISKGANVNRATANNDHTVVSLACAGGHLAVVELLLAHGADPTHRLKDGSTMLIEAAKGGHTNVVSYLLDYPNNVLSVPTTDVSQLPPPSQDQSQVPRVPTHTLAMVVPPQEPDRTSQENSPALLGVQKGTSKQKSSSLQVADQDLLPSFHPYQPLECIVEETEGKLNELGQRISAIEKAQLKSLELIQGEPLNKDKIEELKKNREEQVQKKKKILKELQKVERQLQMKTQQQFTKEYLETKGQKDTVSLHQQCSHRGVFPEGEGDGSLPEDHFSELPQVDTILFKDNDVDDEQQSPPSAEQIDFVPVQPLSSPQCNFSSDLGSNGTNSLELQKVSGNQQIVGQPQIAITGHDQGLLVQEPDGLMVATPAQTLTDTLDDLIAAVSTRVPTGSNSSSQTTECLTPESCSQTTSNVASQSMPPVYPSVDIDAHTESNHDTALTLACAGGHEELVSVLIARDAKIEHRDKKGFTPLILAATAGHVGVVEILLDKGGDIEAQSERTKDTPLSLACSGGRQEVVDLLLARGANKEHRNVSDYTPLSLAASGGYVNIIKILLNAGAEINSRTGSKLGISPLMLAAMNGHVPAVKLLLDMGSDINAQIETNRNTALTLACFQGRAEVVSLLLDRKANVEHRAKTGLTPLMEAASGGYAEVGRVLLDKGADVNAPPVPSSRDTALTIAADKGHYKFCELLIHRGAHIDVRNKKGNTPLWLASNGGHFDVVQLLVQAGADVDAADNRKITPLMSAFRKGHVKVVQYLVKEVNQFPSDIECMRYIATITDKELLKKCHQCVETIVKAKDQQAAEANKNASILLKELDLEKSREESRKQALAAKREKRKEKRKKKKEEQKRKQEEDEENKPKENSELPEDEDEEENDEDVEQEVPIEPPSATTTTTIGISATSATFTNVFGKKRANVVTTPSTNRKNKKNKTKETPPTAHLILPEQHMSLAQQKADKNKINGEPRGGGAGGNSDSDNLDSTDCNSESSSGGKSQELNFVMDVNSSKYPSLLLHSQEEKTSTATSKTQTRLEGEVTPNSLSTSYKTVSLPLSSPNIKLNLTSPKRGQKREEGWKEVVRRSKKLSVPASVVSRIMGRGGCNITAIQDVTGAHIDVDKQKDKNGERMITIRGGTESTRYAVQLINALIQDPAKELEDLIPKNHIRTPASTKSIHANFSSGVGTTAASSKNAFPLGAPTLVTSQATTLSTFQPANKLNKNVPTNVRSSFPVSLPLAYPHPHFALLAAQTMQQIRHPRLPMAQFGGTFSPSPNTWGPFPVRPVNPGNTNSSPKHNNTSRLPNQNGTVLPSESAGLATASCPITVSSVVAASQQLCVTNTRTPSSVRKQLFACVPKTSPPATVISSVTSTCSSLPSVSSAPITSGQAPTTFLPASTSQAQLSSQKMESFSAVPPTKEKVSTQDQPMANLCTPSSTANSCSSSASNTPGAPETHPSSSPTPTSSNTQEEAQPSSVSDLSPMSMPFASNSEPAPLTLTSPRMVAADNQDTSNLPQLAVPAPRVSHRMQPRGSFYSMVPNATIHQDPQSIFVTNPVTLTPPQGPPAAVQLSSAVNIMNGSQMHINPANKSLPPTFGPATLFNHFSSLFDSSQVPANQGWGDGPLSSRVATDASFTVQSAFLGNSVLGHLENMHPDNSKAPGFRPPSQRVSTSPVGLPSIDPSGSSPSSSSAPLASFSGIPGTRVFLQGPAPVGTPSFNRQHFSPHPWTSASNSCDSPIPSVSSGSSSPLSATSAPPTLGQPKGVSASQDRKIPPPIGTERLARIRQGGSVAQAPAGTSFVAPVGHSGIWSFGVNAVSEGLSGWSQSVMGNHPMHQQLSDPSTFSQHQPMERDDSGMVAPSNIFHQPMASGFVDFSKGLPISMYGGTIIPSHPQLADVPGGPLFNGLHNPDPAWNPMIKVIQNSTECTDAQQ

SEQ ID NO: 194782 - protein, 1007 aa, Artificial Sequence
  derived and/or modified sequence
MVALLLAQGANINAQTEETQETALTLACCGGFSEVADFLIKAGADIELGCSTPLMEASQEGHLELVKYLLASGANVHATTATGDTALTYACENGHTDVADVLLQAGADLDKQEDMKTILEGIDPAKHQEHESEGGRTPLMKAARAGHLCTVQFLISKGANVNRATANNDHTVVSLACAGGHLAVVELLLAHGADPTHRLKDGSTMLIEAAKGGHTNVVSYLLDYPNNVLSVPTTDVSQLPPPSQDQSQVPRVPTHTLAMVVPPQEPDRTSQENSPALLGVQKGTSKQKSSSLQVADQDLLPSFHPYQPLECIVEETEGKLNELGQRISAIEKAQLKSLELIQGEPLNKDKIEELKKNREEQVQKKKKILKELQKVERQLQMKTQQQFTKEYLETKGQKDTVSLHQQCSHRGVFPEGEGDGSLPEDHFSELPQVDTILFKDNDVDDEQQSPPSAEQIDFVPVQPLSSPQCNFSSDLGSNGTNSLELQKVSGNQQIVGQPQIAITGHDQGLLVQEPDGLMVATPAQTLTDTLDDLIAAVSTRVPTGSNSSSQTTECLTPESCSQTTSNVASQSMPPVYPSVDIDAHTESNHDTALTLACAGGHEELVSVLIARDAKIEHRDKKGFTPLILAATAGHVGVVEILLDKGGDIEAQSERTKDTPLSLACSGGRQEVVDLLLARGANKEHRNVSDYTPLSLAASGGYVNIIKILLNAGAEINSRTGSKLGISPLMLAAMNGHVPAVKLLLDMGSDINAQIETNRNTALTLACFQGRAEVVSLLLDRKANVEHRAKTGLTPLMEAASGGYAEVGRVLLDKGADVNAPPVPSSRDTALTIAADKGHYKFCELLIHRGAHIDVRNKKGNTPLWLASNGGHFDVVQLLVQAGADVDAADNRKITPLMSAFRKGHVKVVQYLVKEVNQFPSDIECMRYIATITDKELLKKCHQCVETIVKAKDQQAAEANKNASILLKELDLEKSREESRKQALAAKREKRKEKRKEKRGTEKETGRR

SEQ ID NO: 194783 - protein, 2542 aa, Artificial Sequence
  derived and/or modified sequence
MLTDSGGGGTSFEEDLDSVAPRSAPAGASEPPPPGGVGLGIRTVRLFGEAGPASGVGSSGGGGSGSGTGGGDAALDFKLAAAVLRTGGGGGASGSDEDEVSEVESFILDQEDLDNPVLKTTSEIFLSSTAEGADLRTVDPETQARLEALLEAAGIGKLSTADGKAFADPEVLRRLTSSVSCALDEAAAALTRMKAENSHNAGQVDTRSLAEACSDGDVNAVRKLLDEGRSVNEHTEEGESLLCLACSAGYYELAQVLLAMHANVEDRGNKGDITPLMAASSGGYLDIVKLLLLHDADVNSQSATGNTALTYACAGGFVDIVKVLLNEGANIEDHNENGHTPLMEAASAGHVEVARVLLDHGAGINTHSNEFKESALTLACYKGHLDMVRFLLEAGADQEHKTDEMHTALMEACMDGHVEVARLLLDSGAQVNMPADSFESPLTLAACGGHVELAALLIERGANLEEVNDEGYTPLMEAAREGHEEMVALLLAQGANINAQTEETQETALTLACCGGFSEVADFLIKAGADIELGCSTPLMEASQEGHLELVKYLLASGANVHATTATGDTALTYACENGHTDVADVLLQAGADLEHESEGGRTPLMKAARAGHLCTVQFLISKGANVNRATANNDHTVVSLACAGGHLAVVELLLAHGADPTHRLKDGSTMLIEAAKGGHTNVVSYLLDYPNNVLSVPTTDVSQLPPPSQDQSQVPRVPTHTLAMVVPPQEPDRTSQENSPALLGVQKGTSKQKSSSLQVADQDLLPSFHPYQPLECIVEETEGKLNELGQRISAIEKAQLKSLELIQGEPLNKDKIEELKKNREEQVQKKKKILKELQKVERQLQMKTQQQFTKEYLETKGQKDTVSLHQQCSHRGVFPEGEGDGSLPEDHFSELPQVDTILFKDNDVDDEQQSPPSAEQIDFVPVQPLSSPQCNFSSDLGSNGTNSLELQKVSGNQQIVGQPQIAITGHDQGLLVQEPDGLMVATPAQTLTDTLDDLIAAVSTRVPTGSNSSSQTTECLTPESCSQTTSNVASQSMPPVYPSVDIDAHTESNHDTALTLACAGGHEELVSVLIARDAKIEHRDKKGFTPLILAATAGHVGVVEILLDKGGDIEAQSERTKDTPLSLACSGGRQEVVDLLLARGANKEHRNVSDYTPLSLAASGGYVNIIKILLNAGAEINSRTGSKLGISPLMLAAMNGHVPAVKLLLDMGSDINAQIETNRNTALTLACFQGRAEVVSLLLDRKANVEHRAKTGLTPLMEAASGGYAEVGRVLLDKGADVNAPPVPSSRDTALTIAADKGHYKFCELLIHRGAHIDVRNKKGNTPLWLASNGGHFDVVQLLVQAGADVDAADNRKITPLMSAFRKGHVKVVQYLVKEVNQFPSDIECMRYIATITDKELLKKCHQCVETIVKAKDQQAAEANKNASILLKELDLEKSREESRKQALAAKREKRKEKRKKKKEEQKRKQEEDEENKPKENSELPEDEDEEENDEDVEQEVPIEPPSATTTTTIGISATSATFTNVFGKKRANVVTTPSTNRKNKKNKTKETPPTAHLILPEQHMSLAQQKADKNKINGEPRGGGAGGNSDSDNLDSTDCNSESSSGGKSQELNFVMDVNSSKYPSLLLHSQEEKTSTATSKTQTRLEGEVTPNSLSTSYKTVSLPLSSPNIKLNLTSPKRGQKREEGWKEVVRRSKKLSVPASVVSRIMGRGGCNITAIQDVTGAHIDVDKQKDKNGERMITIRGGTESTRYAVQLINALIQDPAKELEDLIPKNHIRTPASTKSIHANFSSGVGTTAASSKNAFPLGAPTLVTSQATTLSTFQPANKLNKNVPTNVRSSFPVSLPLAYPHPHFALLAAQTMQQIRHPRLPMAQFGGTFSPSPNTWGPFPVRPVNPGNTNSSPKHNNTSRLPNQNGTVLPSESAGLATASCPITVSSVVAASQQLCVTNTRTPSSVRKQLFACVPKTSPPATVISSVTSTCSSLPSVSSAPITSGQAPTTFLPASTSQAQLSSQKMESFSAVPPTKEKVSTQDQPMANLCTPSSTANSCSSSASNTPGAPETHPSSSPTPTSSNTQEEAQPSSVSDLSPMSMPFASNSEPAPLTLTSPRMVAADNQDTSNLPQLAVPAPRVSHRMQPRGSFYSMVPNATIHQDPQSIFVTNPVTLTPPQGPPAAVQLSSAVNIMNGSQMHINPANKSLPPTFGPATLFNHFSSLFDSSQVPANQGWGDGPLSSRVATDASFTVQSAFLGNSVLGHLENMHPDNSKAPGFRPPSQRVSTSPVGLPSIDPSGSSPSSSSAPLASFSGIPGTRVFLQGPAPVGTPSFNRQHFSPHPWTSASNSSTSAPPTLGQPKGVSASQDRKIPPPIGTERLARIRQGGSVAQAPAGTSFVAPVGHSGIWSFGVNAVSEGLSGWSQSVMGNHPMHQQLSDPSTFSQHQPMERDDSGMVAPSNIFHQPMASGFVDFSKGLPISMYGGTIIPSHPQLADVPGGPLFNGLHNPDPAWNPMIKVIQNSTECTDAQQIWPGTWAPHIGNMHLKYVN

SEQ ID NO: 194784 - DNA, 7623 bp, Artificial Sequence
  derived and/or modified sequence
atgcttaccgattctggagggggaggcaccagcttcgaagaggatctggactcagtcgccccccgaagtgctccagcaggtgcctcagaaccacctccccccggcggcgtaggcctggggatcaggaccgtacggttgttcggagaggcaggacctgcatccggggtggggtcttcgggtggtggtggaagcgggtccggcactgggggcggggacgccgcattagactttaagttggcagcggcggtcctgcggacaggtggtggggggggggccagcggatctgacgaagatgaagtcagtgaggtcgagagttttatcctggaccaggaagacttggacaatccagtgctcaagacaacctcagagatctttctgagctccactgccgaaggagcagatttaagaacagtggaccccgaaacacaggcccgccttgaagccctccttgaggccgcgggcattggaaagctctccacagccgatggtaaggctttcgcggaccccgaagtcctgagacgccttactagttcagtgtcctgcgcgctggatgaagccgcagcagccttaaccagaatgaaagcagagaattctcataatgccggccaggtggatactcgtagtctggctgaggcctgctcagacggagacgtcaatgccgttagaaaactcctcgatgaaggaaggtctgtcaatgaacatactgaggagggagaaagcctgctgtgcttagcctgctctgctggatactacgagttggctcaggttctcctggccatgcacgctaatgttgaggaccgcgggaataagggcgacattacccccttgatggccgcctcctctggcggctacctggatatcgtgaagttgttgctgctccacgacgcggatgtaaactcccaaagcgctactgggaacaccgcccttacctatgcatgtgcaggaggctttgtcgatatcgtcaaagtccttctcaatgaaggggccaacatcgaggaccacaatgaaaatggccacactcccctaatggaggcggcgagcgccggtcatgtcgaagtggctcgggtactcctggaccacggagctggaattaatactcattctaacgaattcaaagaatccgcccttaccctcgcctgttataagggtcatctggacatggtgagatttctcctggaggccggtgcagatcaggaacacaagaccgatgaaatgcatactgctctgatggaggcgtgtatggatgggcacgttgaggttgccaggctgttactggattctggggcacaagtgaatatgcccgccgattcgtttgaatccccattaacactggctgcctgcgggggtcacgtcgagctagcggccctgctgatagagagaggtgctaacctggaggaggttaatgacgagggatatacacccctgatggaagctgcccgagaggggcacgaggagatggtggcgctgctgctagcacagggagctaacatcaatgctcagaccgaggagactcaggagaccgccctgacacttgcgtgctgcggcggattttctgaggtggccgattttctgatcaaggctggagccgatattgaactgggttgttctacaccactgatggaagcaagtcaggaagggcacttggagcttgttaagtacttgttagcctcaggggctaacgtgcacgcaacaaccgcaactggagacaccgccctgacttatgcctgcgagaacgggcatacagatgttgccgatgtcctcctgcaggctggtgcagacttagaacatgaatccgagggcggccgaactccattgatgaaagctgccagggccggccatttgtgtacggttcagttcctcatctccaagggtgccaatgttaaccgggccacagctaataacgaccatacagttgtgtcattggcctgcgccggaggacatctcgcagtggtggagctgcttctagctcatggcgcagaccccacccatcggctgaaggacgggagtacgatgctcattgaggcagccaaaggcggtcacacaaatgtggtgagttacctgctggactaccctaataatgtgctaagcgtgcctacgactgacgtgtcccagctgcctcctccgagtcaggaccagtcccaggtgcctagggtgccgacccatacactagccatggtggtgccacctcaggagccggacaggaccagtcaggagaactctcccgctttactgggagtgcaaaagggcacaagtaagcagaagagctcaagtctgcaggtggctgatcaagatttactgccatcatttcatccctatcagcccctggagtgcattgttgaagagaccgagggaaagcttaatgagctcggccagcgcataagtgctatcgaaaaggctcagttgaaatctctggagctgatccagggggagccactgaacaaagacaagatcgaggaactgaagaaaaaccgggaggaacaggtccagaagaaaaagaaaattctgaaagagctgcagaaggtcgagagacagctgcagatgaaaacccagcagcagtttactaaagaatacctcgagacgaagggccagaaggacactgtcagtctgcaccagcagtgttctcacagaggggtattccctgagggtgagggcgacggctcactacccgaggatcattttagtgagctgccccaggtggacacaatcctttttaaggacaatgacgtagacgatgaacagcagtcgccgccatctgcagaacagatagatttcgtgccagtgcagcctctgtcttctccccagtgcaatttttcaagtgacctgggatcaaacggaacgaacagcttggaactccagaaggtatccggcaatcagcaaatcgttggtcagcctcagattgctatcaccggacacgaccagggcctgctggtccaggagccagatggcttaatggttgcaacgccggcccagaccctaactgataccctcgacgatctgatcgctgcagtatcaacccgtgtgcccacaggaagcaactctagctctcagaccaccgagtgcctgacccccgagtcttgcagtcagactacgagcaacgtcgccagccaaagcatgcctcccgtctacccatctgtcgatattgatgcacacaccgagtccaaccacgatacagccctgacactggcttgcgcagggggccacgaagaactggtctcagtccttatcgcccgagacgccaaaatagagcatagagacaagaagggttttactcctttgatcctggctgccactgccggccacgttggcgtggttgagattctactggacaaagggggtgacattgaggcgcaatcagagcggacaaaagatacacctctctcccttgcctgctcaggcgggcgacaggaggtggtggacctgctgttggcccgaggggccaacaaggaacaccggaatgtaagcgactatacccctctctcgcttgccgcgagtggtgggtatgtgaatattataaagattctgctgaatgccggagcggagattaattcaaggaccggcagcaagcttgggatctcccccctaatgctggccgctatgaacggtcacgtgcccgcagttaaattattgctggacatggggtctgatattaacgctcagatcgagacaaacagaaatacagccctgactttggcttgctttcaaggtcgcgccgaagttgtaagcctcctgctggatcgcaaagccaatgtggagcacagagccaaaaccggcctcacccccctgatggaggctgcctctgggggttacgccgaagtggggcgtgtgctgctggataaaggcgctgatgttaacgctcctcccgttccatcatcccgtgacacagctctcactattgccgcagacaaaggtcattataaattttgcgaactgcttatacatcgaggtgcacacatcgatgtgcggaacaagaagggaaacactcctttatggttggcctcgaatgggggacatttcgacgtcgtccagctcctggtccaggccggagcagatgtagatgcggctgataaccgaaaaattactccgctaatgtctgcattcagaaaaggacacgtgaaagtggtgcagtatctggtgaaagaggtcaaccagtttccaagcgatatagagtgtatgcggtacattgccacgataacagataaggaattgttaaagaaatgccatcaatgtgtagagactattgttaaggcaaaagaccagcaggctgccgaagccaacaaaaatgcatctatcctgcttaaagagctggaccttgagaagagcagggaggaatccaggaagcaggctttagccgccaagagggaaaagagaaaggagaaaaggaagaagaagaaggaagaacagaaacgaaagcaagaagaagatgaggagaataaacctaaagagaactcagaactccctgaggatgaggatgaggaagagaacgacgaggacgtggaacaggaggtacctatcgagcccccttccgctactacaaccactactattggtatatccgcaacatccgctactttcacaaatgtcttcgggaaaaagagggctaatgttgtgactacacccagtacgaacagaaagaacaaaaaaaacaaaaccaaagagacgccacccactgcccatctcatattgccagaacagcacatgagcctggcacaacagaaagctgacaagaataaaatcaatggggagcccagaggcgggggcgccggggggaattccgattcagataacttggactccacagactgtaactctgagtcttccagcgggggcaaatcccaagaactcaacttcgtgatggatgtcaactctagcaagtacccatctcttctccttcatagccaagaggaaaagacaagtactgcaacgagtaagactcaaactcggcttgagggcgaggtcactccaaacagcctctcaactagttataaaacggtgagtctgccattgtcttcgcccaatattaaactcaacctgacttcccccaaacggggccagaagcgtgaggagggttggaaggaggttgtgaggcggtccaagaagttgtctgtgccagccagtgtggtgtcccggatcatgggccgtggcggttgtaatattacagccatccaagatgtaaccggcgcgcacatcgatgtcgataaacagaaggataagaacggcgagcggatgattacaatcagaggaggaactgagtctacgcgctatgctgtccagttgataaacgccctgatccaggacccggcgaaggagttggaggatcttatccccaaaaatcatataaggacacctgccagtacgaaatccatccatgctaacttctcatcgggtgtcggtacaaccgctgcgagcagcaaaaacgcttttcccctgggcgctccgactctggtcacaagccaggctacgacattgtccaccttccagcctgcaaacaagttgaacaaaaacgtgcctactaatgtccggtcctccttccctgtatcgctcccccttgcttaccctcacccacattttgccctgttggccgcccagacgatgcagcaaatccgacacccccggttgcctatggctcaatttggaggcactttctctccgtcccccaatacatggggacctttccctgtccgccctgtgaatcccggaaatactaattcttctccaaagcacaacaatacaagtcggttgcccaaccagaatgggacagttctcccctcggagagtgcgggactagccaccgcaagctgcccgatcacggtgtctagtgttgtggccgcatcccaacagctctgtgtgacaaatacccgaacaccgtcatccgtgaggaagcagctttttgcttgcgtgccgaagacttcgcccccagccactgttatttcttcagtaacctccacttgctcatccttaccttccgtctcttcagcaccaataaccagcggtcaggcccccaccaccttcctccccgcgtctaccagccaggctcagctatcctcccagaaaatggagtctttctcggccgtgccacccacgaaagaaaaagttagcactcaggaccaaccaatggccaatttatgcacgcctagcagcaccgcgaatagctgcagctcctccgcatctaacacgccaggggcccccgagacacatccctcttcaagccctacgcctacatcatctaatacgcaagaagaggctcagccttcaagcgtgtctgacctgtcacccatgtccatgccctttgcttccaattcagagcctgcaccactcacacttacgagccctagaatggtcgccgccgacaaccaggacacaagcaatctcccgcaactggcggtccccgctcctagagtgtctcacaggatgcagccacgcggatccttctactcaatggtcccaaacgctacgattcatcaggatcctcagtcaatctttgtgactaatcctgttactttaactcctccacaaggcccgcccgcagcagtccagcttagtagcgcagtaaacattatgaacggaagccaaatgcatattaaccctgccaataagagcctgccacccaccttcggccccgctaccttattcaatcatttcagtagcttgttcgactcatcccaagtgccggccaaccaagggtggggggacggccccttatcttcccgggtcgccactgacgcaagtttcacagtgcagtctgcatttctcgggaattctgtcctggggcacctggaaaatatgcatcccgacaattcaaaggctccaggttttagaccaccatcccaacgtgtgtccacaagtccggtgggtctgccatccatcgatcccagcggcagcagtccatctagctcttctgctcccctggcaagctttagtgggatcccaggcactagggtctttttgcagggacctgctccagtggggactccttcgttcaaccgccagcatttttcgcctcatccctggacatctgctagcaacagctgtgattcccctatccctagcgtgagtagtgggtcgagctcaccactgtccgctacctccgccccgccgaccctagggcagccaaagggcgttagcgcctcgcaagatcgaaaaatcccacccccgatcggaaccgaaagacttgctcgaatccgccagggcggcagcgtggcccaggcaccggccgggactagcttcgtcgctcctgtgggacacagcggaatatggagcttcggtgtcaacgcggtgagcgaaggcctctctggctggagtcaatcagtgatgggaaatcatcctatgcaccaacagctcagtgatccctccaccttctctcaacatcagccaatggagcgcgacgacagtgggatggtggccccctccaacatcttccatcaacccatggcgagcggattcgtagacttctctaagggactgccaattagtatgtatggcggcacaattataccttcacacccgcagctggcagacgtgcctggtggacccttgtttaatggcttgcataatccggacccagcctggaaccctatgataaaagtcattcagaactcaacagaatgcaccgatgcccaacaatag

SEQ ID NO: 194785 - DNA, 3024 bp, Artificial Sequence
  derived and/or modified sequence
atggtggccctcttgctggcccagggcgctaacatcaatgcccagactgaagaaacacaggaaaccgcactgacccttgcgtgttgtgggggcttctccgaggtggcagactttttgatcaaagccggcgccgatatagaattagggtgttctacccccctgatggaagctagtcaggaaggccatctggagttggtgaagtaccttttggcatccggcgcaaatgtgcatgcaacaaccgccacgggcgatacagccctcacctatgcctgcgagaatggccacaccgacgtggcagacgtccttctgcaggcaggggcagatctggataagcaggaggatatgaagacaatcctcgaaggaatcgatccagccaaacatcaggaacacgaatctgagggcggccgcacccccctgatgaaggcggcgagagccggacatctctgcacggttcagttcttgatctctaagggtgcaaacgtcaatcgtgccactgccaacaacgatcataccgtggtgagcctggcttgcgcaggaggtcatctggccgtggtggaattactgttagcgcacggcgctgacccgacacaccgtctcaaagacggttcaaccatgctgatcgaggccgcaaagggggggcacactaacgtcgtgtcttatttgctggattacccgaacaatgtgctttccgtgccaaccaccgacgtttctcagttgccacctcccagccaggaccagtcgcaggtgccacgcgtgcctacgcacactctagccatggtagtgcccccacaggaaccagacagaacatctcaggagaacagtcctgctctgctgggagttcaaaagggaaccagcaagcagaagtcgtcgagccttcaagtcgccgatcaagaccttctccccagtttccacccatatcaacccctggagtgtattgtagaggaaaccgagggtaaactaaacgagttagggcaacgaatcagtgccattgaaaaagcgcaattgaaatccttggagctgattcagggggagccgcttaataaggacaagatcgaagagctgaagaaaaacagagaagagcaggtacaaaagaagaaaaaaatcctgaaagaactgcagaaggttgaacgtcagctgcagatgaaaacccagcagcagttcacaaaggagtatctggaaaccaaaggccagaaagacacggtgtcactgcaccagcagtgctcccatcggggcgttttcccagagggtgaaggagacggcagcctccccgaagatcacttctcagagctcccacaggtggacacaatactctttaaggataatgatgtggatgatgagcagcagtccccacctagcgccgaacaaatcgatttcgtcccggtccaaccactgagttctcctcagtgtaacttcagtagtgacctaggaagtaatggaactaattccttggaattgcagaaagtttcaggtaaccagcaaatcgttggacagccacagattgcaatcacgggacacgatcagggcttgctggtccaagaacccgatgggcttatggtggcaacaccggcccagacccttaccgatacactagacgatctgattgccgcagtctcaaccagagtgcccacagggtccaatagctcttctcagacaactgaatgccttacacccgaatcttgtagtcagactacctctaacgtggcaagtcagagcatgccccctgtttatccctccgtggatatcgacgcccataccgagagcaaccacgacacagcactgaccttggcctgtgccgggggtcacgaggagttggtgagtgtcctgatcgccagggatgcaaagatcgagcaccgggataaaaaggggttcaccccactcatcttagcagcaacagctgggcacgtcggtgtcgtagaaatccttctcgataagggcggcgacatcgaggctcagagtgaacgtacaaaggacacacctttgagcctggcctgctccggtggacgccaggaagtagtggacttattactggcccggggtgcaaacaaagagcatagaaatgtgtctgattataccccactctcactggctgcttctggaggttatgttaatatcatcaaaatcttactgaacgccggcgctgagataaattccagaactggtagtaaactcggtatatcaccgcttatgctagcagcaatgaatggacacgtgccagctgtaaaactgctgctcgatatgggatccgatataaatgcccagattgagactaacaggaacacagctctcaccctggcgtgtttccagggcagagcggaggtggtgtctcttctgctggatcgtaaggccaatgtggaacaccgggctaaaacaggtctgacccctctcatggaagccgcatcaggcggctatgcggaggtgggacgggtcctgctggataagggggccgatgttaatgcacctccagtcccttcgtctcgggataccgcacttactattgccgccgataaggggcattacaagttttgcgagcttctgatacaccggggtgcacacatagatgtgcgcaacaagaaagggaacactcccctgtggcttgccagtaatggagggcattttgacgtggtgcagctactcgtccaagccggcgcagatgtggacgccgccgataaccgtaagatcacgccactgatgagtgccttcaggaaaggccatgtgaaagttgtgcagtacctggtcaaagaggtgaaccaattcccctcggacattgaatgcatgagatacattgcaacgatcacagataaggaactgcttaagaaatgtcatcaatgtgttgagacaatcgtcaaggcaaaagatcagcaggccgctgaggctaataaaaatgccagcattctgctgaaggaacttgacctcgagaagagtcgagaggaatcaagaaagcaggccctggccgcaaagcgcgagaagcgtaaggaaaagcggaaagagaaacgagggaccgagaaggagacaggacgaaggtag

SEQ ID NO: 194786 - DNA, 7629 bp, Artificial Sequence
  derived and/or modified sequence
atgcttacggactctggcggaggcggcactagctttgaggaagatttagattcggttgcccccaggtcagcccccgccggcgcatccgaaccaccgccacccggcggcgttgggctcggtatccgcacggtcaggctgtttggtgaagccggaccggcctccggcgtaggcagtagcgggggtgggggctccggcagcggcaccggagggggggacgccgccctggatttcaagctggccgcagccgtgctgcgtactggtggcggagggggggcatctggctccgatgaggacgaagtctcagaggtagagtcctttatcttagatcaggaggacctggacaatccggtactcaagactacttccgaaatttttctttcttctacagccgaaggagccgatctgcgaactgttgaccctgagactcaggccaggttagaagctctcctcgaggccgccggaattggtaagctctcaacagctgacgggaaagcattcgccgacccagaagtcttgcggcgcctcacgtcttcagtgtcatgtgctctcgacgaagcagccgccgctcttacaagaatgaaggctgagaattcccacaatgcaggtcaggttgacacacggtcactggctgaggcatgttcagatggcgacgtaaatgcggtacgcaagctcctcgatgaaggtcggtccgtgaacgaacataccgaggagggcgagtcacttctgtgtcttgcatgcagcgccgggtattacgagctggctcaggttctcctcgccatgcatgctaacgtcgaagatagaggaaataaaggagacattactccactgatggctgcctccagtggaggttatctcgatattgtcaaactgctcttgttgcacgatgctgacgtcaattcccaatccgccacaggaaatactgctctcacctatgcctgtgctggaggatttgtggacatcgtcaaagtgctcctgaatgagggggctaatatcgaagatcacaatgaaaatggacacacaccactgatggaagctgccagtgctggccacgtagaggtggccagggtgctcctcgaccacggggccggtataaacacccattccaatgaattcaaagaatccgccctgaccctggcctgctacaagggacatctagacatggtgcggttcctgctagaggctggagccgaccaggagcacaagaccgacgagatgcatacagccctgatggaggcctgtatggacgggcatgtggaggtggccagattactcctggattcaggagcacaggtcaacatgccggcggacagtttcgagtcgccgctgacacttgctgcctgcggaggacatgtcgagctggctgcccttctgattgaacggggagccaacctcgaagaagtgaacgacgaggggtatactcccctgatggaggccgcccgggaaggccacgaagagatggttgcacttttactggcacagggagcaaatatcaacgctcagacagaggaaacccaggaaactgccctcaccctcgcttgctgtggtggctttagcgaagtggccgactttttgatcaaggccggggcggatatcgagcttggctgcagtacaccattgatggaagcaagtcaagaagggcacctagaacttgtcaaatatctcctggcttccggcgctaacgtgcacgccacaactgccacgggagacacagccttgacctacgcctgtgagaatggccacacggatgtggccgacgtgttacttcaggcaggcgctgatctggaacatgagtcagaggggggtcggactccacttatgaaggctgctcgagctggtcatttgtgcacagtccagttcctcatcagcaaaggagcaaatgttaatagggcaaccgctaacaatgatcacaccgtcgtgagcctagcctgtgcaggcggccatttggccgtggtggagctcttattggcccatggcgccgacccgacacaccggctgaaagatggcagcaccatgctgatcgaggcagcaaaagggggacatactaacgtggtcagctatctgctggactaccccaacaacgtgctgtctgtgccgaccaccgacgtgagccagctgccaccgccatcacaagaccagtctcaggtacccagggtccccacccacactttggccatggtggtcccaccacaggagcctgacagaacttctcaagaaaactccccagcccttctgggtgttcagaagggtaccagtaaacagaaatccagcagtttgcaggtggccgatcaggatttgctccccagcttccacccctatcagcccttagagtgcattgtggaggaaactgagggcaagttaaatgagttgggccagaggataagtgctatagagaaagcccaactcaagtctctggaactgattcagggggagcccctgaataaggacaagatcgaagagcttaaaaagaacagagaggagcaggtgcagaagaagaaaaaaattctgaaggagttgcagaaagtagagcgccagctgcagatgaaaacccagcaacagttcacaaaagagtacctggagaccaaaggtcagaaggacactgtgagtcttcaccaacagtgcagccaccgaggcgtttttccggagggagagggagatggttctctgccagaagaccatttctcggagctgccacaggttgacacaatactgtttaaggataatgatgttgacgatgagcagcagagtcctccgtcagccgagcagatcgatttcgtgcctgtgcagccattgtccagtcctcagtgtaacttcagctccgatttggggtcaaatggcaccaacagcctggagctccagaaagtcagcggaaatcagcagatcgtgggccaacctcaaattgctatcacaggtcatgaccagggcctgctcgtgcaggagccggatggcctgatggtggccacccctgcacagacattaaccgatacattggatgatctcatcgccgccgtctctacccgggttcctactggctccaactcctcgtctcagaccacggaatgtcttaccccagagagctgctcccaaaccacctcaaacgtggccagccagagcatgccaccagtttacccttcagttgatattgacgcccataccgagagcaatcacgatacagccttgaccctggcctgcgcaggaggtcatgaagagctcgtttccgtgctcattgcccgggatgcaaaaatcgaacaccgggacaagaagggattcacgccattaatcctcgccgcaactgcaggccacgtcggagttgttgaaatcctgttagataaggggggagacatcgaggcacagtcagagcgcacaaaagacacaccattgagtttggcctgtagcggagggcgacaggaagtcgtcgacttattgctagctcgcggtgctaacaaggaacacaggaatgtgtctgactacacccctctttccctcgccgcctctggcgggtatgtcaatatcataaaaatcctgcttaacgctggggccgagatcaacagtaggacgggcagcaaactgggaatatcacccctcatgcttgcggcgatgaatggccatgtgcccgccgtcaagctgttgctcgatatgggctccgatattaacgcccaaattgagaccaatcgcaacacagctctgacactcgcctgctttcagggacgtgcggaagtggtgagcctgctgctggaccgtaaggcaaacgtggagcaccgggctaagactggacttaccccgctgatggaggccgctagtggcggatacgccgaggtgggacgggtcctgctagataagggagcagatgtgaatgcacctcccgtccctagtagccgcgacacagcgctgactattgcagctgacaaaggccactataagttttgcgagttgctgattcatcggggcgcacatatcgatgtgagaaacaagaagggaaataccccactgtggctggccagcaacggagggcacttcgacgtggtccagcttttggtgcaggcgggtgccgatgtggacgcagctgacaataggaagattacacccctgatgtccgccttccgcaaagggcacgtgaaagttgtccagtacttggtcaaggaggttaaccagttcccaagtgacatcgagtgtatgagatatatagccacaataacggataaagagcttctcaaaaagtgccaccagtgcgtagagaccattgtaaaagccaaggatcagcaggccgccgaagccaacaagaacgctagtattcttctcaaagagctcgacctggagaagagtcgggaggagagccgtaagcaggccctggcagctaagcgagagaagaggaaggagaagcgtaagaagaaaaaagaagaacagaaacgtaaacaggaagaggacgaggagaacaagcccaaggagaattctgagctccccgaggatgaggacgaagaagagaacgacgaggacgtcgagcaagaggtccctattgagcccccctcagccacaacaaccactacaataggaatttccgctacctccgccacatttaccaacgtgtttggcaaaaagcgggcgaatgtcgtgacaacaccttctaccaaccgaaaaaataagaagaataagacaaaagagacaccccccacagcgcaccttatactccccgaacagcatatgtcgttggctcagcagaaagccgataaaaacaaaatcaacggcgaaccccgtggcggaggagctggagggaattccgattctgacaatctggacagcacggactgcaattctgaatcatcatccggcgggaaaagtcaggagctgaactttgtgatggacgtgaacagcagcaagtatccatctttgctccttcactcacaggaggagaaaacctcaacggcaaccagcaagacccagacccggctggagggtgaagtaacccccaattccctatctacctcatacaagacagtttcactgcccctttcctccccaaacatcaagctcaacctcacgtcacccaaacgcggccagaagcgggaagagggatggaaggaggtcgttaggcgctccaagaaactttcagtccccgcgtcagtagtaagcaggatcatgggacgcggaggctgtaacattaccgccattcaggatgtcaccggggcacatattgacgtggacaaacagaaagacaaaaacggagagcggatgatcacgatccgcggggggacagagagtacaaggtatgccgtacagctgattaacgccttaatccaggaccctgccaaggagcttgaagacctaatccccaagaaccatatccggacacccgcctcaacgaaatccatccacgctaacttttcaagcggcgtggggacaactgccgcaagttccaagaacgcttttcccctgggggcacccacgctagtcacatcgcaggccactaccctaagcaccttccagcctgctaacaaactgaataagaatgtccctaccaacgttcgctcaagcttccctgtgtctttaccactcgcctacccacacccacattttgcgctcctagccgcacagacaatgcagcagattcggcatccccggctcccgatggctcagtttggtggcactttttcacctagccctaacacttggggaccctttcctgtgcggccggtaaacccaggcaatacaaactcttccccaaaacacaacaatacatctcggctgcctaaccagaatggcaccgtgctgccgagtgagagcgcaggcttggcaacagctagctgtcccataaccgtatcatcagttgtcgctgccagtcaacagttatgcgtgacaaatacccggacaccatctagcgtccgaaaacagcttttcgcgtgcgtgcctaagacctcaccccccgccactgttatcagctctgtcacgtcaacctgcagctctttacctagcgtgtcgtccgcccccattacatcaggccaggcacctaccaccttcctcccagcctccactagccaggcccagctgtcgtcccagaagatggaaagcttctccgctgttcctccgacgaaagaaaaggtatccacgcaggatcagccgatggccaatctatgtaccccaagttccacggctaactcttgctcaagttccgcttctaacacgcccggtgctccagagacacaccctagttcatctcccacacccacaagcagtaatacgcaggaagaggcccagcccagtagtgtttctgacttgtctccaatgtctatgcccttcgcctcaaatagcgagcctgccccactgacgttgacctcgccccgcatggtcgccgctgacaaccaggatacgtctaatctgccccaacttgctgtgccagctcctagggtgtcccaccgaatgcagcctagagggtccttctactccatggtgccgaacgccaccatccaccaggaccctcagtctatatttgtgacaaatccagtgacactaacccccccacaggggccacctgccgcggttcagttatcttcagctgtcaacatcatgaatggatcacagatgcacattaaccctgccaataaaagtcttcctccaacgttcggccctgccactctcttcaaccactttagctctcttttcgacagcagccaggtgccagccaatcaggggtggggcgacggtccgctttccagtagagtagctaccgacgccagtttcaccgtgcagagcgcgttcctcggcaactctgtcctggggcatctagagaatatgcatccggacaattcaaaggcccccgggtttaggcctccgtctcagcgtgtctccacgagccctgtgggcctgccaagtatcgacccttccggctcctcaccatcatcctccagcgcccctctggccagcttttctggtattccgggcacccgcgttttcctgcagggccccgcccccgtcgggacacccagctttaaccgccagcacttcagcccccacccgtggacatcagcttcaaattccagcactagtgctcccccaaccctcgggcaacccaagggcgtttcagccagccaggacaggaagattccccccccaattggcactgagcggctggcgcggatccggcaaggcgggtccgtcgcccaggctccagctggcacgagcttcgtagccccagtaggtcattcgggcatctggtccttcggcgtgaatgcagtcagtgaaggactcagcgggtggagccaaagtgtcatgggaaaccaccccatgcatcagcagttgagtgacccgtccaccttttcgcagcaccagcccatggagcgagacgactccggcatggtggccccgtcaaatatcttccaccaacctatggcctccggatttgtggactttagtaaagggcttccgatctcgatgtatggtggcacgatcattccctcacatcctcagctggccgacgtcccaggcggtcccctttttaacggacttcacaatcctgacccggcatggaatcctatgattaaggtaattcagaactccactgagtgcaccgatgcacagcagatctggcccgggacttgggcacctcacattggtaacatgcatctaaaatatgttaactag

SEQ ID NO: 194787 - DNA, 4461 bp, Artificial Sequence
  derived and/or modified sequence
ccgcgagtcggacgacatcgactacgtctccgagtgaggacaatgcttactgactccggtgggggtggaaccagcttcgaggaggatcttgattcagtggcaccccggagcgctcccgccggcgcttcagagccaccccctcccgggggggtcggcctgggaatcaggaccgtccgtctttttggggaggcggggcctgccagcggcgtggggagttccgggggcggaggatccgggtctggaactggtggaggagacgctgccctggacttcaagctggcggcagctgttctgcgtacggggggcgggggcggagctagcggcagtgacgaagatgaggtttctgaggtggagtctttcattctcgatcaggaagaccttgacaatcccgttctgaaaacaacaagcgagatttttctcagcagcactgcagaaggagcggacctgcgcacggtcgaccccgaaacccaggctagactggaagctttgttggaagcggcgggcattggaaagctgagtacggcagacgggaaggcattcgccgaccccgaagtgctgcgccgcctgactagctcagtctcctgcgcgttggatgaagccgctgccgccctgactcggatgaaagccgagaatagtcataacgccggtcaggtcgacactcgaagcctggccgaagcatgcagcgacggcgacgtcaatgctgtgaggaagctcctcgacgagggccgctcggtcaacgaacacaccgaagagggcgagtctctgctctgccttgcctgcagcgctgggtactacgaacttgcacaagtgcttctggctatgcacgcaaacgtcgaggatcgcgggaacaagggagatattaccccattgatggctgccagctccggaggatacctggatatcgttaagctacttttgctccacgacgccgatgtaaacagccagagtgcaactggtaacactgcactcacctatgcatgtgcaggggggtttgttgatattgtcaaagtcctcctgaacgagggggcaaacatagaggatcacaacgagaatggccatacccccctgatggaagccgcctcagccggtcacgttgaagtcgcccgggttcttttggaccacggtgctgggattaacacacattctaacgagttcaaggaaagcgcgcttacccttgcatgttataagggccacctcgacatggttcgattcctcctggaggcaggagccgatcaggagcataagaccgatgagatgcatacagctttaatggaagcatgcatggatggccatgttgaggtcgccaggctgctcttggacagcggcgcacaggtaaacatgcccgccgattcctttgaaagtccactgacactggctgcctgcggaggacacgtggaactagccgcactactgatcgagagaggagccaacctggaagaggtcaatgatgaaggttatactccattgatggaagctgccagagagggtcacgaggaaatggtggcactcctacttgcccagggcgcgaacattaacgcccagaccgaagagactcaggaaaccgccttaactttagcctgttgtggagggtttagcgaagtggccgattttctgataaaggctggagccgatattgagctagggtgctcgacacccctgatggaagcttctcaggagggacatctggagctggtcaaatacttgctggccagcggtgcaaacgtacacgctaccaccgctactggggatacggcccttacctatgcctgcgagaatgggcataccgacgttgctgacgtactgctgcaggctggcgctgacctagataagcaggaggacatgaagacaatcctcgaaggtatcgatcctgctaaacatcaggagcacgaaagcgaaggcgggcgaactccactgatgaaggctgcccgggcggggcatctttgcaccgtccaatttctcatctctaagggtgcgaatgtgaatagggccacagccaacaatgatcacacagtagtttctttggcatgtgcaggtggacacctggccgtggtcgaactcctgttagcccacggcgcagaccccactcatcggttgaaggatggtagtaccatgctaatcgaggccgcaaagggcgggcatacaaatgtggtgtcatatctgctcgactaccctaataacgtgttgagtgtgccgaccacggatgttagtcaactcccccctccaagccaggatcaatctcaggtacctcgggtgccgacccacaccttagcaatggtggtgcctccacaagagccagatcggacatctcaagagaactcacccgcgttgcttggggtccagaagggcacctcaaagcagaaaagttcctctctgcaggtggctgaccaggacctactgccaagctttcacccataccagccccttgagtgcattgtagaggagacggaggggaaactgaacgagttggggcaacggatttctgcaatcgagaaagcgcagctgaagagcctggagctgattcaaggggaaccactgaataaggacaagatcgaggagctcaagaagaacagggaagagcaggtgcaaaaaaaaaagaaaatcttaaaggagctgcaaaaggtggagcgacagcttcaaatgaaaacgcagcaacagtttaccaaggagtacctcgagacgaagggtcagaaggacactgtcagtctgcaccagcagtgctctcatcggggggttttccccgagggcgagggtgatggtagtctgccagaagaccatttctccgaactaccacaggttgatactatccttttcaaagacaatgacgtcgatgacgaacagcagtcaccccccagcgctgagcagatagatttcgtaccagtgcaaccactatccagcccacagtgcaattttagttccgacttggggagcaatggtacgaactccctggaattgcaaaaagtgagcgggaatcagcagattgtgggccagcctcaaatcgctatcactggtcatgaccagggcctcctggtccaggaaccggatggcctgatggtagcaacccctgctcagacgctgactgatacgctggatgatctcatcgcagctgtgagcacacgcgtccctactggctcaaatagtagttcgcagacaaccgagtgcctgactcccgaaagctgtagtcagacgacttcaaacgtagcctcccagtcgatgccgcctgtttatccctccgtagatattgatgcccacacggagtctaaccatgatactgcgcttaccctcgcatgcgctggcggacacgaagagctggtgagtgttttaattgctagggatgccaaaatcgaacacagggacaagaaagggtttactccacttattctggccgccactgccgggcacgtgggggtggttgaaatcctcctggacaagggcggagacattgaggctcagagcgagcggaccaaagataccccactgagtttagcctgtagcggcggaagacaggaggtggttgatctcctgttggcgaggggtgcaaataaagaacaccgaaacgtgtctgactacactcctctgagcttagccgcgagtggtggatacgtaaacatcatcaaaatccttctcaacgctggggctgaaattaactctcgtaccgggtcaaagttgggaattagccctctgatgctggccgccatgaacgggcacgtcccggctgtcaagttgcttctggatatggggtccgacatcaatgcacagatcgagacaaatcgcaatacagcccttacgttggcttgcttccagggaagagcggaggtggtatcacttctgttggaccggaaagctaatgttgaacatagagctaaaaccggactgacccctctgatggaggcagcctctggcggttatgctgaggtgggccgagttcttctggacaaaggagctgacgttaacgcccctccagtaccatcttcccgggacacagccctgaccatcgctgccgataagggtcactataagttctgcgaactgctgatccaccggggagcacacatcgacgtgcgcaacaaaaagggcaatactccactgtggctggcttccaacgggggtcacttcgacgtggttcaacttctcgtgcaggccggagctgacgtcgatgcagctgacaaccgcaagatcaccccactaatgtccgcctttaggaaggggcacgtgaaggtggtgcaatacctagtaaaagaagtcaatcagttcccctccgacatcgagtgtatgaggtacattgccaccataaccgacaaagagttactaaaaaagtgtcaccagtgtgttgaaacaatcgtgaaggccaaagatcagcaggctgctgaggctaataagaatgccagcattctgctcaaggagctagatcttgaaaagtcaagagaagagagccggaagcaggcattggctgctaaacggtag

SEQ ID NO: 194788 - DNA, 1863 bp, Artificial Sequence
  derived and/or modified sequence
atgtcgttagctcaacagaaggcggacaaaaacaagattaacggcgagccgcgtggggggggggctggcggaaattcagacagtgacaacttggattcaactgactgcaactctgagtcctctagcggaggcaagtctcaggagcttaacttcgtaatggacgtcaatagcagcaagtatccctctctgctactgcactctcaggaagaaaaaacatccacggctacatcaaaaacccagaccaggctggagggagaggtaactcctaattctttgagcactagttacaagacagttagcttgcccttgtcttcccctaatattaagctaaacctcacatctcctaagagagggcagaaacgagaggagggatggaaggaggttgtaagacgtagtaagaaattatccgttcctgcaagcgttgtgtctagaattatgggaaggggcggctgtaacattactgctatccaggacgtaacaggagcccacatcgatgtggataagcaaaaggacaaaaacggggagaggatgattaccattcggggtgggactgagtccacacgttacgctgtgcagctgattaatgcactcattcaggatccagcaaaagagctggaggatctcatccctaaaaaccacattagaactccagcaagtaccaaaagcatacatgctaacttctcttctggggtaggaactacagccgctagctctaagaatgcatttcctctgggcgctccaacattggtgacatctcaagccacaactttatctacttttcagcctgctaataaattgaacaagaacgtacccaccaacgtccgttcaagtttcccagtgtcgttaccactggcctacccccatccgcattttgccctcctggcagcacagactatgcaacagattcgccaccctaggctgcctatggcacaattcgggggaacttttagccccagccccaatacatggggaccctttcctgtgcgacctgtgaatcctggtaacaccaatagctcacccaagcacaataacacttctcggctgcctaaccaaaatgggacagtacttccaagtgagagtgcgggacttgcgacagcctcatgtccaatcacagtctcttccgttgttgcggccagccagcagctgtgcgtcaccaatacacgaacaccctcctcagtacggaagcagttgttcgcatgtgtgcccaagaccagcccaccagccacagtaatcagttctgtgacctccacctgctcatccctgccgagtgtgtcttccgcgccgatcactagtggtcaggctccaacaacatttctgcctgcctccactagccaggcacagctttctagtcagaagatggaatctttttccgctgtccctcctactaaagagaaggtgtctacgcaggatcagcccatggcaaacttgtgcacacccagctcaaccgccaactcttgttccagctccgcttcgaacacaccaggcgctcccgagacacacccaagcagtagcccgactcccacatcttcaaacacacaggaggaggcccagcctagctcggtgtcagatttgtccccaatgagcatgcccttcgcatcaaactctgagcctgcgcctctcacacttacttcaccaaggatggtggctgctgacaaccaggatacctccaatctgccacaactggccgttccagcccccagggtcagccatcggatgcagcctagaggttcattctactctatggtccccaatgccactatccaccaagatcctcagtcaatttttgtcaccaatcccgtcaccctatgggaggccgaagcatccggcctgcatgaagtgcgatcccttcgacaagcctggtag

SEQ ID NO: 194789 - DNA, 2601 bp, Artificial Sequence
  derived and/or modified sequence
atggatgtcaatagctcaaaatatcctagtttactcctgcattcccaagaggagaaaacctctacagccacctctaaaacccaaacaaggctcgagggggaggtgacacccaattctctgagcacaagttataagacagtgagcctgcccctatcatctcccaatataaagctcaatctaaccagccccaagcgcgggcagaaaagagaggagggctggaaagaagttgtgagacgatccaagaagcttagcgtgccagctagtgtggtgtctaggatcatgggccggggcggatgtaacatcacagctatccaagatgtgacaggcgcccacattgatgtggacaagcagaaagataagaatggtgaaaggatgatcaccattcgaggcggaactgagtccacccgttacgctgttcagctgattaacgcgctgattcaagaccccgccaaggaactggaggatcttatccctaagaatcacattcggactccggccagtaccaagtcaattcacgctaacttcagcagtggcgtcgggacgacagcagcatccagtaagaatgccttcccgctcggagcgccaaccctggtgacgtctcaggcgacaactttgtccacctttcaacctgccaacaagttgaacaaaaatgttccaacgaacgtccgtagctcgtttcccgttagtctgcctctggcgtacccacatcctcacttcgctctcctcgccgcccaaactatgcaacagatccgtcatcccagattgcctatggcacagttcggcgggactttcagcccgtccccgaatacctgggggccatttccagtaagaccggtgaacccaggcaatacaaatagcagcccaaagcataacaatacttcaagactgccaaatcagaacgggaccgttctgccctccgagtccgccggcctcgccaccgcatcctgtcctattacagtgtcctcagtggtcgctgcctcccaacagttatgcgtcacaaacacaagaaccccttccagcgttcggaagcaactctttgcctgtgtacccaagacaagcccacctgccaccgtgataagcagtgtgacctctacgtgcagctctctcccctctgtgtcaagcgctcctataacttccgggcaggcaccaactactttcttacctgcgtccacttcacaagcacagctgagcagtcagaaaatggaaagctttagcgcagtgcctcccactaaggaaaaggtgagcactcaggaccagccaatggctaatctctgtaccccttcatccaccgccaattcctgttcttcctccgcgtccaatacaccaggcgctccagaaacgcatccaagctcctcccctacccctacctcctcgaacacccaagaggaagcccagccatcatcagtgtccgatttgagtcctatgtccatgccgtttgcatccaacagcgagcctgcccccttaaccctcacttctccgcggatggtggctgctgataatcaagatacttcaaatctgcctcaactggccgtgcccgcccccagggttagtcaccgaatgcaaccacgcggttcattttattccatggtacctaatgccaccattcatcaggacccacagtccatctttgttactaatccggtcactctgactcctccccaaggtccacccgcagcagttcaactctctagcgccgtgaacattatgaacggctcccagatgcacataaacccagctaataagtccctgccgccaacttttggacctgcaactctgttcaaccacttctcttcattatttgatagcagccaggttccagccaatcagggatggggcgatggtccactgagctcccgtgttgcaacagatgcgagtttcactgtgcagagcgccttcctaggaaatagcgtattgggtcatctcgagaacatgcaccccgacaactcaaaggcccccggtttcagacctccctcacagcgtgtctccacttcaccagtggctactagtgccccaccgacgctgggccagccaaagggggtgagtgcctctcaggacaggaagatcccacccccaatcggaacagaaaggctggcccgaatacgccagggaggatccgttgcccaggcacccgcaggcacttcctttgtcgcccccgtcggccatagcgggatatggagtttcggtgtgaacgcagtctctgaaggactctcaggatggagccagtcggtcatgggtaatcaccccatgcaccagcagctgtccgatcctagtaccttttcccagcatcagcccatggagagggacgattcaggcatggtcgccccctccaatatctttcaccagcctatggccagcggttttgtcgactttagtaagggcttacccattagcatgtacggtggcacaatcatcccgtcccatcctcaactggccgatgtacccggaggccctttgttcaatgggctgcataacccagaccccgcatggaatcctatgattaaagtcatccaaaactccacagaatgcacggacgcccagcagatttggcccggtacctgggcacctcacattgggaacatgcatctgaagtatgtgaattag

SEQ ID NO: 194790 - DNA, 7623 bp, Artificial Sequence
  derived and/or modified sequence
atgctgacagattctgggggcggcggcaccagctttgaggaggacctggacagcgtggcccccaggtctgccccagctggggccagcgagcccccacctcctgggggcgtgggcctgggcatcagaacagtgcggctgtttggagaggccggccctgccagcggcgtgggcagcagcggcggcggcggcagcggcagcggcaccggcggcggagatgctgccctggacttcaagctggccgctgctgtgctgaggactggaggcggcggcggggccagcggcagtgatgaagatgaggtgtctgaggtggagagcttcatcctggaccaggaggacctggacaaccctgtgctgaagaccaccagcgagatcttcctgagcagcacagctgagggcgctgacctgaggacagtggaccctgagacccaggcccggctggaggccctgctggaggccgccggcatcggcaagctgagcacagcagatggcaaggcctttgctgaccctgaggtgctgcggcggctgaccagctctgtgtcctgtgccctggatgaggccgccgccgccctgaccaggatgaaggccgagaacagccacaatgccggccaggtggacaccaggagcctggccgaggcctgcagtgatggagatgtgaatgctgtgaggaagctgctggatgagggccgctctgtgaatgagcacacagaggagggggagagcctgctgtgcctggcctgcagcgctggctactatgagctggcccaggtgctgctggccatgcacgccaacgtggaggaccggggcaacaagggggacatcacccccctgatggccgccagcagcggcggctacctggacatcgtgaagctgctgctgctgcatgatgctgatgtgaacagccagagcgccaccggcaacacagccctgacctacgcctgtgccggcggctttgtggacatcgtgaaggtgctgctgaatgaaggagccaacatcgaggaccacaatgaaaatggccacacccccctgatggaggccgccagcgctggccacgtggaggtggcccgggtgctgctggaccacggggccggcatcaacacccacagcaatgagttcaaggagagcgccctgaccctggcctgctacaagggccacctggacatggtgcgcttcctgctggaggccggggctgaccaggagcacaagacagatgagatgcacacagccctgatggaggcctgcatggatggccacgtggaggtggcccggctgctgctggacagcggggcccaggtgaacatgcctgctgacagctttgagagccccctgaccctggccgcctgtggcggccacgtggagctggccgccctgctgattgaaagaggagccaacctggaggaggtgaatgatgagggctacacccccctgatggaggccgcccgggagggccacgaggagatggtggccctgctgctggcccagggcgccaacatcaatgcccagacagaggagacccaggagacagccctgaccctggcctgctgcggcggcttcagcgaggtggccgacttcctgatcaaggccggggctgacatcgagctgggctgcagcacccccctgatggaggccagccaggagggccacctggagctggtgaagtacctgctggccagcggggccaacgtgcacgccaccacagccactggagacacagccctgacctacgcctgtgaaaatggccacacagatgtggctgatgtgctgctgcaggccggggctgacctggagcacgagagcgagggcggccgcacccccctgatgaaggccgcccgggccggccacctgtgcaccgtgcagttcctgatcagcaaaggagccaacgtgaacagagccacagccaacaatgaccacacagtggtgtccctggcctgtgccggcggccacctggccgtggtggagctgctgctggcccatggagctgaccccacccaccggctgaaggatggcagcaccatgctgattgaagctgccaagggcggccacaccaacgtggtgtcctacctgctggactaccccaacaacgtgctgtctgtgcccaccacagatgtgtcccagctgcccccacccagccaggaccagagccaggtgccccgggtgcccacccacaccctggccatggtggtgcccccccaggagccagacaggaccagccaggagaacagccctgccctgctgggcgtgcagaagggcaccagcaagcagaagagcagcagcctgcaggtggccgaccaggacctgctgcccagcttccacccctaccagcccctggagtgcatcgtggaggagacagagggcaagctgaatgagctgggccagaggatcagcgccatcgagaaggcccagctgaagagcctggagctgatccagggcgagcccctgaacaaggacaagattgaggagctgaagaagaaccgggaggagcaggtgcagaagaagaagaagatcctgaaggagctgcagaaggtggagcggcagctgcagatgaagacccagcagcagttcaccaaggagtacctggagaccaagggccagaaggacacagtgtccctgcaccagcagtgcagccacagaggagtcttccctgagggggagggagatggcagcctgcctgaggaccacttcagcgagctgccccaggtggacaccatcctcttcaaggacaatgatgtggatgatgagcagcagagcccccccagcgctgagcagattgactttgtgcctgtgcagcccctgagcagcccccagtgcaacttcagcagtgacctgggcagcaatggcaccaacagcctggagctgcagaaggtgtctggcaaccagcagatcgtgggccagccccagatcgccatcactggacatgaccagggcctgctggtgcaggagccagatggcctgatggtggccaccccagcccagaccctgacagacaccctggatgacctgattgctgctgtgtccaccagggtgcccaccggcagcaacagcagcagccagaccacagaatgtctgaccccagagagctgcagccagaccaccagcaatgtggccagccagagcatgcctcctgtgtaccccagcgtggacattgatgcccacacagagagcaaccacgacacagccctgaccctggcctgtgccggcggccacgaggagctggtgtctgtgctgattgccagagatgccaagattgagcaccgggacaagaagggcttcacccccctcatcctggccgccacagctggccacgtgggcgtggtggagatcctgctggacaagggcggggacatcgaggcccagagcgagaggaccaaggacacccccctgagcctggcctgcagcggcggccggcaggaggtggtggacctgctgctggcccggggggccaacaaggagcacagaaatgtgtctgactacacccccctgagcctggccgccagcggcggctacgtgaacatcatcaagatcctgctgaatgctggagctgagatcaacagcaggacaggcagcaagctgggcatcagccccctgatgctggccgccatgaatggccacgtgcctgctgtgaagctgctgctggacatgggcagtgacatcaatgcccagatcgagaccaacagaaacacagccctgaccctggcctgcttccagggccgggcagaggtggtgtccctgctgctggacaggaaggccaacgtggagcaccgggccaagacaggcctgacccccctgatggaggccgccagcggcggctacgccgaggtgggccgggtgctgctggacaagggagcagatgtgaatgcccctcctgtgcccagcagccgggacacagccctgaccatcgctgctgacaagggccactacaagttctgtgagctgctgatccacagaggagcccacattgatgtgaggaacaagaagggcaacacccccctgtggctggccagcaatggaggccactttgatgtggtgcagctgctggtgcaggccggggctgatgtggatgctgctgacaacaggaagatcacccccctgatgtctgccttcaggaagggccacgtgaaggtggtgcagtacctggtgaaggaggtgaaccagttccccagcgacatcgagtgcatgagatacatcgccaccatcacagacaaggagctgctgaagaagtgccaccagtgtgtggagaccatcgtgaaggccaaggaccagcaggccgctgaggccaacaagaatgccagcatcctgctgaaggagctggacctggagaagagccgggaggagagcaggaagcaggccctggccgccaagcgggagaagaggaaggagaagaggaagaagaagaaggaggagcagaagaggaagcaggaggaggatgaggagaacaagcccaaggaaaattctgagctgcctgaagatgaagatgaggaggagaatgatgaagatgtggagcaggaggtgcccatcgagccccccagcgccaccaccaccaccaccatcggcatcagcgccaccagcgccaccttcaccaacgtgtttgggaagaagagggccaacgtggtgaccacccccagcaccaacaggaagaacaagaagaacaagaccaaggagaccccacccacagcccacctgatcctgcctgagcagcacatgagcctggcccagcagaaggctgacaagaacaagatcaatggagagccccggggcggcggggccggcggcaacagcgacagcgacaacctggacagcacagactgcaacagcgagagcagcagcggcggcaagagccaggagctgaactttgtgatggatgtgaacagcagcaagtaccccagcctgctgctgcacagccaggaggagaagaccagcacagccaccagcaagacccagacccggctggagggggaggtgacccccaacagcctgagcaccagctacaagacagtgtccctgcccctgagcagccccaacatcaagctgaacctgaccagccccaagaggggccagaagcgggaggagggctggaaggaggtggtgagaagaagcaagaagctgtctgtgcctgcctctgtggtgagccgcatcatgggccggggcggctgcaacatcacagccatccaggatgtgactggagcccacattgatgtggacaagcagaaggacaagaatggagagaggatgatcaccatccggggcggcacagagagcaccaggtatgctgtgcagctgatcaatgccctgatccaggaccctgccaaggagctggaggacctgatccccaagaaccacatccgcaccccagccagcaccaagagcatccacgccaacttcagcagcggcgtgggcaccacagctgccagcagcaagaatgccttccccctgggcgcccccaccctggtgaccagccaggccaccaccctgagcaccttccagcctgccaacaagctgaacaagaatgtgcccaccaacgtgcgcagcagcttccctgtgtccctgcccctggcctacccccacccccactttgccctgctggccgcccagaccatgcagcagatccgccacccccggctgcccatggcccagtttggaggcaccttcagccccagccccaacacctggggccccttccctgtgcggcctgtgaaccctggcaacaccaacagcagccccaagcacaacaacaccagccggctgcccaaccagaatggaacagtgctgcccagcgagagcgctggcctggccacagccagctgccccatcaccgtgtcctctgtggtggccgccagccagcagctgtgtgtgaccaacaccaggacccccagctctgtgaggaagcagctgtttgcctgtgtgcccaagaccagccccccagccaccgtcatcagctctgtgaccagcacctgcagcagcctgcccagcgtgtcctctgcccccatcaccagcggccaggcccccaccaccttcctgcctgccagcaccagccaggcccagctgagcagccagaagatggagagcttctctgctgtgccccccaccaaggagaaggtgtccacccaggaccagcccatggccaacctgtgcacccccagcagcacagccaacagctgcagcagcagcgccagcaacacccctggggcccctgagacccaccccagcagcagccccacccccaccagcagcaacacccaggaggaggcccagcccagctctgtgtctgacctgagccccatgtccatgccctttgccagcaacagcgagcccgcccccctgaccctgaccagccccaggatggtggccgctgacaaccaggacaccagcaacctgccccagctggccgtgcctgccccccgggtgagccacaggatgcagccccggggcagcttctacagcatggtgcccaatgccaccatccaccaggacccccagagcatctttgtgaccaaccctgtgaccctgaccccaccccagggccccccagctgctgtgcagctgagcagcgctgtgaacatcatgaatggcagccagatgcacatcaacccagccaacaagagcctgccccccaccttcggccctgccaccctcttcaaccacttcagcagcctgtttgacagcagccaggtgcctgccaaccagggctggggagatggccccctgagcagccgggtggccacagatgccagcttcaccgtgcagagcgccttcctgggcaacagcgtgctgggccacctggagaacatgcacccagacaacagcaaggcccctggcttccggccccccagccagagggtgtccaccagccctgtgggcctgcccagcattgaccccagcggcagcagccccagcagcagcagcgcccccctggccagcttcagcggcatccctggcaccagggtcttcctgcagggccctgcccctgtgggcacccccagcttcaaccggcagcacttcagcccccacccctggaccagcgccagcaacagctgtgacagccccatccccagcgtgagcagcggcagcagcagccccctgagcgccaccagcgccccacccaccctgggccagcccaagggcgtgtctgccagccaggacaggaagatccccccacccatcggcacagagcggctggcccgcatccggcagggcggctctgtggcccaggccccagctggcaccagctttgtggcccctgtgggccacagcggcatctggagctttggagtgaatgctgtgtctgagggcctgagcggctggagccagagcgtgatgggcaaccaccccatgcaccagcagctgagtgaccccagcaccttcagccagcaccagcccatggagagagatgattctggcatggtggcccccagcaacatcttccaccagcccatggccagcggctttgtggacttcagcaagggcctgcccatctccatgtatggaggcaccatcatccccagccacccccagctggctgatgtgcctgggggccccctcttcaacggcctgcacaacccagaccctgcctggaaccccatgatcaaggtgatccagaacagcacagagtgcacagatgcccagcagtag

SEQ ID NO: 194791 - DNA, 3024 bp, Artificial Sequence
  derived and/or modified sequence
atggtggccctgctgctggcccagggcgccaacatcaatgcccagacagaggagacccaggagacagccctgaccctggcctgctgcggcggcttcagcgaggtggccgacttcctgatcaaggccggggctgacatcgagctgggctgcagcacccccctgatggaggccagccaggagggccacctggagctggtgaagtacctgctggccagcggggccaacgtgcacgccaccacagccaccggggacacagccctgacctacgcctgtgaaaatggccacacagatgtggctgatgtgctgctgcaggccggggctgacctggacaagcaggaggacatgaagaccatcctggagggcatcgaccctgccaagcaccaggagcacgagagcgagggcggccgcacccccctgatgaaggccgcccgggccggccacctgtgcaccgtgcagttcctgatcagcaaaggagccaacgtgaacagagccacagccaacaatgaccacacagtggtgtccctggcctgtgccggcggccacctggccgtggtggagctgctgctggcccatggagctgaccccacccaccggctgaaggatggcagcaccatgctgattgaagctgccaagggcggccacaccaacgtggtgtcctacctgctggactaccccaacaacgtgctgtctgtgcccaccacagatgtgtcccagctgcccccacccagccaggaccagagccaggtgccccgggtgcccacccacaccctggccatggtggtgcccccccaggagccagacaggaccagccaggagaacagccctgccctgctgggcgtgcagaagggcaccagcaagcagaagagcagcagcctgcaggtggccgaccaggacctgctgcccagcttccacccctaccagcccctggagtgcatcgtggaggagacagagggcaagctgaatgagctgggccagaggatcagcgccatcgagaaggcccagctgaagagcctggagctgatccagggcgagcccctgaacaaggacaagattgaggagctgaagaagaaccgggaggagcaggtgcagaagaagaagaagatcctgaaggagctgcagaaggtggagcggcagctgcagatgaagacccagcagcagttcaccaaggagtacctggagaccaagggccagaaggacacagtgtccctgcaccagcagtgcagccacagaggagtcttccctgagggggagggagatggcagcctgcctgaggaccacttcagcgagctgccccaggtggacaccatcctcttcaaggacaatgatgtggatgatgagcagcagagcccccccagcgctgagcagattgactttgtgcctgtgcagcccctgagcagcccccagtgcaacttcagcagtgacctgggcagcaatggcaccaacagcctggagctgcagaaggtgtctggcaaccagcagatcgtgggccagccccagatcgccatcactggacatgaccagggcctgctggtgcaggagccagatggcctgatggtggccaccccagcccagaccctgacagacaccctggatgacctgattgctgctgtgtccaccagggtgcccaccggcagcaacagcagcagccagaccacagaatgtctgaccccagagagctgcagccagaccaccagcaatgtggccagccagagcatgcctcctgtgtaccccagcgtggacattgatgcccacacagagagcaaccacgacacagccctgaccctggcctgtgccggcggccacgaggagctggtgtctgtgctgattgccagagatgccaagattgagcaccgggacaagaagggcttcacccccctcatcctggccgccacagctggccacgtgggcgtggtggagatcctgctggacaagggcggggacatcgaggcccagagcgagaggaccaaggacacccccctgagcctggcctgcagcggcggccggcaggaggtggtggacctgctgctggcccggggggccaacaaggagcacagaaatgtgtctgactacacccccctgagcctggccgccagcggcggctacgtgaacatcatcaagatcctgctgaatgctggagctgagatcaacagcaggacaggcagcaagctgggcatcagccccctgatgctggccgccatgaatggccacgtgcctgctgtgaagctgctgctggacatgggcagtgacatcaatgcccagatcgagaccaacagaaacacagccctgaccctggcctgcttccagggccgggcagaggtggtgtccctgctgctggacaggaaggccaacgtggagcaccgggccaagacaggcctgacccccctgatggaggccgccagcggcggctacgccgaggtgggccgggtgctgctggacaagggagcagatgtgaatgcccctcctgtgcccagcagccgggacacagccctgaccatcgctgctgacaagggccactacaagttctgtgagctgctgatccacagaggagcccacattgatgtgaggaacaagaagggcaacacccccctgtggctggccagcaatggaggccactttgatgtggtgcagctgctggtgcaggccggggctgatgtggatgctgctgacaacaggaagatcacccccctgatgtctgccttcaggaagggccacgtgaaggtggtgcagtacctggtgaaggaggtgaaccagttccccagcgacatcgagtgcatgagatacatcgccaccatcacagacaaggagctgctgaagaagtgccaccagtgtgtggagaccatcgtgaaggccaaggaccagcaggccgctgaggccaacaagaatgccagcatcctgctgaaggagctggacctggagaagagccgggaggagagcaggaagcaggccctggccgccaagcgggagaagaggaaggagaagaggaaggagaagaggggcacagagaaggagaccggcagaagatag

SEQ ID NO: 194792 - DNA, 7629 bp, Artificial Sequence
  derived and/or modified sequence
atgctgacagattctgggggcggcggcaccagctttgaggaggacctggacagcgtggcccccaggtctgccccagctggggccagcgagcccccacctcctgggggcgtgggcctgggcatcagaacagtgcggctgtttggagaggccggccctgccagcggcgtgggcagcagcggcggcggcggcagcggcagcggcaccggcggcggagatgctgccctggacttcaagctggccgctgctgtgctgaggactggaggcggcggcggggccagcggcagtgatgaagatgaggtgtctgaggtggagagcttcatcctggaccaggaggacctggacaaccctgtgctgaagaccaccagcgagatcttcctgagcagcacagctgagggcgctgacctgaggacagtggaccctgagacccaggcccggctggaggccctgctggaggccgccggcatcggcaagctgagcacagcagatggcaaggcctttgctgaccctgaggtgctgcggcggctgaccagctctgtgtcctgtgccctggatgaggccgccgccgccctgaccaggatgaaggccgagaacagccacaatgccggccaggtggacaccaggagcctggccgaggcctgcagtgatggagatgtgaatgctgtgaggaagctgctggatgagggccgctctgtgaatgagcacacagaggagggggagagcctgctgtgcctggcctgcagcgctggctactatgagctggcccaggtgctgctggccatgcacgccaacgtggaggaccggggcaacaagggggacatcacccccctgatggccgccagcagcggcggctacctggacatcgtgaagctgctgctgctgcatgatgctgatgtgaacagccagagcgccaccggcaacacagccctgacctacgcctgtgccggcggctttgtggacatcgtgaaggtgctgctgaatgaaggagccaacatcgaggaccacaatgaaaatggccacacccccctgatggaggccgccagcgctggccacgtggaggtggcccgggtgctgctggaccacggggccggcatcaacacccacagcaatgagttcaaggagagcgccctgaccctggcctgctacaagggccacctggacatggtgcgcttcctgctggaggccggggctgaccaggagcacaagacagatgagatgcacacagccctgatggaggcctgcatggatggccacgtggaggtggcccggctgctgctggacagcggggcccaggtgaacatgcctgctgacagctttgagagccccctgaccctggccgcctgtggcggccacgtggagctggccgccctgctgattgaaagaggagccaacctggaggaggtgaatgatgagggctacacccccctgatggaggccgcccgggagggccacgaggagatggtggccctgctgctggcccagggcgccaacatcaatgcccagacagaggagacccaggagacagccctgaccctggcctgctgcggcggcttcagcgaggtggccgacttcctgatcaaggccggggctgacatcgagctgggctgcagcacccccctgatggaggccagccaggagggccacctggagctggtgaagtacctgctggccagcggggccaacgtgcacgccaccacagccactggagacacagccctgacctacgcctgtgaaaatggccacacagatgtggctgatgtgctgctgcaggccggggctgacctggagcacgagagcgagggcggccgcacccccctgatgaaggccgcccgggccggccacctgtgcaccgtgcagttcctgatcagcaaaggagccaacgtgaacagagccacagccaacaatgaccacacagtggtgtccctggcctgtgccggcggccacctggccgtggtggagctgctgctggcccatggagctgaccccacccaccggctgaaggatggcagcaccatgctgattgaagctgccaagggcggccacaccaacgtggtgtcctacctgctggactaccccaacaacgtgctgtctgtgcccaccacagatgtgtcccagctgcccccacccagccaggaccagagccaggtgccccgggtgcccacccacaccctggccatggtggtgcccccccaggagccagacaggaccagccaggagaacagccctgccctgctgggcgtgcagaagggcaccagcaagcagaagagcagcagcctgcaggtggccgaccaggacctgctgcccagcttccacccctaccagcccctggagtgcatcgtggaggagacagagggcaagctgaatgagctgggccagaggatcagcgccatcgagaaggcccagctgaagagcctggagctgatccagggcgagcccctgaacaaggacaagattgaggagctgaagaagaaccgggaggagcaggtgcagaagaagaagaagatcctgaaggagctgcagaaggtggagcggcagctgcagatgaagacccagcagcagttcaccaaggagtacctggagaccaagggccagaaggacacagtgtccctgcaccagcagtgcagccacagaggagtcttccctgagggggagggagatggcagcctgcctgaggaccacttcagcgagctgccccaggtggacaccatcctcttcaaggacaatgatgtggatgatgagcagcagagcccccccagcgctgagcagattgactttgtgcctgtgcagcccctgagcagcccccagtgcaacttcagcagtgacctgggcagcaatggcaccaacagcctggagctgcagaaggtgtctggcaaccagcagatcgtgggccagccccagatcgccatcactggacatgaccagggcctgctggtgcaggagccagatggcctgatggtggccaccccagcccagaccctgacagacaccctggatgacctgattgctgctgtgtccaccagggtgcccaccggcagcaacagcagcagccagaccacagaatgtctgaccccagagagctgcagccagaccaccagcaatgtggccagccagagcatgcctcctgtgtaccccagcgtggacattgatgcccacacagagagcaaccacgacacagccctgaccctggcctgtgccggcggccacgaggagctggtgtctgtgctgattgccagagatgccaagattgagcaccgggacaagaagggcttcacccccctcatcctggccgccacagctggccacgtgggcgtggtggagatcctgctggacaagggcggggacatcgaggcccagagcgagaggaccaaggacacccccctgagcctggcctgcagcggcggccggcaggaggtggtggacctgctgctggcccggggggccaacaaggagcacagaaatgtgtctgactacacccccctgagcctggccgccagcggcggctacgtgaacatcatcaagatcctgctgaatgctggagctgagatcaacagcaggacaggcagcaagctgggcatcagccccctgatgctggccgccatgaatggccacgtgcctgctgtgaagctgctgctggacatgggcagtgacatcaatgcccagatcgagaccaacagaaacacagccctgaccctggcctgcttccagggccgggcagaggtggtgtccctgctgctggacaggaaggccaacgtggagcaccgggccaagacaggcctgacccccctgatggaggccgccagcggcggctacgccgaggtgggccgggtgctgctggacaagggagcagatgtgaatgcccctcctgtgcccagcagccgggacacagccctgaccatcgctgctgacaagggccactacaagttctgtgagctgctgatccacagaggagcccacattgatgtgaggaacaagaagggcaacacccccctgtggctggccagcaatggaggccactttgatgtggtgcagctgctggtgcaggccggggctgatgtggatgctgctgacaacaggaagatcacccccctgatgtctgccttcaggaagggccacgtgaaggtggtgcagtacctggtgaaggaggtgaaccagttccccagcgacatcgagtgcatgagatacatcgccaccatcacagacaaggagctgctgaagaagtgccaccagtgtgtggagaccatcgtgaaggccaaggaccagcaggccgctgaggccaacaagaatgccagcatcctgctgaaggagctggacctggagaagagccgggaggagagcaggaagcaggccctggccgccaagcgggagaagaggaaggagaagaggaagaagaagaaggaggagcagaagaggaagcaggaggaggatgaggagaacaagcccaaggaaaattctgagctgcctgaagatgaagatgaggaggagaatgatgaagatgtggagcaggaggtgcccatcgagccccccagcgccaccaccaccaccaccatcggcatcagcgccaccagcgccaccttcaccaacgtgtttgggaagaagagggccaacgtggtgaccacccccagcaccaacaggaagaacaagaagaacaagaccaaggagaccccacccacagcccacctgatcctgcctgagcagcacatgagcctggcccagcagaaggctgacaagaacaagatcaatggagagccccggggcggcggggccggcggcaacagcgacagcgacaacctggacagcacagactgcaacagcgagagcagcagcggcggcaagagccaggagctgaactttgtgatggatgtgaacagcagcaagtaccccagcctgctgctgcacagccaggaggagaagaccagcacagccaccagcaagacccagacccggctggagggggaggtgacccccaacagcctgagcaccagctacaagacagtgtccctgcccctgagcagccccaacatcaagctgaacctgaccagccccaagaggggccagaagcgggaggagggctggaaggaggtggtgagaagaagcaagaagctgtctgtgcctgcctctgtggtgagccgcatcatgggccggggcggctgcaacatcacagccatccaggatgtgactggagcccacattgatgtggacaagcagaaggacaagaatggagagaggatgatcaccatccggggcggcacagagagcaccaggtatgctgtgcagctgatcaatgccctgatccaggaccctgccaaggagctggaggacctgatccccaagaaccacatccgcaccccagccagcaccaagagcatccacgccaacttcagcagcggcgtgggcaccacagctgccagcagcaagaatgccttccccctgggcgcccccaccctggtgaccagccaggccaccaccctgagcaccttccagcctgccaacaagctgaacaagaatgtgcccaccaacgtgcgcagcagcttccctgtgtccctgcccctggcctacccccacccccactttgccctgctggccgcccagaccatgcagcagatccgccacccccggctgcccatggcccagtttggaggcaccttcagccccagccccaacacctggggccccttccctgtgcggcctgtgaaccctggcaacaccaacagcagccccaagcacaacaacaccagccggctgcccaaccagaatggaacagtgctgcccagcgagagcgctggcctggccacagccagctgccccatcaccgtgtcctctgtggtggccgccagccagcagctgtgtgtgaccaacaccaggacccccagctctgtgaggaagcagctgtttgcctgtgtgcccaagaccagccccccagccaccgtcatcagctctgtgaccagcacctgcagcagcctgcccagcgtgtcctctgcccccatcaccagcggccaggcccccaccaccttcctgcctgccagcaccagccaggcccagctgagcagccagaagatggagagcttctctgctgtgccccccaccaaggagaaggtgtccacccaggaccagcccatggccaacctgtgcacccccagcagcacagccaacagctgcagcagcagcgccagcaacacccctggggcccctgagacccaccccagcagcagccccacccccaccagcagcaacacccaggaggaggcccagcccagctctgtgtctgacctgagccccatgtccatgccctttgccagcaacagcgagcccgcccccctgaccctgaccagccccaggatggtggccgctgacaaccaggacaccagcaacctgccccagctggccgtgcctgccccccgggtgagccacaggatgcagccccggggcagcttctacagcatggtgcccaatgccaccatccaccaggacccccagagcatctttgtgaccaaccctgtgaccctgaccccaccccagggccccccagctgctgtgcagctgagcagcgctgtgaacatcatgaatggcagccagatgcacatcaacccagccaacaagagcctgccccccaccttcggccctgccaccctcttcaaccacttcagcagcctgtttgacagcagccaggtgcctgccaaccagggctggggagatggccccctgagcagccgggtggccacagatgccagcttcaccgtgcagagcgccttcctgggcaacagcgtgctgggccacctggagaacatgcacccagacaacagcaaggcccctggcttccggccccccagccagagggtgtccaccagccctgtgggcctgcccagcattgaccccagcggcagcagccccagcagcagcagcgcccccctggccagcttcagcggcatccctggcaccagggtcttcctgcagggccctgcccctgtgggcacccccagcttcaaccggcagcacttcagcccccacccctggaccagcgccagcaacagcagcaccagcgccccacccaccctgggccagcccaagggcgtgtctgccagccaggacaggaagatccccccacccatcggcacagagcggctggcccgcatccggcagggcggctctgtggcccaggccccagctggcaccagctttgtggcccctgtgggccacagcggcatctggagctttggagtgaatgctgtgtctgagggcctgagcggctggagccagagcgtgatgggcaaccaccccatgcaccagcagctgagtgaccccagcaccttcagccagcaccagcccatggagagagatgacagcggcatggtggcccccagcaacatcttccaccagcccatggccagcggctttgtggacttcagcaagggcctgcccatctccatgtatggaggcaccatcatccccagccacccccagctggctgatgtgcctgggggccccctcttcaacggcctgcacaacccagaccctgcctggaaccccatgatcaaggtgatccagaacagcacagaatgtacagatgcccagcagatctggccaggcacctgggccccccacatcggcaacatgcacctgaagtatgtgaactag

SEQ ID NO: 194793 - DNA, 4461 bp, Artificial Sequence
  derived and/or modified sequence
ccccgggtgggccgccaccggctgcggctgcgggtgaggaccatgctgacagattctgggggcggcggcaccagctttgaggaggacctggacagcgtggcccccaggtctgccccagctggggccagcgagcccccacctcctgggggcgtgggcctgggcatcagaacagtgcggctgtttggagaggccggccctgccagcggcgtgggcagcagcggcggcggcggcagcggcagcggcaccggcggcggagatgctgccctggacttcaagctggccgctgctgtgctgaggactggaggcggcggcggggccagcggcagtgatgaagatgaggtgtctgaggtggagagcttcatcctggaccaggaggacctggacaaccctgtgctgaagaccaccagcgagatcttcctgagcagcacagctgagggcgctgacctgaggacagtggaccctgagacccaggcccggctggaggccctgctggaggccgccggcatcggcaagctgagcacagcagatggcaaggcctttgctgaccctgaggtgctgcggcggctgaccagctctgtgtcctgtgccctggatgaggccgccgccgccctgaccaggatgaaggccgagaacagccacaatgccggccaggtggacaccaggagcctggccgaggcctgcagtgatggagatgtgaatgctgtgaggaagctgctggatgagggccgctctgtgaatgagcacacagaggagggggagagcctgctgtgcctggcctgcagcgctggctactatgagctggcccaggtgctgctggccatgcacgccaacgtggaggaccggggcaacaagggggacatcacccccctgatggccgccagcagcggcggctacctggacatcgtgaagctgctgctgctgcatgatgctgatgtgaacagccagagcgccaccggcaacacagccctgacctacgcctgtgccggcggctttgtggacatcgtgaaggtgctgctgaatgaaggagccaacatcgaggaccacaatgaaaatggccacacccccctgatggaggccgccagcgctggccacgtggaggtggcccgggtgctgctggaccacggggccggcatcaacacccacagcaatgagttcaaggagagcgccctgaccctggcctgctacaagggccacctggacatggtgcgcttcctgctggaggccggggctgaccaggagcacaagacagatgagatgcacacagccctgatggaggcctgcatggatggccacgtggaggtggcccggctgctgctggacagcggggcccaggtgaacatgcctgctgacagctttgagagccccctgaccctggccgcctgtggcggccacgtggagctggccgccctgctgattgaaagaggagccaacctggaggaggtgaatgatgagggctacacccccctgatggaggccgcccgggagggccacgaggagatggtggccctgctgctggcccagggcgccaacatcaatgcccagacagaggagacccaggagacagccctgaccctggcctgctgcggcggcttcagcgaggtggccgacttcctgatcaaggccggggctgacatcgagctgggctgcagcacccccctgatggaggccagccaggagggccacctggagctggtgaagtacctgctggccagcggggccaacgtgcacgccaccacagccactggagacacagccctgacctacgcctgtgaaaatggccacacagatgtggctgatgtgctgctgcaggccggggctgacctggacaagcaggaggacatgaagaccatcctggagggcattgatcctgccaagcaccaggagcatgaaagtgaaggaggccgcacccccctgatgaaggccgcccgggccggccacctgtgcaccgtgcagttcctgatcagcaagggggccaacgtgaacagagccacagccaacaatgaccacacagtggtgtccctggcctgtgccggcggccacctggccgtggtggagctgctgctggcccacggggctgaccccacccaccggctgaaggatggcagcaccatgctgattgaggccgccaagggcggccacaccaacgtggtgtcctacctgctggactaccccaacaacgtgctgtctgtgcccaccacagatgtgtcccagctgcccccacccagccaggaccagagccaggtgccccgggtgcccacccacaccctggccatggtggtgcccccccaggagccagacaggaccagccaggagaacagccctgccctgctgggcgtgcagaagggcaccagcaagcagaagagcagcagcctgcaggtggccgaccaggacctgctgcccagcttccacccctaccagcccctggagtgcatcgtggaggagacagagggcaagctgaatgagctgggccagaggatcagcgccatcgagaaggcccagctgaagagcctggagctgatccagggcgagcccctgaacaaggacaagattgaggagctgaagaagaaccgggaggagcaggtgcagaagaagaagaagatcctgaaggagctgcagaaggtggagcggcagctgcagatgaagacccagcagcagttcaccaaggagtacctggagaccaagggccagaaggacacagtgtccctgcaccagcagtgcagccaccggggcgtcttccctgagggggagggagatggcagcctgcctgaggaccacttcagcgagctgccccaggtggacaccatcctcttcaaggacaatgatgtggatgatgagcagcagagccccccatctgctgagcagattgactttgtgcctgtgcagcccctgagcagcccccagtgcaacttcagcagtgacctgggcagcaatggcaccaacagcctggagctgcagaaggtgtctggcaaccagcagatcgtgggccagccccagatcgccatcaccggccatgaccagggcctgctggtgcaggagccagatggcctgatggtggccaccccagcccagaccctgacagacaccctggatgacctgattgctgctgtgtccaccagggtgcccaccggcagcaacagcagcagccagaccacagagtgcctgaccccagagagctgcagccagaccaccagcaatgtggccagccagagcatgcctcctgtgtaccccagcgtggacattgatgcccacacagagagcaaccacgacacagccctgaccctggcctgtgccggcggccacgaggagctggtgtctgtgctgattgccagagatgccaagattgagcaccgggacaagaagggcttcacccccctcatcctggccgccacagctggccacgtgggcgtggtggagatcctgctggacaagggcggggacatcgaggcccagagcgagaggaccaaggacacccccctgagcctggcctgcagcggcggccggcaggaggtggtggacctgctgctggcccggggggccaacaaggagcacagaaatgtgtctgactacacccccctgagcctggccgccagcggcggctacgtgaacatcatcaagatcctgctgaatgctggagctgagatcaacagcaggacaggcagcaagctgggcatcagccccctgatgctggccgccatgaatggacatgtgcctgctgtgaagctgctgctggacatgggcagtgacatcaatgcccagatcgagaccaacagaaacacagccctgaccctggcctgcttccagggccgggcagaggtggtgtccctgctgctggacaggaaggccaacgtggagcaccgggccaagacaggcctgacccccctgatggaggccgccagcggcggctatgcagaggtgggccgggtgctgctggacaagggagcagatgtgaatgcccctcctgtgcccagcagccgggacacagccctgaccatcgctgctgacaagggccactacaagttctgtgagctgctgatccacagaggagcccacattgatgtgaggaacaagaagggcaacacccccctgtggctggccagcaatggaggccactttgatgtggtgcagctgctggtgcaggccggggctgatgtggatgctgctgacaacaggaagatcacccccctgatgtctgccttcagaaaaggacatgtgaaggtggtgcagtacctggtgaaggaggtgaaccagttccccagcgacatcgagtgcatgagatacatcgccaccatcacagacaaggagctgctgaagaagtgccaccagtgtgtggagaccatcgtgaaggccaaggaccagcaggccgctgaggccaacaagaatgccagcatcctgctgaaggagctggacctggagaagagccgggaggagagcaggaagcaggccctggccgccaagaggtag

SEQ ID NO: 194794 - DNA, 1863 bp, Artificial Sequence
  derived and/or modified sequence
atgagcctggcccagcagaaggctgacaagaacaagatcaacggggagccccggggcggcggggccggcggcaacagcgacagcgacaacctggacagcacagactgcaacagcgagagcagcagcggcggcaagagccaggagctgaactttgtgatggatgtgaacagcagcaagtaccccagcctgctgctgcacagccaggaggagaagaccagcacagccaccagcaagacccagacccggctggagggggaggtgacccccaacagcctgagcaccagctacaagacagtgtccctgcccctgagcagccccaacatcaagctgaacctgaccagccccaagaggggccagaagcgggaggagggctggaaggaggtggtgcggcgcagcaagaagctgtctgtgcctgcctctgtggtgagccgcatcatgggccggggcggctgcaacatcacagccatccaggatgtgactggagcccacattgatgtggacaagcagaaggacaagaatggagagaggatgatcaccatccggggcggcacagagagcaccaggtatgctgtgcagctgatcaatgccctgatccaggaccctgccaaggagctggaggacctgatccccaagaaccacatccgcaccccagccagcaccaagagcatccacgccaacttcagcagtggagtgggcaccacagctgccagcagcaagaatgccttccccctgggcgcccccaccctggtgaccagccaggccaccaccctgagcaccttccagcctgccaacaagctgaacaagaatgtgcccaccaacgtgcgcagcagcttccctgtgtccctgcccctggcctacccccacccccactttgccctgctggccgcccagaccatgcagcagatccgccacccccggctgcccatggcccagtttggaggcaccttcagccccagccccaacacctggggccccttccctgtgcggcctgtgaaccctggcaacaccaacagcagccccaagcacaacaacaccagccggctgcccaaccagaatggcaccgtgctgcccagcgagagcgctggcctggccacagccagctgccccatcaccgtgtcctctgtggtggccgccagccagcagctgtgtgtgaccaacaccaggacccccagctctgtgaggaagcagctgtttgcctgtgtgcccaagaccagccccccagccaccgtcatcagctctgtgaccagcacctgcagcagcctgcccagcgtgagcagcgcccccatcaccagcggccaggcccccaccaccttcctgcctgccagcaccagccaggcccagctgagcagccagaagatggagagcttctctgctgtgccccccaccaaggagaaggtgtccacccaggaccagcccatggccaacctgtgcacccccagcagcacagccaacagctgcagcagcagcgccagcaacacccctggggcccctgagacccaccccagcagcagccccacccccaccagcagcaacacccaggaggaggcccagcccagctctgtgtctgacctgagccccatgtccatgccctttgccagcaacagcgagcccgcccccctgaccctgaccagccccaggatggtggccgctgacaaccaggacaccagcaacctgccccagctggccgtgcctgccccccgggtgagccacaggatgcagccccggggcagcttctacagcatggtgcccaatgccaccatccaccaggacccccagagcatctttgtgaccaaccctgtgaccctgtgggaggccgaggccagcggcctgcacgaggtgcgcagcctgcggcaggcctggtag

SEQ ID NO: 194795 - DNA, 2601 bp, Artificial Sequence
  derived and/or modified sequence
atggatgtgaacagcagcaagtaccccagcctgctgctgcacagccaggaggagaagaccagcacagccaccagcaagacccagacccggctggagggggaggtgacccccaacagcctgagcaccagctacaagacagtgtccctgcccctgagcagccccaacatcaagctgaacctgaccagccccaagaggggccagaagcgggaggagggctggaaggaggtggtgcggcgcagcaagaagctgtctgtgcctgcctctgtggtgagccgcatcatgggccggggcggctgcaacatcacagccatccaggatgtgactggagcccacattgatgtggacaagcagaaggacaagaatggagagaggatgatcaccatccggggcggcacagagagcaccaggtatgctgtgcagctgatcaatgccctgatccaggaccctgccaaggagctggaggacctgatccccaagaaccacatccgcaccccagccagcaccaagagcatccacgccaacttcagcagtggagtgggcaccacagctgccagcagcaagaatgccttccccctgggcgcccccaccctggtgaccagccaggccaccaccctgagcaccttccagcctgccaacaagctgaacaagaatgtgcccaccaacgtgcgcagcagcttccctgtgtccctgcccctggcctacccccacccccactttgccctgctggccgcccagaccatgcagcagatccgccacccccggctgcccatggcccagtttggaggcaccttcagccccagccccaacacctggggccccttccctgtgcggcctgtgaaccctggcaacaccaacagcagccccaagcacaacaacaccagccggctgcccaaccagaatggcaccgtgctgcccagcgagagcgctggcctggccacagccagctgccccatcaccgtgtcctctgtggtggccgccagccagcagctgtgtgtgaccaacaccaggacccccagctctgtgaggaagcagctgtttgcctgtgtgcccaagaccagccccccagccaccgtcatcagctctgtgaccagcacctgcagcagcctgcccagcgtgagcagcgcccccatcaccagcggccaggcccccaccaccttcctgcctgccagcaccagccaggcccagctgagcagccagaagatggagagcttctctgctgtgccccccaccaaggagaaggtgtccacccaggaccagcccatggccaacctgtgcacccccagcagcacagccaacagctgcagcagcagcgccagcaacacccctggggcccctgagacccaccccagcagcagccccacccccaccagcagcaacacccaggaggaggcccagcccagctctgtgtctgacctgagccccatgtccatgccctttgccagcaacagcgagcccgcccccctgaccctgaccagccccaggatggtggccgctgacaaccaggacaccagcaacctgccccagctggccgtgcctgccccccgggtgagccacaggatgcagccccggggcagcttctacagcatggtgcccaatgccaccatccaccaggacccccagagcatctttgtgaccaaccctgtgaccctgaccccaccccagggccccccagctgctgtgcagctgagcagcgctgtgaacatcatgaatggcagccagatgcacatcaacccagccaacaagagcctgccccccacctttggacctgccaccctcttcaaccacttcagcagcctgtttgacagcagccaggtgcctgccaaccagggctggggagatggccccctgagcagccgggtggccacagatgccagcttcaccgtgcagagcgccttcctgggcaacagcgtgctgggccacctggagaacatgcacccagacaacagcaaggcccctggcttccggccccccagccagagggtgtccaccagccctgtggccaccagcgccccacccaccctgggccagcccaagggcgtgtctgccagccaggacaggaagatccccccacccatcggcacagagcggctggcccgcatccggcagggcggctctgtggcccaggccccagctggcaccagctttgtggcccctgtgggccacagcggcatctggagctttggagtgaatgctgtgtctgagggcctgagcggctggagccagagcgtgatgggcaaccaccccatgcaccagcagctgagtgaccccagcaccttcagccagcaccagcccatggagagagatgacagcggcatggtggcccccagcaacatcttccaccagcccatggccagcggctttgtggacttcagcaagggcctgcccatctccatgtatggaggcaccatcatccccagccacccccagctggctgatgtgcctgggggccccctcttcaacggcctgcacaacccagaccctgcctggaaccccatgatcaaggtgatccagaacagcacagaatgtacagatgcccagcagatctggccaggcacctgggccccccacatcggcaacatgcacctgaagtatgtgaactag

SEQ ID NO: 194796 - DNA, 7623 bp, Artificial Sequence
  derived and/or modified sequence
atgctgaccgacagcggcggcggcggcaccagcttcgaggaggacctcgactccgtcgccccaagaagcgccccagcaggagcttccgagcctcctcctcccggaggagtgggcctcggtatacgtacggtgcggcttttcggcgaagctggcccagcaagcggggttgggagctcaggcggcggtggatccggatccggcacgggaggcggggatgccgccctcgactttaaactcgctgccgctgtcctgcggacaggtgggggcggaggggcttctggctcagacgaggacgaggtgagtgaagtggagagttttattctcgatcaagaggacctcgataacccagtacttaagacaacctcagaaatcttcctgtcatccactgctgagggcgcagacctgcggacagtggatccagagacacaggcacggcttgaggcacttctcgaggctgcagggatcgggaaactctcaactgctgatggaaaggccttcgctgatccagaagtgctgcgccgcctgacgagctccgtaagttgcgcattagacgaggcggctgcagccctcacgcgcatgaaagccgaaaacagccataacgcgggccaagtcgacacgagaagtctggccgaagcttgctctgacggcgacgtcaacgccgtccgaaagctgctcgacgaaggacgttctgtcaacgagcacaccgaggaaggagaaagcctgctgtgcctggcctgtagcgcaggatactacgaactcgcacaagttttgctggccatgcacgccaacgtggaagacagaggcaataaaggcgacataacacctctgatggccgcgtcgagcggaggctacctagacatcgtgaagctacttctgttacacgacgccgacgtaaacagccagtctgccaccggcaataccgcactgacttatgcctgcgctggcggatttgtcgacattgtcaaggtgttgctcaacgagggtgctaacattgaggatcacaacgagaacggccacacccccctgatggaagcggcctcggccggtcacgtggaggtggcaagagtcctcttagatcacggcgcaggcattaatacccacagtaacgaattcaaggagtcagctctgaccctggcttgttacaaggggcatctggatatggtgaggttcttgttggaagccggagctgatcaagagcacaagacggatgagatgcacaccgccctgatggaggcttgcatggacggacacgtggaagtcgctaggcttcttctagatagtggagctcaggttaatatgccagccgattcttttgagtcaccattgactctggcggcttgcggcggtcatgtggagctggccgcattgctcattgagcgaggagccaatctcgaggaggtcaacgacgaaggatatacccctctaatggaagccgccagagaagggcatgaggagatggtggcattgctgcttgcccaaggagcgaacataaacgcacagaccgaagagacacaagaaaccgccctgacactggcctgctgcggaggcttcagtgaggttgctgacttcctcatcaaagccggagctgatattgaacttggttgctccacccccctgatggaagcaagccaggaaggccatctagaacttgtgaagtatctactcgcctcgggggccaacgttcacgccactacagcaacaggggacacagccttgacgtacgcgtgcgagaacggccatacggacgtggctgacgtcctgctgcaggctggtgcagacctggaacatgaatcagagggaggtagaacgccactgatgaaggcagcccgggccgggcatctttgtacagtgcagttcttaatttccaagggtgctaacgtgaacagagcaaccgccaataatgaccacacagtggtttccttagcatgtgctgggggccatcttgcagtggtcgaactgctgctggcacacggggccgatcccactcataggctgaaggatggatccaccatgttaattgaagctgcaaaaggtggccacacaaatgtggtgtcgtacctgctagactatccgaataacgtcctctccgtccccaccaccgatgtttcacagctgccgccaccctcccaagaccaaagccaagtccctcgagtgcccacgcatacactcgcaatggtggtgcctccgcaggagccggatagaacgagtcaggagaattctccagcactgctgggcgtgcagaagggtacatcgaaacaaaagagctccagtctgcaggtggcagatcaggatcttctgccatcctttcatccctatcagcctctagaatgtatcgtcgaggaaactgagggcaagcttaatgaattgggccagagaatctccgcaattgaaaaagcccagttgaaatctctggagttgattcaaggggagcctctcaacaaggataagatcgaggagctgaaaaagaaccgggaagaacaggtccagaaaaagaagaaaatccttaaggaactgcagaaagttgagcgccaactgcagatgaagacacagcagcagtttactaaagagtatcttgaaactaaggggcaaaaggatactgtctcattacatcagcaatgctcacaccgcggtgttttcccggaaggcgaaggcgatggttccctgccagaagaccactttagcgagttgccacaggtcgacacaattctgtttaaggacaacgacgtcgacgatgaacaacagtccccacccagtgccgagcagatcgactttgtccccgtccaacccctatcttcccctcaatgcaacttcagcagcgatctgggctctaacggtacaaattcactcgaactgcaaaaggtgtctggcaatcaacaaatcgttgggcagcctcaaattgccatcacaggacatgaccagggcctgctagtgcaagagcctgacggactgatggtggccacaccggcccagaccttgaccgacaccctagatgaccttatcgctgctgtgagcaccagggtccccaccgggagtaattcatcaagccaaaccaccgagtgtcttacccccgagtcctgttcccaaactacctccaacgtggcctcacagagcatgcctccagtatacccctctgtagacatcgacgcacataccgagtcgaaccatgacactgctcttacattggcctgcgctggcggccatgaggagttggtcagcgttctgatagcacgagatgctaaaatcgaacatagggacaagaaaggattcactccactcatcctggccgccacagccggtcatgtcggggtggtggagattttactggacaagggaggcgacatcgaggcccaaagcgagcgtactaaggatactccattgtcactcgcttgtagcggaggtcgccaggaggtggtggacctgcttctggctcgcggggctaataaggagcataggaacgtaagcgattatacacctctgtccctcgctgcttccggcgggtacgtgaatattataaagattcttcttaatgcaggtgccgagatcaacagcagaacgggtagtaagcttggcatctctcccctgatgctcgctgccatgaatggacatgtgcccgccgttaagctcctgctggacatggggtcagatatcaacgcacagatcgagacgaatcggaacaccgcattaacccttgcctgttttcagggccgagcagaggttgtctcccttctcttggaccgcaaggccaacgtggaacaccgtgctaagaccggtcttacccccctcatggaagccgcgagcggaggctatgcagaggtggggcgggtgctactggataaaggggctgacgtaaacgctccacctgtcccttcctcacgcgacacagccctgaccatcgcagctgataaaggtcattacaaattctgcgagctgctcattcaccgcggggcacatattgatgtgagaaataaaaaaggaaacacccccctatggctggcgagtaatggcgggcattttgatgtggtgcagctcctcgtgcaggcaggagcagacgtggacgccgctgataaccggaaaattactccactcatgtctgcattccggaagggtcacgtcaaggtcgtgcaatatttggtaaaagaggtgaaccagtttcccagcgatatcgaatgtatgaggtatatcgccactatcacagataaggagctcttgaaaaagtgccatcagtgtgttgaaactatcgtgaaggccaaggatcagcaggcagctgaagccaataagaatgcaagcatcctgttgaaggagctcgacctggagaagtcaagggaggaatcaaggaagcaggctctggccgccaagagggaaaaacgcaaggaaaagaggaaaaagaagaaagaagagcagaagagaaaacaggaggaagatgaggagaataaacccaaggagaactccgagctgcccgaggatgaagatgaagaggagaatgacgaggacgtggagcaggaggtgcccattgagcctccctcggccaccacgaccactacaatcgggatttcagccacctcagcaactttcacgaacgtctttggcaaaaagcgtgccaatgtggtaacaacacccagtactaaccggaagaataaaaagaacaaaactaaggaaactcctcctaccgcccacttaatcctacctgagcaacatatgtcactggcacagcagaaagcggataaaaacaaaatcaatggcgagcccaggggtggcggcgctggtgggaactccgattcagataacctggacagtacagattgtaatagcgagtcatcatccggggggaagagtcaggagttgaacttcgtaatggacgtaaattcatctaaatatccgagcttactgttgcattcgcaagaagaaaagaccagcaccgctacatcaaaaacgcagacccgcctcgagggtgaagtgactccgaacagtctgagcacaagctacaaaactgtcagcctgcctttgtcatcacccaatattaaactgaacctgacctcccccaagaggggacagaagagagaagagggttggaaagaggtggtccgccgatcaaaaaagctgagtgtaccagctagtgtggtcagcagaattatgggacggggggggtgtaacattacagctattcaggacgttaccggtgcgcacatagacgtcgacaagcaaaaagataagaatggtgaaaggatgattaccatccgtggaggtacggagagtacacgctatgccgtccagctgatcaatgcattaatccaagacccagccaaggagcttgaggatctcatcccaaagaaccacattcgcaccccagcatcaaccaagagcatacacgccaacttcagcagcggagttgggacgactgcagcgagtagcaagaacgcatttcctcttggagcgccaacactggtgacatcacaagcgacaacactttcgaccttccaaccagccaataaactgaacaagaatgttcccactaacgtcagaagtagcttccctgtgtccctgccgctggcgtatccccacccacacttcgcccttctggccgcacaaaccatgcagcagatcagacacccacggctccctatggcccagttcgggggaacgttcagtcctagtccaaacacatgggggccctttcctgtacggcccgtgaaccccgggaacacaaattccagtccaaagcataataataccagccggctcccaaatcagaatggaactgtgttgcccagtgagtctgccggtctggctacggcctcttgtcctatcactgtgtcctcagtcgtagccgcctctcagcagttgtgtgtaaccaacacacggaccccaagctccgtgagaaaacaacttttcgcctgcgtgcctaaaacatccccccctgcgaccgttatttcctctgttacctctacctgctcctccctgccgagcgtgtccagtgcgcccatcactagcggacaggctccaactacgttcctgcccgcttccacctcacaggcccagttgagctcacagaagatggaatcttttagcgctgttccacctaccaaggagaaggtatctactcaagatcagccaatggccaacctgtgtacaccctcttccaccgccaacagttgttcctctagtgcttccaacactcccggtgctccggagacccaccccagcagctctccaacacccacatcaagcaacacccaagaagaagctcagccttcaagcgtgtctgatctgtcgccaatgtctatgccatttgcctcgaacagcgagccggccccacttacacttacctctccacgcatggtggccgcagataatcaagacacgtcaaacctaccccaactcgccgtgcctgcccctagagtgagccacagaatgcagcctagggggagcttttactccatggtcccaaacgcaactatccatcaggaccctcagtccatcttcgtaacaaacccggtgaccctgacaccaccccaaggcccacccgccgctgtgcagcttagtagcgctgtcaatattatgaacgggagtcaaatgcatatcaatcccgctaacaaaagcctcccccccaccttcggacccgcaaccctgtttaatcattttagttcgctcttcgacagcagtcaggtccccgctaaccagggatggggtgacggccctctgagctctcgcgttgcaacagacgccagcttcacagtgcaatcagcgtttctcggcaacagcgtgctcggacatctggaaaacatgcaccccgacaactcaaaggcccccggatttagaccccctagccagagagtgtccacgagccccgtggggctgcctagcatcgacccttctgggtcctcgcctagcagcagctcagcaccactggcctccttttctggaatccctgggacccgggtctttctgcaggggcctgctcccgttggcaccccaagcttcaatcggcagcactttagcccacacccttggactagtgcttccaattcttgtgattcaccaatcccttccgtaagctctgggtcctcctctccactgtctgcaacctcagctcccccaactctgggccagccaaaaggtgtgtcagctagccaagaccgaaaaatccctcccccaatcggaacggagagactcgcaaggatccgccaggggggaagcgtcgcccaggctcccgcagggacaagctttgtggccccagtgggccactctggtatttggtcgtttggggtcaatgccgtctccgagggactgtctggatggtctcagagcgtgatgggaaatcaccctatgcatcagcagcttagcgatccatccacattcagccagcaccaaccaatggaaagggacgacagtggtatggtggcaccatcaaatatcttccaccaaccgatggcgagcggcttcgttgacttctctaagggattacctatttcaatgtatggggggaccattataccatcccacccccaactcgcagacgttcccggcggtcctctgtttaacggactgcataaccccgaccccgcttggaaccctatgattaaagtgattcagaatagtactgaatgcacagatgcgcaacagtag

SEQ ID NO: 194797 - DNA, 3024 bp, Artificial Sequence
  derived and/or modified sequence
atggtggccctgctgctggcccagggcgccaacatcaacgcccagactgaagagacccaggaaaccgccctcacattagcatgttgcgggggcttcagcgaggtcgccgacttcctgatcaaggctggagcagatatagaactcggatgcagcacaccactgatggaggcctctcaggaaggccacctagaactggtcaagtatctgctggcctcaggagccaacgtgcacgcgaccaccgcaactggcgataccgcgctcacttatgcctgtgagaatggccataccgatgtggctgacgttctgttacaggccggcgcggatctggacaagcaggaagatatgaaaacgatacttgagggaatcgatcctgccaaacaccaggagcacgaatccgaagggggccggacacctctgatgaaagccgctcgcgcaggccatctctgcaccgtgcagttcttgatatctaaaggagcaaatgttaaccgtgccaccgccaataatgaccacaccgttgtgagcctcgcgtgtgctggcggacacctggccgtggtggagctcctgctagcccacggggccgatcctactcacaggctcaaggatgggagcacgatgcttatcgaggcagccaaaggtggccacaccaatgtggtctcgtatctactcgactacccgaataacgtactgtccgtaccaactactgatgtctcgcaattgcctcccccgtcgcaggaccagagccaagttccccgcgttcctacccacacacttgctatggttgtgccgccccaggagccggatcggacatcacaggagaactcacctgcgttgcttggtgtgcagaagggaacaagcaaacagaagagctcctccctgcaggtggccgaccaagatctcctcccctcatttcatccttatcagcccttggagtgtattgtggaggagaccgaggggaaactaaatgagcttggtcagaggatcagcgctatcgagaaggcccagctgaagtcattggaactcattcagggcgagccacttaacaaggacaaaattgaggagctgaagaagaatagagaggaacaggtgcagaagaagaaaaagatcctcaaggagctccagaaagtcgagcgccagctccagatgaagacccaacaacaatttactaaggaatacttggaaaccaaaggtcaaaaggatacggtgagcttacaccagcagtgctctcatcggggagtttttccagagggcgaaggcgacggctcgttacccgaagatcatttcagcgaattaccgcaggtggacactattttgttcaaggacaatgatgtggacgatgaacagcagagcccaccaagcgctgaacagatcgatttcgtcccagtgcagcccctgtctagtccacagtgtaatttctcaagtgacctcggtagtaatggaaccaactcactcgagcttcagaaggtatcgggcaaccagcagattgttggccagcctcagattgcgatcacaggacatgaccagggcctactcgtccaggaacccgacggcctaatggtcgccacccccgctcagacactcacagacaccctggatgacctcatcgctgcagtgtcaactagggtacccaccggtagcaattcgtcaagtcaaacaaccgagtgtcttaccccggagtcatgttcacagacgacaagcaatgtcgcttctcagagcatgccgcctgtctatcccagcgtcgacattgacgcccacaccgagtcaaatcacgatactgccctgacattggcctgcgctggtggacacgaagaactcgttagtgtgctgatcgctcgggatgccaagattgaacaccgcgacaaaaaagggttcaccccgcttattctggctgccaccgccggtcatgtcggtgtcgttgagatcctgttggataagggaggcgacatcgaagcacagtctgaaagaacgaaggacacaccactgagcctcgcgtgctccggagggagacaagaagttgtcgacctcctcctggcaagaggggcaaataaggagcatcggaacgtgtccgactacacgccactttctctggcggctagtggcggttatgtgaacatcataaagatattactgaatgctggcgctgagatcaacagcagaaccggctccaaactcggaatttcccctctcatgctcgctgcaatgaacggtcacgtgccagcagttaaactccttttagacatggggtcagacatcaacgcccagatcgagactaaccgcaacacggcactgacccttgcctgtttccaggggagggctgaggtggtgtcgctattgcttgatagaaaggcgaatgtagaacatagggctaagacggggctcactccattgatggaagccgcctccggaggttatgctgaagtcggcagggtgcttcttgacaaaggtgctgatgtgaacgccccccctgtgccttcgagtagggatactgctctaacaatcgcagctgacaaaggccactacaagttctgtgaactcttaatccaccggggcgctcacatagacgtgcggaacaagaaaggcaacactccgctgtggctcgcttcaaatggcggccatttcgacgtcgtgcagctgctcgtccaagccggggcagacgtggatgccgccgacaaccgcaagatcactccactgatgagtgctttcagaaaagggcacgtcaaggtagtgcaatatctggtcaaggaggttaaccaatttcccagtgacattgaatgtatgaggtacatcgccaccataaccgacaaggagttattgaagaagtgccaccaatgcgtggagaccatcgtgaaagcaaaggaccagcaggccgcagaagcaaataagaatgcaagcattttactcaaagagctagaccttgagaagtccagagaagagtccaggaagcaggccttggccgctaagagagaaaaacgaaaggagaagagaaaggagaaacgcggtactgagaaggaaactgggcgccgatag

SEQ ID NO: 194798 - DNA, 7629 bp, Artificial Sequence
  derived and/or modified sequence
atgctgaccgacagcggcggcggcggcaccagcttcgaggaggaccttgactccgtggcccctaggtccgcccctgccggcgcgtccgagcccccacccccgggtggcgtcgggcttggcataaggaccgtgaggctctttggcgaggccggacctgcttctggtgtgggcagctccggcgggggaggttcaggatcgggaaccggcgggggagacgcagcactggacttcaaactcgccgccgccgtcctacgtaccggaggaggtggcggggccagcgggtccgacgaggatgaggtgtccgaggttgaatcattcattctggatcaagaggacctggataatcctgtgctcaaaactaccagcgagatatttctgtcctccacagcggagggtgccgatctgcgcacagtcgaccccgagactcaggcccgcctcgaagctctccttgaagccgccgggataggaaaactttctactgcagatggtaaagctttcgcagacccagaggtgctgcgccgtctgactagcagtgtgtcttgtgccctggatgaggccgccgctgccctgacaagaatgaaggccgagaactcccataatgctgggcaggtggatacacgaagcctagccgaggcttgttctgacggtgatgtcaatgccgttaggaaacttcttgacgaagggcgctctgtcaatgaacatacagaggagggcgaatctctcttgtgtctcgcctgctccgccggatactacgaacttgctcaggtgctgctagctatgcatgccaacgtggaggaccgcggaaacaagggcgacatcacccccctcatggccgcctctagcggcggatatttagatatcgtgaagctgctcctgctacacgacgccgatgtcaatagtcagtcagcaacaggtaacacagcattgacctacgcttgcgctggcggtttcgtggacatcgtaaaggtcctcctcaacgagggcgctaatatcgaggaccataatgagaatggccatacacccctgatggaagctgcaagtgcgggacatgttgaggtggcccgggtgcttcttgaccacggggccggcatcaatacacacagcaatgaattcaaagagtctgctctcacgctcgcgtgctataagggccacctggacatggtgcgatttctgcttgaggccggagcagatcaggagcataagacagatgaaatgcacacagccctgatggaggcctgtatggacgggcatgttgaggtcgcaagactgttgttggatagcggggctcaggtaaacatgcccgctgactcttttgagtcccccttgaccctagccgcttgtggtggtcacgttgaactcgctgccttgctcatcgagcggggcgctaacctggaagaagtgaatgacgaagggtacacacctctgatggaggcggctagggagggccacgaagaaatggtggctttgctgctggcgcaaggcgccaatataaacgcccagacggaagaaacgcaggagacagcattaacactggcatgttgtgggggtttttcagaggtggccgattttttgatcaaggccggcgctgatatcgagctcggatgttccacgcctctcatggaagcctctcaagagggacatctcgaactggtgaagtacctactggcctcaggagccaatgtacatgccactactgccacaggggatactgctctgacttacgcttgtgaaaacggacacaccgacgtcgcagatgtgctcctccaggccggggcagatctcgagcatgagtccgaggggggccgcacaccactcatgaaagctgcaagagccggacatctctgtaccgtccagtttcttatatctaaaggagcgaacgtcaaccgagccactgccaataatgatcacaccgtggtatccctcgcctgtgcaggtggccacctcgcagtggtcgagttgttattagcacatggcgctgaccctacgcatcggttaaaagatggcagcaccatgttgattgaagccgctaagggcggtcacacaaatgttgtctcctacttgctggattatccaaataacgtgctgtctgtgccaaccacagacgtgtcccagctgccaccccctagtcaggatcagtcccaagttcctcgggttcctacccatactctggccatggtggtgcctcctcaggaacctgaccgcacgagtcaagaaaactctcccgctctgctgggcgtccaaaaagggacgtccaagcagaagagctcttcccttcaagtggcggaccaggatctgctgccatcctttcacccatatcagcccttagaatgcatcgttgaggagaccgaaggcaaactgaacgagctgggtcagaggatatctgcaatcgagaaagcccagttaaaatccttggagctgattcagggcgaacctctgaacaaggataaaatcgaagaactgaaaaaaaacagggaagagcaggtgcagaagaagaaaaaaatcctcaaagagctccagaaagtggagcgtcagttgcagatgaaaactcaacagcaattcacaaaggagtacctggagacaaaaggccagaaagacaccgttagtctccatcagcagtgctcacataggggcgtgttcccagagggcgaaggcgacgggtctttgcctgaagaccacttttccgaactgcctcaggtcgatacaatactcttcaaggacaatgacgtggatgatgagcagcagtctccgccctctgctgagcagattgactttgtgcccgtccagccgctgtccagcccccagtgcaatttctcgtccgacctggggtccaacggaaccaatagtctcgaattgcagaaagtgagcggaaatcagcaaatcgtgggccagccacagatcgccatcacgggccacgatcaaggcctgctcgtgcaggagcctgacggcctcatggtggctacaccagcccagaccctcaccgatacactcgacgatctgattgccgcggttagcaccagagtgccgaccggctctaatagtagctctcagactacggagtgcctgacacctgagagctgctctcaaactacgtcaaatgtcgcctcccagtcaatgcctcccgtgtacccatcagtagacattgacgctcacacagagtcaaatcacgataccgccctcacactcgcttgtgccggaggacacgaagagctcgtttccgtcctgatagctcgagacgccaagatcgaacatcgcgacaagaaaggattcaccccgcttatcctggccgccacagcaggccacgtgggagtcgtggaaatccttttggataaggggggggatatcgaggcccagagtgaaaggactaaggacacccccctgagcttggcatgctcaggcgggcgtcaagaggttgtggacctgcttctggcccgcggggccaacaaggagcatcgcaatgtgtctgattatacgccactctcactagctgcaagtggcggctacgtgaatatcataaagattcttctgaacgccggagccgagatcaatagtcggacagggtctaagttagggatcagccccctcatgcttgcagccatgaacggacacgtaccagcggtcaaacttttgctcgacatggggtctgatattaacgcccagatcgaaaccaatcgcaacaccgcactgactctggcctgcttccagggacgcgctgaggtcgtatccctcctgttagataggaaggcaaacgtggaacacagagccaagactggactgacaccattgatggaggctgcgagtggcggatacgcagaggtggggcgggtcctgcttgacaagggagcggacgtgaacgcaccaccagttccgtccagccgcgacacggccctgacaatcgcagctgacaagggccactacaaattttgcgagctgcttattcatcgtggcgctcacatcgacgtgcgcaacaaaaagggaaacacaccattgtggttggctagcaatggagggcactttgacgtagttcagctgctggttcaagccggggcagatgtggatgcagctgataaccgcaaaatcacaccactgatgtcagcttttcgaaagggacacgtgaaggtggtccagtacctagtcaaggaggttaaccaattcccctccgacatcgagtgtatgagatacatcgccaccataactgataaagaactcctgaaaaaatgtcatcagtgcgtggagaccatcgttaaggccaaagatcagcaagctgctgaggccaacaagaacgcaagtattctgctcaaagagctggacctggagaagtctcgtgaggagagtcggaagcaggccttggccgctaagagagagaaacgcaaagaaaagcggaagaaaaaaaaggaagaacaaaaacgcaagcaggaagaggatgaagagaataagcctaaagagaacagcgaattgcctgaggatgaggatgaagaggaaaacgacgaggatgtggagcaagaggttccgatagaaccacccagcgccactactacaaccactatagggattagcgcaacaagcgccacttttactaatgtgtttggcaagaaaagggccaatgtggtcaccacgcctagtactaataggaaaaacaaaaagaataaaaccaaagaaactccccctaccgctcaccttattctgccggaacagcacatgagtctagcacagcagaaggcagacaagaataaaattaatggagagcccagaggagggggcgctggggggaatagtgacagcgataacctcgatagtaccgattgcaacagcgaatctagcagtggaggcaagtcacaagagctgaacttcgtaatggacgtcaactcctccaaatacccatccctgctgctgcattcccaggaggaaaagactagtacggcaactagtaaaacccagaccagactggagggggaggtgacccctaacagtttgtcaacctcctacaaaacagtcagccttcccctctctagtcccaacatcaaactgaacttgacgtccccaaaacgcgggcagaagagggaagagggctggaaggaagtcgtgcgtcggtccaagaaactttccgtgccagcctcagtcgttagccggattatgggacgggggggatgcaatattactgctattcaggatgttaccggcgcacacatcgacgtggacaagcagaaggataagaatggggagagaatgatcacaatccgtgggggcaccgaaagcacccggtacgccgtccagttgatcaatgccctgattcaggaccctgcaaaggagctggaagatctgattccaaaaaaccacatccgcacccccgcatcgactaagagtatacacgcaaacttctcttcaggcgtcggaacaacggctgccagttccaaaaacgccttcccccttggcgccccaactctggtgacatcccaggcaacaacccttagtaccttccagcctgccaataaactaaacaaaaatgttcccactaacgtccgatcctccttccctgtgtcactcccgctggcatacccccacccccacttcgcacttctggcagcgcaaactatgcagcagataaggcaccctaggctgcctatggcgcagttcggaggtacgttcagtccatctccaaatacctgggggccattccctgtgcgaccagtcaatcctggcaacaccaattctagccctaagcataataataccagcagattgcctaaccaaaacgggactgtcctgccctcagagtcggcaggcctcgccacagcatcgtgtccgattaccgtctcttctgtggttgccgcctcccagcagctctgcgttaccaatacaagaactccttcttccgtgaggaaacagctattcgcatgcgttcccaagacatcaccacctgccacggtcatcagctccgtgacctccacttgcagttccctgccatctgtctcatcggcgcccattacatctggccaggcaccaaccacctttcttcctgcgagcacttcacaggcccagctaagttctcagaaaatggaatcattcagcgctgtgcctcctacaaaggagaaggtgtccactcaggaccaacctatggctaacctttgtactccatcttccacagcaaattcttgctctagttcagcctcgaataccccaggagcacccgaaactcatccaagttcatcccctacacctacatccagcaacactcaggaagaggctcagccttccagtgtgagcgatctttctccgatgagcatgcccttcgcttccaatagcgagccagccccactcacccttacctcaccgcggatggtggccgccgataatcaagacacctctaacctgccccagctggccgttcccgctccaagagtgtcccaccgtatgcagccgcgcggcagtttctacagcatggtacctaatgccactatccaccaggacccacagagtattttcgtcactaatcctgtgaccctgactcctccgcaaggaccacctgcagccgtccagctatcctccgccgtgaacataatgaacgggagtcagatgcatatcaatcccgcaaacaagagtttgccgcctacattcggtcccgccactcttttcaatcacttttcaagcctattcgactctagtcaagtccctgctaatcagggctggggggacggccccctgtcatcccgggtagccacagacgccagtttcaccgttcagagcgcctttctaggaaacagcgtccttgggcacctcgaaaatatgcaccccgacaatagtaaggcgccagggttcaggcccccgtcccagagggtgtctacgagccctgtcggcctgccgagcatcgacccatcaggttctagtccttcaagtagctcagccccgctcgcctcatttagcggaattccaggtacaagagtgttcctgcaggggcctgcccccgtcgggacaccaagcttcaataggcagcatttttctccacatccgtggacttcagcctctaattccagcaccagcgctccaccaaccctgggccagcccaaaggcgtgagcgctagccaggacagaaaaatccccccacctattggaaccgagcgattggcacggatccgacagggaggatctgtcgcccaggcacctgccgggaccagtttcgtggctccggtgggacattctggaatttggtccttcggggtgaacgcagtgagtgagggattatccgggtggtctcagtctgtcatggggaaccatcctatgcatcagcagctgtcagaccctagcacattctctcagcatcagcccatggaacgagacgacagtggaatggtggcgccctctaacatattccatcaaccgatggctagcggttttgtcgatttttctaagggacttccaatcagtatgtatggggggacaattatcccatcccaccctcagctggccgacgtgcccggcggccccctgttcaacggactacacaatcccgaccccgcttggaacccaatgatcaaggttatccagaactctactgagtgtaccgatgcgcagcaaatctggcccgggacgtgggccccacacattggtaatatgcacctcaagtatgtcaattag

SEQ ID NO: 194799 - DNA, 4461 bp, Artificial Sequence
  derived and/or modified sequence
ccccgggtgggccggcaccggctgcggctgcgggtgcggaccatgttgacagacagcggagggggcggcaccagcttcgaagaggatttggactcagttgctccccgatccgccccagctggggccagtgagccccctccccccggtggggtaggcttaggcatcagaaccgtgcgcttgtttggcgaggctggtcccgcctccggtgtcggcagctccggaggtggaggaagcggctcggggaccgggggaggagatgcagctctcgactttaagctcgctgctgctgttctccgcactgggggcggggggggggcctccggtagtgacgaagacgaggtctcagaagttgaatcatttatcttggatcaggaagacctcgacaatccagtcctgaaaactacttccgagatcttcctaagctctaccgccgagggcgcagatttacggaccgttgaccccgaaacacaggcacgattagaggcacttctcgaggccgctgggatcggcaagctttccacagccgatgggaaagccttcgccgaccccgaggttctcagacggctgacctccagtgtgagttgcgctctggatgaagccgctgccgcactgactcggatgaaggccgaaaatagtcacaacgccggccaagtcgatactcggtcactggcagaggcctgcagtgacggcgacgtgaatgctgtcagaaagctgctcgacgaggggaggagcgtgaacgagcacactgaggaaggggaatcactgttgtgcctggcttgcagcgcaggatattacgagctggcacaagtcctgctggctatgcatgcaaacgtcgaagaccgtggaaataaaggagacatcacgcctttgatggccgctagcagtggtggctaccttgacatagtgaagttgttacttctccatgatgctgatgtgaactctcaaagtgctacgggaaatacggcgctcacatatgcttgtgctggaggatttgtcgacattgtgaaagtcctcctcaacgagggcgctaatattgaagaccacaacgagaacgggcacacgcctctcatggaggctgcctccgcaggccatgtggaagtggctcgcgtgttattggaccacggtgccgggatcaacacccattctaacgagtttaaggagagcgctctcacgctggcatgttataaggggcacttagatatggtacgattcctgttggaagccggggcagatcaggaacacaagaccgatgagatgcacaccgcactgatggaggcatgtatggatggacacgtcgaggttgctagattgctcctggactcgggggcacaagtaaacatgcccgcagattcatttgaatcgccgcttactctggctgcttgcggcggacatgtcgaactggccgccctccttatcgaaagaggggctaatttggaggaagtgaatgacgaagggtatacccctctgatggaggctgctagagagggtcatgaggaaatggtggctctgctgctcgcgcaaggggcgaacataaatgctcagactgaagagacccaagagactgctttgaccctggcttgttgtggcggcttcagcgaagtggcagatttccttatcaaggccggagccgatatcgagcttggctgctccaccccactgatggaggcatcccaagagggccacctggaactggttaaatacctgctagccagcggcgctaatgtgcacgcaactactgccactggcgatacagccctgacctacgcatgcgagaacggccacacggacgtagcagatgtgcttctgcaggcaggagccgatctggacaagcaggaagatatgaagaccattctggagggaatagatccagcgaagcaccaggagcacgagtctgagggcgggcgtaccccccttatgaaggccgctcgtgcagggcatttatgcacagttcagttccttatctccaagggcgcaaatgtgaaccgggctacagccaataatgaccacacagtggtctcactagcttgcgccggcggccacctggcagtggttgagctcttattggcacatggcgcagatcctactcacaggctgaaggatggcagtaccatgctgattgaagccgccaagggaggccataccaacgtggttagctacctgctcgattacccaaacaacgttctcagtgtgcccacaactgacgtgtcccagctgccccccccttcgcaggaccagagccaggtgccccgggtgcccacacacacgctggccatggtggtgccgccacaggagcccgacagaacaagtcaggagaactcgccagccctgctgggggtgcagaaaggtacgagtaagcagaaaagctcctcattacaggttgccgatcaagatctccttccaagcttccatccttatcaaccactggagtgcatcgtggaggaaactgagggcaagctgaacgaactgggtcagaggatttcggccatcgagaaggcacaacttaagagcctggagctcatacagggcgaacctttgaataaggacaaaatcgaggaactaaagaaaaacagggaggagcaggtccagaagaaaaaaaaaattctgaaggagttgcaaaaggtcgagagacagcttcagatgaagacccagcagcaatttacaaaagaatacctggaaaccaaggggcaaaaagacaccgtgtctcttcaccagcaatgctcccaccgcggagtctttccagagggggagggggacggcagcctgcctgaggatcactttagcgaactccctcaggtcgacacaatcttgtttaaggacaatgatgttgatgacgaacaacaatcccccccgtccgctgagcaaattgatttcgttcctgtgcagcccctctcctctccacagtgcaacttctcatcggacttgggaagcaatggcaccaatagtcttgagctgcagaaagtcagtggaaaccagcagattgtcggacagccccagattgccatcaccgggcatgaccagggtctgttagtacaggagcctgatggtctgatggtcgccacccctgcccagaccctgaccgatactctggacgatctcattgccgcggtcagtacacgagtccctactggaagcaacagctctagccaaaccacggagtgtcttacacccgagtcatgcagccagacgacaagcaatgtggcatcccagtcgatgccacctgtctacccaagtgtggatatcgacgctcacactgagagcaaccatgatactgccttgacgctggcatgtgctggaggacacgaagaactggtgtcagtgcttatagcaagagatgccaaaatcgaacatcgggataaaaagggcttcaccccccttatcctcgcggcgacggccggccatgtgggggttgttgagatcttgctcgataaaggcggcgatattgaggcccagagcgaacgtacgaaggatactcctctcagccttgcttgtagtggcggtcggcaggaagtggtggacttattgctcgctagaggagccaacaaagagcataggaatgtctcggactatacacccctctctctggcagcctccgggggttacgttaacattataaagatactcctcaatgccggcgcagagatcaattcacgaacaggtagcaaattagggatatcaccgctgatgttagccgccatgaatgggcacgtgcctgcggtgaagctgctgctagacatgggtagtgatataaacgcccagatagagaccaataggaacacagcactgactctggcctgctttcaaggccgcgcagaggtggtgagcctgctactggacagaaaagcaaatgtggagcaccgggccaaaaccggactgacccctctcatggaggctgcttctgggggatacgcagaggtagggcgcgttctgctggataagggcgcagatgtgaatgccccccccgtgccaagctctagggacacggcgctaacaatcgcggcggataaggggcactacaagttctgtgagcttctgatccatcggggggcgcatatcgacgtaagaaataaaaagggcaacacccctctttggctggcaagcaatggaggccacttcgacgttgtacaactgctggtgcaagcaggcgcggatgtcgatgcggccgacaatcggaagatcactcctctaatgagcgcgtttaggaaggggcatgtcaaagtagtccaatacctcgtgaaggaagtgaatcagttcccatccgacatagaatgcatgaggtatatcgcgacgattactgacaaagagttactcaaaaaatgtcaccagtgtgtcgagaccatcgtcaaagctaaggaccagcaagcagcagaggccaataagaatgccagcattctgctgaaagagctggacttggaaaaaagcagagaggagtcccgaaaacaggccctggcggccaaacgctag

SEQ ID NO: 194800 - DNA, 1863 bp, Artificial Sequence
  derived and/or modified sequence
atgagcctggcccagcagaaggccgacaagaacaagatcaacggcgagccccgtggcgggggggctggtggcaattctgactctgacaatttagattctacggactgcaactcagaatcaagctcgggcgggaaatcccaggagctgaacttcgtgatggatgtcaacagtagtaaatatccatcactgctgttgcactcacaggaggagaagacaagtactgctacttctaagactcaaactagacttgaaggcgaggtgacgcctaacagtttgagcaccagttataaaaccgtgtctctgccactgagttcacccaatatcaaactgaacctgacctcgcctaagcgcggccagaagagagaagaaggatggaaggaagtggtccggcgctcaaaaaagctgagtgtcccagcctccgtcgtgagtcggatcatgggaaggggagggtgcaacatcacggccatccaggatgttaccggagcgcacattgacgttgataaacagaaggataaaaatggcgaacgcatgatcaccattagaggcggaactgagagtacaaggtacgctgtgcaactgatcaatgctttgatacaggatccggcaaaagaactggaagacctgattccaaagaatcatatccgtacacctgcatccacgaaatccatccatgccaatttttcctcaggcgtgggtaccacagccgcctcttccaagaatgccttccctctgggggcacccaccttagtgacttcacaggctacgactctcagtaccttccagcctgccaacaaacttaacaagaacgtccccaccaatgtacgatccagtttccctgtctccttgccactcgcctaccctcaccctcatttcgccctcctggccgcccagacgatgcagcagatccgccacccccgtttgccaatggcccagttcggtggaacgtttagtccttcacctaacacatggggtcctttccctgttcggcccgttaacccaggaaacacaaacagttctcctaaacataacaacacttcccgacttccaaatcagaacggtacggtgttgccttcagagagtgctggactggctaccgctagttgccccattacagtgtccagtgtagtagcggcgagccagcagctgtgtgttacaaacaccaggaccccctcgagcgtcagaaaacagctgtttgcctgcgttcccaaaacttcacctcccgcgactgtgatcagcagtgtgacaagcacatgttcctctctgccaagcgttagctccgctccaattaccagcggacaggcacccaccacttttctccctgctagcactagtcaggctcagctcagttcccagaagatggaaagcttttccgcagttccccccacaaaagagaaagtctccacccaagaccagccaatggccaacttgtgtaccccttcctcaactgccaatagttgctcctcgtccgccagcaacacaccaggagcccccgaaacccatcccagctcctcccccaccccaacctcaagtaacacccaggaggaagcacagccatcatccgtatctgacttatctcctatgagcatgccatttgccagcaattccgagcccgcaccgcttactctcacctcccctcgaatggtggcagccgataaccaggacacttcgaatctaccccaattagccgtacccgcccctagggttagtcataggatgcagcctcggggaagcttttatagcatggtgccgaatgccaccatacatcaagacccgcagtcaatcttcgtcactaaccccgttacactttgggaagccgaagcctcaggactgcacgaggtgaggagccttcggcaggcatggtag

SEQ ID NO: 194801 - DNA, 2601 bp, Artificial Sequence
  derived and/or modified sequence
atggacgtgaacagcagcaagtaccccagcctgctgctgcacagccaggaggaaaagacctccaccgctaccagtaagacccagacacggctggaaggcgaggtgactcccaacagtctgagcacaagttacaagacagtcagtctgcccctatcatcaccaaacatcaagctaaacctgacttcaccaaaaagggggcagaagagagaggagggatggaaggaggttgtccgccgtagcaagaagctgagcgtcccagcgagcgtggtgtcgcgtattatgggtagaggagggtgcaatattactgctatccaagatgtgacaggggctcatatcgacgtggacaagcaaaaagacaagaatggcgaacggatgattacaattaggggagggaccgagtccacgaggtatgccgtgcaactgatcaatgctttgatccaagatccagctaaggaattagaggacttaatccctaagaaccacatccgcacccctgcctctactaaatctatccatgctaatttctcttctggcgtcggaaccactgccgcgtcctccaaaaatgccttccctctcggcgcacctacccttgtgacatcgcaggctacaaccctgagcaccttccagccggccaataagcttaacaagaacgtgccaacaaacgtccgctcctcttttcctgtcagcctgcccctggcctacccccaccctcacttcgcacttctggctgcccaaactatgcagcagattcggcacccacgtctgcccatggctcagtttgggggaactttcagccctagccccaacacgtggggcccgttccccgtgagaccagtcaaccccgggaacacaaactcatccccaaagcacaacaacactagcagactgcctaatcagaacgggactgtgcttccctctgaaagcgcaggcttagcaaccgccagttgccccatcaccgtcagctctgtggtcgcagccagccagcaactctgcgttactaatacccgtaccccatcaagcgtgcgaaagcaattatttgcgtgcgttcccaaaaccagcccccccgccacagtgatttcgtctgtaacctctacatgtagttctcttccatctgtctcttctgcacccatcacatccgggcaggccccaaccaccttcttgcctgcctcaaccagtcaggctcagctgtcttctcagaagatggagagcttctcagccgtgccacctactaaggaaaaagtcagcacacaagaccaaccgatggccaatctatgtactccttcctccaccgcgaactcttgttcatctagtgcctcgaacacccccggggcacccgagactcaccccagcagttccccaacccccaccagctctaacacacaggaggaggctcagccctccagtgtgagtgacctttcaccaatgtccatgccatttgcgtccaattccgagcctgcccctctcacactgacatcgccacggatggtggcagctgacaaccaggatacctctaatctgccacagttggctgtgcccgccccccgcgtgagccatcggatgcaacctcgtggcagcttctacagtatggtgccaaatgccacaattcatcaggacccacaatccatttttgttactaatcccgtgaccctcacccctcctcagggacccccggctgccgttcaactgtcctccgccgtcaacataatgaacggaagtcagatgcacattaatcccgctaacaagtccctcccacctactttcgggccagctacattgttcaatcatttcagcagcttgtttgatagttctcaggtccccgctaatcaaggatggggcgacgggccactgagctccagagtcgccacggatgcatccttcaccgtgcagagtgccttcctgggcaactctgtcctggggcaccttgagaacatgcaccctgacaactcgaaggcacccgggtttcggcctccaagtcagcgtgtttctacatcacctgtagcgaccagcgccccccccacactgggccaaccaaagggcgtgagcgccagccaagaccgtaagattccacctcctatagggaccgaaaggctggctagaattagacaaggaggctccgtagcccaggcccccgcagggacctcatttgttgcccccgtgggtcactccggaatctggagttttggagtaaatgccgtgtcagagggactgagcggatggtcccagagtgtaatgggcaatcatcctatgcaccaacagttgtctgatccttctaccttctcccagcaccaacccatggagcgcgacgactcaggaatggtggctccctctaacatttttcaccagcctatggcatcgggatttgttgattttagcaaaggcctccctatctctatgtatggcggaactatcattcccagccatccccagcttgctgatgtgcctggcggcccgctgtttaatggcctgcacaacccggaccctgcttggaaccccatgatcaaggtgatccagaactctacggaatgcacagatgcccagcagatatggcctggcacctgggcacctcacattggaaacatgcatctgaagtatgttaactag

SEQ ID NO: 194802 - DNA, 8374 bp, Artificial Sequence
  derived and/or modified sequence
agtggcgctgctgggacgggggaaaggagacgcttcttcctcttgctgctcttctcgttcccgagatcagcggcggcggtgaccgcgagtgggtcggcaccgtctccggctccgggtgcgaacaatgctgactgatagcggaggcggcggcacctcctttgaggaggacctggactctgtggctccgcgatccgccccagctggggcctcggagccgcctccgccgggaggggtcggtctggggatccgcaccgtgaggctctttggggaggccgggccagcgtcgggagtcggcagcagcggcggcggcggcagcggcagcggtacgggcggaggggacgcggcgctggatttcaagttggcggctgccgtgctgaggaccgggggtggaggtggtgcctctggcagtgacgaggacgaagtgtccgaggttgaatcatttattttggaccaagaagatctggataacccagtgcttaaaacaacatcagagatattcttatcaagtactgcagaaggagcagacttacgcactgtggatccagagacacaggcacgactagaagcattgctagaagcagcaggaattggcaaattgtcaactgctgatggtaaagcttttgcagatcctgaggtactccggagactgacatcctcagttagttgtgcactggatgaagctgctgctgcactgacacggatgaaagcagaaaacagccacaatgcaggacaagtggacactcgcagtctagcagaagcttgttcagatggggatgttaatgctgttcgtaaattgctagatgaaggcagaagtgtaaatgaacatacagaagaaggagaaagcctgctgtgtttggcttgttcagcagggtattatgaattagcacaagtattgcttgctatgcatgctaatgttgaagatcgagggaataaaggagacataactcccctgatggcagcttccagtggaggttacttagatattgtgaaattattacttcttcatgatgctgatgtcaactcccagtctgcaacaggaaacactgcgctaacttatgcatgtgctggaggatttgttgacattgttaaagtgctccttaatgaaggtgcaaatatagaagatcataatgaaaatggacatactcccttaatggaagcagccagtgcaggtcatgtggaagttgcaagagttcttttagatcatggtgcaggcatcaacactcattctaatgaattcaaagaaagtgctctaacacttgcttgctacaaaggccatttggatatggttcgctttctacttgaagctggtgcagatcaagagcacaaaacagatgagatgcacactgccttaatggaggcctgcatggatggacatgtagaggtggcacgtttgcttttggatagtggtgctcaagtgaacatgcctgcagattcatttgaatctccattgacgctagctgcctgtggaggacatgttgaattggcagctctacttattgaaaggggagcaaatcttgaagaagttaatgatgaaggatacactcccttgatggaagctgcccgggaaggacatgaagaaatggtggcactactcttagcacaaggagcaaatataaatgcccagacagaagaaactcaagaaactgctcttactttggcttgctgtggaggattttctgaagttgcagactttcttattaaggcaggggctgatatagaacttggctgctccacacctctgatggaggcatctcaggagggacacctggaattggttaaatatttgctggcttctggcgctaatgtgcatgctacaacagcaacaggagacacagccttaacctatgcttgtgaaaatggacatacggatgttgcagatgttttacttcaagcaggggctgatttagacaagcaggaggacatgaagactattttggagggcatagatccggccaagcatcaggaacatgaatctgaaggtggaagaacacctttgatgaaagctgcaagagctggtcatttgtgcactgtgcagtttcttattagcaaaggtgccaatgttaacagggctacagccaataatgatcatacagtagtgtcgctggcatgtgcaggaggccacctggcagttgttgagcttctcttggctcatggggctgaccctactcatcgactcaaggatggttcaacaatgctcattgaagctgcaaagggtggccatactaatgtagtttcttatctgttggattatccaaataatgttctgtcagttcccaccacagatgtgtctcagctccctccaccttctcaagatcagtctcaggtgccacgtgtgccaacgcatacacttgccatggttgtacctccccaggaacctgacagaacttcacaggagaactctcctgcccttttaggagtgcaaaaaggtacatccaagcagaagtccagttccctccaggtagcagatcaggacctactgccatcttttcacccataccagcctttggagtgcatagtagaggagactgaaggcaagctgaatgaactgggacaaagaattagtgctattgaaaaagcacagcttaagtcactggagttaattcaaggtgaacctctgaacaaagataagatagaagaacttaaaaagaacagagaagagcaagtccagaagaagaagaaaatattgaaagaactgcagaaagtggaaaggcagttgcagatgaaaacacagcagcaatttaccaaagaatacttggaaaccaaaggtcagaaagacacagtgtctctacaccaacagtgctctcatagaggagtcttcccagaaggggaaggagatggtagtctcccagaggatcacttttcagagttacctcaggttgacacaatcttatttaaagataatgatgttgatgatgagcaacagtctccaccatcggcagaacagattgattttgtcccagtccagcctttatcatctccacagtgtaacttttccagtgacttaggttctaatgggacaaattctcttgaacttcagaaagtatcaggtaatcagcagattgtaggacagcctcagattgctattactggacatgatcaggggctgttagttcaagaaccagatggactaatggttgcaactccagctcagacgcttaccgacactcttgatgacctgatagcagctgtgagtaccagagtgcccactggttccaacagttcttctcagaccacagagtgtcttacacctgaatcctgttcgcagactacaagcaatgtggcttcccaatcgatgcctcctgtgtatccttcagttgacattgatgcacatactgagagcaatcatgacacagcattaacactagcttgtgcaggtggtcatgaagaacttgtatctgtgctcattgcacgggatgccaaaattgaacacagagacaaaaaaggtttcacaccactaatcctggcagcaacagcagggcatgttggagttgttgaaatccttttggataaaggtggagatatagaagcacagtctgaacgaactaaggatactccgctttcattggcatgttctggtggacgtcaggaggtggtagacttgctgctggctcgaggtgcaaataaagaacataggaacgtatctgattatacaccactgagtctagctgcgtctggaggatatgttaatatcattaagattctgcttaatgctggggcagaaattaattcaaggactgggagtaaactaggtatttctcccctgatgttggctgcaatgaatggacatgttcctgcagtaaaattgctgctcgatatgggttcagacattaatgcccaaatagagaccaatcggaacacggctctcaccctggcctgtttccagggccgagcagaagtagtgagtttgcttctggaccgaaaagccaatgttgaacatagggcaaagacgggtcttacccccttgatggaagcagcttctggagggtatgcagaggttggaagagttcttcttgataaaggagcagatgttaatgctccccctgtgccttcctcaagagatactgctttaacaatagcagcagacaaaggtcactacaaattttgtgaactcctgattcataggggagcccacattgatgttcgtaacaaaaagggaaatacgccactttggctggcatccaatggaggtcattttgatgttgtgcagttgctagtgcaagcaggtgctgatgtggatgcagcagataaccggaaaatcacacctcttatgtcagcatttcgcaagggtcatgtaaaagttgttcaatatttggtaaaggaagtaaatcagttcccttctgatatagaatgcatgagatacatagcaacaattacagataaggaactgttgaaaaaatgtcatcaatgtgtcgaaaccattgtgaaggctaaagaccagcaagctgcagaagcaaataagaatgcgagtattcttttaaaggaacttgatctggaaaagtcaagagaagagagcagaaagcaggctcttgctgctaaaagagaaaaaagaaaagaaaagagaaaagaaaaaagaggaacagaaaaggaaacaggaagaagatgaagaaaacaaacctaaggagaattcggaactaccagaggatgaagatgaagaggagaatgatgaagatgtggagcaagaagttcccatagaacctcctagtgcaaccaccaccactacgattggaatctctgcaacatctgcaacattcacaaatgtgtttgggaaaaaaagggccaatgtggtgacaactcccagcaccaatcggaaaaataagaagaacaaaacaaaagaaacccctcctacagcacatttaattttaccagaacaacatatgtctttagcccaacaaaaggcagataaaaataaaataaatggagaacctagaggtggtggtgcaggtgggaatagtgattcagataacttggacagcacagactgcaacagtgagagtagcagtggtggtaaaagccaagagttaaattttgtgatggatgtgaattcctctaaatacccctcactgctccttcattcccaagaagaaaagacaagtactgctacttccaaaactcagacacgacttgaaggtgaagtgactcctaattccttgtcaaccagctacaagacagtgtcattgccattaagctctccaaacataaagctgaatctcactagccctaaaaggggtcagaaaagagaagaagggtggaaagaagttgtacgaaggtcaaagaaattgtctgttccagcctcagtggtgtcgaggataatgggaagaggaggatgcaacatcactgcaatacaggatgttactggtgcccatattgatgtggataaacaaaaagataagaatggcgagagaatgatcacaataaggggtggcacagaatcaacaagatatgcagttcaactaatcaatgcactcattcaagatcctgctaaggaactggaagacttgattcctaaaaatcatatcagaacacctgccagcaccaaatcaattcatgctaacttctcatctggagtaggtaccacagcagcttccagtaaaaatgcatttcctttgggtgctccaactcttgtaacttcacaggcaacaacgttatctacgttccagcccgctaataaacttaataagaatgttccaacaaatgtacgttcttctttcccagtttctctacccttagcttatcctcaccctcattttgccctgctggctgctcaaactatgcaacagattcggcatcctcgcttacccatggcccagtttggaggaaccttctcaccttctcctaacacatggggaccattcccagtgagacctgtgaatcctggcaacacaaatagctctccaaagcataataacacaagccgtctacctaaccagaacgggactgttttaccctcagagtctgctggactagctactgccagttgtcctatcactgtctcttctgtagttgctgccagtcagcaactgtgtgtcactaatacccggactccttcatcagtcagaaagcagttgtttgcctgtgtgcctaagacaagtcctccagcaacagtgatttcttctgtgacaagcacttgtagttccctgccttctgtctcctctgcacctatcactagcgggcaagctcccaccacatttctacctgcaagtacttctcaagcacagctttcttcacaaaagatggagtctttctctgctgtgccacccaccaaagagaaagtgtccacacaggaccagcccatggcaaacctatgtaccccatcttcaactgcaaacagttgcagtagctctgccagcaacaccccgggagctccagaaactcacccatccagtagtcccactcctacttccagtaacacacaagaggaggcacagccatccagtgtgtctgatttaagtcctatgtcaatgccttttgcatctaactcagaacctgctccattgactttgacatcacccagaatggttgctgctgataatcaggacaccagtaatttacctcagttagctgtaccagcacctcgagtttctcatcgaatgcagcccagaggttctttttactccatggtaccaaatgcaactattcaccaggatccccagtctatttttgttacgaatccagttactttaacaccacctcaaggcccaccagctgcagtgcagctttcttcagctgtgaacattatgaatggttctcagatgcacataaacccagcaaataagtctttgccacctacatttggcccagccacacttttcaatcacttcagcagtctttttgatagtagtcaggtgccagctaaccagggctggggagatggtccactgtcctcacgagttgctacagatgcctctttcactgttcagtcagcgttcctgggtaactcagtgcttggacacttggaaaacatgcaccctgataactcaaaggcacctggcttcagaccaccttcccagcgagtttctactagtccagttgggttaccatccattgacccatcaggcagctccccatcttcctcttctgctcctctggcaagtttttccggcataccaggaacaagggttttcctgcaagggccagctcctgttgggactcctagtttcaacagacaacatttttctccccatccttggacaagcgcctcaaactcatccacttctgccccaccaacgttgggccaaccaaaaggagtcagtgccagtcaagatcgaaagatacctcccccaattggaacagagagactggcccgaattcggcaaggagggtctgttgcacaagccccggcggggaccagttttgtcgctcccgttggacacagtggaatctggtcatttggtgtcaatgctgtgtcagaaggcttatcaggttggtcgcaatctgtgatggggaaccatccaatgcatcaacaattatcagacccaagcacattctcccaacatcagccaatggagagagatgattctggaatggtagccccctctaacatttttcatcagcctatggcaagtggttttgtggatttttctaaaggtctgccaatttccatgtatggaggcaccataataccctctcatcctcagcttgctgatgttccaggaggccctctgtttaatggacttcacaatccagatcctgcttggaaccctatgataaaagttatccaaaattcaactgaatgcactgatgcccagcaggccagtctgcttccttcagtccctgctctcaaaggggaaatcccatcacctcagctaaccagaccgaagaagagaattggacggccgatggtggcctctcctaaccagaggcaccaggatcatctacgaccgaaagttcctgctggagtgcaagaactcacccattgcccggacacccccctgctgcctccctcagattcccggggtcacaactcctccaacagcccctctctccaagctggaggagctgaaggagcaggagacagaggaagagatacccgatgacgcacaatttgaaatggacatctaatccagtgcagatgacctggcatgtggagttacagagggatccctcatgccactgctgccaccacctcttcctggggcatccaaaggccagctggcctcatctaatctggaagggagtgacttgttagttccaggcctcctttagttctgaggcagctagaccagggataggagtgggcaacttgccaagcccttaactctacttcctcttcagtctgtggtactcctcctaaccctaaaccctctatgctcaggggctggaactggggaatggagtaagtcaccttctgactgcttagtaaacattcaaagaaatg

SEQ ID NO: 194803 - DNA, 8221 bp, Artificial Sequence
  derived and/or modified sequence
gggaggcagcaggttaggcagtgagaagttagtggcgctgctgggacgggggaaaggagacgcttcttcctcttgctgctcttctcgttcccgagatcagcggcggcggtgaccgcgagtgggtcggcaccgtctccggctccgggtgcgaacaatgctgactgatagcggaggcggcggcacctcctttgaggaggacctggactctgtggctccgcgatccgccccagctggggcctcggagccgcctccgccgggaggggtcggtctggggatccgcaccgtgaggctctttggggaggccgggccagcgtcgggagtcggcagcagcggcggcggcggcagcggcagcggtacgggcggaggggacgcggcgctggatttcaagttggcggctgccgtgctgaggaccgggggtggaggtggtgcctctggcagtgacgaggacgaagtgtccgaggttgaatcatttattttggaccaagaagatctggataacccagtgcttaaaacaacatcagagatattcttatcaagtactgcagaaggagcagacttacgcactgtggatccagagacacaggcacgactagaagcattgctagaagcagcaggaattggcaaattgtcaactgctgatggtaaagcttttgcagatcctgaggtactccggagactgacatcctcagttagttgtgcactggatgaagctgctgctgcactgacacggatgaaagcagaaaacagccacaatgcaggacaagtggacactcgcagtctagcagaagcttgttcagatggggatgttaatgctgttcgtaaattgctagatgaaggcagaagtgtaaatgaacatacagaagaaggagaaagcctgctgtgtttggcttgttcagcagggtattatgaattagcacaagtattgcttgctatgcatgctaatgttgaagatcgagggaataaaggagacataactcccctgatggcagcttccagtggaggttacttagatattgtgaaattattacttcttcatgatgctgatgtcaactcccagtctgcaacaggaaacactgcgctaacttatgcatgtgctggaggatttgttgacattgttaaagtgctccttaatgaaggtgcaaatatagaagatcataatgaaaatggacatactcccttaatggaagcagccagtgcaggtcatgtggaagttgcaagagttcttttagatcatggtgcaggcatcaacactcattctaatgaattcaaagaaagtgctctaacacttgcttgctacaaaggccatttggatatggttcgctttctacttgaagctggtgcagatcaagagcacaaaacagatgagatgcacactgccttaatggaggcctgcatggatggacatgtagaggtggcacgtttgcttttggatagtggtgctcaagtgaacatgcctgcagattcatttgaatctccattgacgctagctgcctgtggaggacatgttgaattggcagctctacttattgaaaggggagcaaatcttgaagaagttaatgatgaaggatacactcccttgatggaagctgcccgggaaggacatgaagaaatggtggcactactcttagcacaaggagcaaatataaatgcccagacagaagaaactcaagaaactgctcttactttggcttgctgtggaggattttctgaagttgcagactttcttattaaggcaggggctgatatagaacttggctgctccacacctctgatggaggcatctcaggagggacacctggaattggttaaatatttgctggcttctggcgctaatgtgcatgctacaacagcaacaggagacacagccttaacctatgcttgtgaaaatggacatacggatgttgcagatgttttacttcaagcaggggctgatttagaacatgaatctgaaggtggaagaacacctttgatgaaagctgcaagagctggtcatttgtgcactgtgcagtttcttattagcaaaggtgccaatgttaacagggctacagccaataatgatcatacagtagtgtcgctggcatgtgcaggaggccacctggcagttgttgagcttctcttggctcatggggctgaccctactcatcgactcaaggatggttcaacaatgctcattgaagctgcaaagggtggccatactaatgtagtttcttatctgttggattatccaaataatgttctgtcagttcccaccacagatgtgtctcagctccctccaccttctcaagatcagtctcaggtgccacgtgtgccaacgcatacacttgccatggttgtacctccccaggaacctgacagaacttcacaggagaactctcctgcccttttaggagtgcaaaaaggtacatccaagcagaagtccagttccctccaggtagcagatcaggacctactgccatcttttcacccataccagcctttggagtgcatagtagaggagactgaaggcaagctgaatgaactgggacaaagaattagtgctattgaaaaagcacagcttaagtcactggagttaattcaaggtgaacctctgaacaaagataagatagaagaacttaaaaagaacagagaagagcaagtccagaagaagaagaaaatattgaaagaactgcagaaagtggaaaggcagttgcagatgaaaacacagcagcaatttaccaaagaatacttggaaaccaaaggtcagaaagacacagtgtctctacaccaacagtgctctcatagaggagtcttcccagaaggggaaggagatggtagtctcccagaggatcacttttcagagttacctcaggttgacacaatcttatttaaagataatgatgttgatgatgagcaacagtctccaccatcggcagaacagattgattttgtcccagtccagcctttatcatctccacagtgtaacttttccagtgacttaggttctaatgggacaaattctcttgaacttcagaaagtatcaggtaatcagcagattgtaggacagcctcagattgctattactggacatgatcaggggctgttagttcaagaaccagatggactaatggttgcaactccagctcagacgcttaccgacactcttgatgacctgatagcagctgtgagtaccagagtgcccactggttccaacagttcttctcagaccacagagtgtcttacacctgaatcctgttcgcagactacaagcaatgtggcttcccaatcgatgcctcctgtgtatccttcagttgacattgatgcacatactgagagcaatcatgacacagcattaacactagcttgtgcaggtggtcatgaagaacttgtatctgtgctcattgcacgggatgccaaaattgaacacagagacaaaaaaggtttcacaccactaatcctggcagcaacagcagggcatgttggagttgttgaaatccttttggataaaggtggagatatagaagcacagtctgaacgaactaaggatactccgctttcattggcatgttctggtggacgtcaggaggtggtagacttgctgctggctcgaggtgcaaataaagaacataggaacgtatctgattatacaccactgagtctagctgcgtctggaggatatgttaatatcattaagattctgcttaatgctggggcagaaattaattcaaggactgggagtaaactaggtatttctcccctgatgttggctgcaatgaatggacatgttcctgcagtaaaattgctgctcgatatgggttcagacattaatgcccaaatagagaccaatcggaacacggctctcaccctggcctgtttccagggccgagcagaagtagtgagtttgcttctggaccgaaaagccaatgttgaacatagggcaaagacgggtcttacccccttgatggaagcagcttctggagggtatgcagaggttggaagagttcttcttgataaaggagcagatgttaatgctccccctgtgccttcctcaagagatactgctttaacaatagcagcagacaaaggtcactacaaattttgtgaactcctgattcataggggagcccacattgatgttcgtaacaaaaagggaaatacgccactttggctggcatccaatggaggtcattttgatgttgtgcagttgctagtgcaagcaggtgctgatgtggatgcagcagataaccggaaaatcacacctcttatgtcagcatttcgcaagggtcatgtaaaagttgttcaatatttggtaaaggaagtaaatcagttcccttctgatatagaatgcatgagatacatagcaacaattacagataaggaactgttgaaaaaatgtcatcaatgtgtcgaaaccattgtgaaggctaaagaccagcaagctgcagaagcaaataagaatgcgagtattcttttaaaggaacttgatctggaaaagtcaagagaagagagcagaaagcaggctcttgctgctaaaagagaaaaaagaaaagaaaagagaaaaaagaaaaaagaggaacagaaaaggaaacaggaagaagatgaagaaaacaaacctaaggagaattcggaactaccagaggatgaagatgaagaggagaatgatgaagatgtggagcaagaagttcccatagaacctcctagtgcaaccaccaccactacgattggaatctctgcaacatctgcaacattcacaaatgtgtttgggaaaaaaagggccaatgtggtgacaactcccagcaccaatcggaaaaataagaagaacaaaacaaaagaaacccctcctacagcacatttaattttaccagaacaacatatgtctttagcccaacaaaaggcagataaaaataaaataaatggagaacctagaggtggtggtgcaggtgggaatagtgattcagataacttggacagcacagactgcaacagtgagagtagcagtggtggtaaaagccaagagttaaattttgtgatggatgtgaattcctctaaatacccctcactgctccttcattcccaagaagaaaagacaagtactgctacttccaaaactcagacacgacttgaaggtgaagtgactcctaattccttgtcaaccagctacaagacagtgtcattgccattaagctctccaaacataaagctgaatctcactagccctaaaaggggtcagaaaagagaagaagggtggaaagaagttgtacgaaggtcaaagaaattgtctgttccagcctcagtggtgtcgaggataatgggaagaggaggatgcaacatcactgcaatacaggatgttactggtgcccatattgatgtggataaacaaaaagataagaatggcgagagaatgatcacaataaggggtggcacagaatcaacaagatatgcagttcaactaatcaatgcactcattcaagatcctgctaaggaactggaagacttgattcctaaaaatcatatcagaacacctgccagcaccaaatcaattcatgctaacttctcatctggagtaggtaccacagcagcttccagtaaaaatgcatttcctttgggtgctccaactcttgtaacttcacaggcaacaacgttatctacgttccagcccgctaataaacttaataagaatgttccaacaaatgtacgttcttctttcccagtttctctacccttagcttatcctcaccctcattttgccctgctggctgctcaaactatgcaacagattcggcatcctcgcttacccatggcccagtttggaggaaccttctcaccttctcctaacacatggggaccattcccagtgagacctgtgaatcctggcaacacaaatagctctccaaagcataataacacaagccgtctacctaaccagaacgggactgttttaccctcagagtctgctggactagctactgccagttgtcctatcactgtctcttctgtagttgctgccagtcagcaactgtgtgtcactaatacccggactccttcatcagtcagaaagcagttgtttgcctgtgtgcctaagacaagtcctccagcaacagtgatttcttctgtgacaagcacttgtagttccctgccttctgtctcctctgcacctatcactagcgggcaagctcccaccacatttctacctgcaagtacttctcaagcacagctttcttcacaaaagatggagtctttctctgctgtgccacccaccaaagagaaagtgtccacacaggaccagcccatggcaaacctatgtaccccatcttcaactgcaaacagttgcagtagctctgccagcaacaccccgggagctccagaaactcacccatccagtagtcccactcctacttccagtaacacacaagaggaggcacagccatccagtgtgtctgatttaagtcctatgtcaatgccttttgcatctaactcagaacctgctccattgactttgacatcacccagaatggttgctgctgataatcaggacaccagtaatttacctcagttagctgtaccagcacctcgagtttctcatcgaatgcagcccagaggttctttttactccatggtaccaaatgcaactattcaccaggatccccagtctatttttgttacgaatccagttactttaacaccacctcaaggcccaccagctgcagtgcagctttcttcagctgtgaacattatgaatggttctcagatgcacataaacccagcaaataagtctttgccacctacatttggcccagccacacttttcaatcacttcagcagtctttttgatagtagtcaggtgccagctaaccagggctggggagatggtccactgtcctcacgagttgctacagatgcctctttcactgttcagtcagcgttcctgggtaactcagtgcttggacacttggaaaacatgcaccctgataactcaaaggcacctggcttcagaccaccttcccagcgagtttctactagtccagttgggttaccatccattgacccatcaggcagctccccatcttcctcttctgctcctctggcaagtttttccggcataccaggaacaagggttttcctgcaagggccagctcctgttgggactcctagtttcaacagacaacatttttctccccatccttggacaagcgcctcaaactcatccacttctgccccaccaacgttgggccaaccaaaaggagtcagtgccagtcaagatcgaaagatacctcccccaattggaacagagagactggcccgaattcggcaaggagggtctgttgcacaagccccggcggggaccagttttgtcgctcccgttggacacagtggaatctggtcatttggtgtcaatgctgtgtcagaaggcttatcaggttggtcgcaatctgtgatggggaaccatccaatgcatcaacaattatcagacccaagcacattctcccaacatcagccaatggagagagatgattctggaatggtagccccctctaacatttttcatcagcctatggcaagtggttttgtggatttttctaaaggtctgccaatttccatgtatggaggcaccataataccctctcatcctcagcttgctgatgttccaggaggccctctgtttaatggacttcacaatccagatcctgcttggaaccctatgataaaagttatccaaaattcaactgaatgcactgatgcccagcagatttggcctggcacgtgggcacctcatattggaaacatgcatctcaaatatgtcaactaagttagaaggtctttactctttagccttgtttaagaaacctatgaccttggaagaaccatggggatttttttttaatgtgcctaagaaattttctctgaggctttagcaatggaaatttgattgcccattgtataagaacaaattgatttcctatccacctgattatgttctctggttagtttagccattttgaacttaagatcatatgaccttagtgcttttggctaaacatacagaatactacttgtatgcagaagagaattagttgattacatgtttcaaccttttagggtgataaatacatgtataattgtttacatacttaaaaggaaaaagttgagtaaatttcttgtcatatagtggctctacgtaatgtagcctgtattaatgtgaaatatttaccagaatattcaataaaaagatgaacagtctttagaa

SEQ ID NO: 194804 - DNA, 2387 bp, Artificial Sequence
  derived and/or modified sequence
atgtgtcgaaaccattgtgaaggctaaagaccagcaagctgcagaagcaaataagaatgcgagtattcttttaaaggaacttgatctggaaaagtcaagagaagagagcagaaagcaggctcttgctgctaaaagagaaaaaagaaaagaaaagagaaaaaagaaaaaagaggaacagaaaaggaaacaggaagaagatgaagaaaacaaacctaaggagaattcggaactaccagaggatgaagatgaagaggagaatgatgaagatgtggagcaagaagttcccatagaacctcctagtgcaaccaccaccactacgattggaatctctgcaacatctgcaacattcacaaatgtgtttgggaaaaaaagggccaatgtggtgacaactcccagcaccaatcggaaaaataagaagaacaaaacaaaagaaacccctcctacagcacatttaattttaccagaacaacatatgtctttagcccaacaaaaggcagataaaaataaaataaatggagaacctagaggtggtggtgcaggtgggaatagtgattcagataacttggacagcacagactgcaacagtgagagtagcagtggtggtaaaagccaagagttaaattttgtgatggatgtgaattcctctaaatacccctcactgctccttcattcccaagaagaaaagacaagtactgctacttccaaaactcagacacgacttgaaggtgaagtgactcctaattccttgtcaaccagctacaagacagtgtcattgccattaagctctccaaacataaagctgaatctcactagccctaaaaggggtcagaaaagagaagaagggtggaaagaagttgtacgaaggtcaaagaaattgtctgttccagcctcagtggtgtcgaggataatgggaagaggaggatgcaacatcactgcaatacaggatgttactggtgcccatattgatgtggataaacaaaaagataagaatggcgagagaatgatcacaataaggggtggcacagaatcaacaagatatgcagttcaactaatcaatgcactcattcaagatcctgctaaggaactggaagacttgattcctaaaaatcatatcagaacacctgccagcaccaaatcaattcatgctaacttctcatctggagtaggtaccacagcagcttccagtaaaaatgcatttcctttgggtgctccaactcttgtaacttcacaggcaacaacgttatctacgttccagcccgctaataaacttaataagaatgttccaacaaatgtacgttcttctttcccagtttctctacccttagcttatcctcaccctcattttgccctgctggctgctcaaactatgcaacagattcggcatcctcgcttacccatggcccagtttggaggaaccttctcaccttctcctaacacatggggaccattcccagtgagacctgtgaatcctggcaacacaaatagctctccaaagcataataacacaagccgtctacctaaccagaacgggactgttttaccctcagagtctgctggactagctactgccagttgtcctatcactgtctcttctgtagttgctgccagtcagcaactgtgtgtcactaatacccggactccttcatcagtcagaaagcagttgtttgcctgtgtgcctaagacaagtcctccagcaacagtgatttcttctgtgacaagcacttgtagttccctgccttctgtctcctctgcacctatcactagcgggcaagctcccaccacatttctacctgcaagtacttctcaagcacagctttcttcacaaaagatggagtctttctctgctgtgccacccaccaaagagaaagtgtccacacaggaccagcccatggcaaacctatgtaccccatcttcaactgcaaacagttgcagtagctctgccagcaacaccccgggagctccagaaactcacccatccagtagtcccactcctacttccagtaacacacaagaggaggcacagccatccagtgtgtctgatttaagtcctatgtcaatgccttttgcatctaactcagaacctgctccattgactttgacatcacccagaatggttgctgctgataatcaggacaccagtaatttacctcagttagctgtaccagcacctcgagtttctcatcgaatgcagcccagaggttctttttactccatggtaccaaatgcaactattcaccaggatccccagtctatttttgttacgaatccagttacactttgggaagctgaggcgagtggtttacatgaggtcaggagtttgagacaagcctggccaacatggtgaaactccatctctactaaaaatataaaaaatagccaggcatgat

SEQ ID NO: 194805 - DNA, 3234 bp, Artificial Sequence
  derived and/or modified sequence
aaaagaaacccctcctacagcacatttaattttaccagaacaacatatgtctttagcccaacaaaaggcagataaaaataaaataaatggagaacctagaggtggtggtgcaggtgggaatagtgattcagataacttggacagcacagactgcaacagtgagagtagcagtggtggtaaaagccaagagttaaattttgtgatggatgtgaattcctctaaatacccctcactgctccttcattcccaagaagaaaagacaagtactgctacttccaaaactcagacacgacttgaaggtgaagtgactcctaattccttgtcaaccagctacaagacagtgtcattgccattaagctctccaaacataaagctgaatctcactagccctaaaaggggtcagaaaagagaagaagggtggaaagaagttgtacgaaggtcaaagaaattgtctgttccagcctcagtggtgtcgaggataatgggaagaggaggatgcaacatcactgcaatacaggatgttactggtgcccatattgatgtggataaacaaaaagataagaatggcgagagaatgatcacaataaggggtggcacagaatcaacaagatatgcagttcaactaatcaatgcactcattcaagatcctgctaaggaactggaagacttgattcctaaaaatcatatcagaacacctgccagcaccaaatcaattcatgctaacttctcatctggagtaggtaccacagcagcttccagtaaaaatgcatttcctttgggtgctccaactcttgtaacttcacaggcaacaacgttatctacgttccagcccgctaataaacttaataagaatgttccaacaaatgtacgttcttctttcccagtttctctacccttagcttatcctcaccctcattttgccctgctggctgctcaaactatgcaacagattcggcatcctcgcttacccatggcccagtttggaggaaccttctcaccttctcctaacacatggggaccattcccagtgagacctgtgaatcctggcaacacaaatagctctccaaagcataataacacaagccgtctacctaaccagaacgggactgttttaccctcagagtctgctggactagctactgccagttgtcctatcactgtctcttctgtagttgctgccagtcagcaactgtgtgtcactaatacccggactccttcatcagtcagaaagcagttgtttgcctgtgtgcctaagacaagtcctccagcaacagtgatttcttctgtgacaagcacttgtagttccctgccttctgtctcctctgcacctatcactagcgggcaagctcccaccacatttctacctgcaagtacttctcaagcacagctttcttcacaaaagatggagtctttctctgctgtgccacccaccaaagagaaagtgtccacacaggaccagcccatggcaaacctatgtaccccatcttcaactgcaaacagttgcagtagctctgccagcaacaccccgggagctccagaaactcacccatccagtagtcccactcctacttccagtaacacacaagaggaggcacagccatccagtgtgtctgatttaagtcctatgtcaatgccttttgcatctaactcagaacctgctccattgactttgacatcacccagaatggttgctgctgataatcaggacaccagtaatttacctcagttagctgtaccagcacctcgagtttctcatcgaatgcagcccagaggttctttttactccatggtaccaaatgcaactattcaccaggatccccagtctatttttgttacgaatccagttactttaacaccacctcaaggcccaccagctgcagtgcagctttcttcagctgtgaacattatgaatggttctcagatgcacataaacccagcaaataagtctttgccacctacatttggcccagccacacttttcaatcacttcagcagtctttttgatagtagtcaggtgccagctaaccagggctggggagatggtccactgtcctcacgagttgctacagatgcctctttcactgttcagtcagcgttcctgggtaactcagtgcttggacacttggaaaacatgcaccctgataactcaaaggcacctggcttcagaccaccttcccagcgagtttctactagtccagttgccacttctgccccaccaacgttgggccaaccaaaaggagtcagtgccagtcaagatcgaaagatacctcccccaattggaacagagagactggcccgaattcggcaaggagggtctgttgcacaagccccggcggggaccagttttgtcgctcccgttggacacagtggaatctggtcatttggtgtcaatgctgtgtcagaaggcttatcaggttggtcgcaatctgtgatggggaaccatccaatgcatcaacaattatcagacccaagcacattctcccaacatcagccaatggagagagatgattctggaatggtagccccctctaacatttttcatcagcctatggcaagtggttttgtggatttttctaaaggtctgccaatttccatgtatggaggcaccataataccctctcatcctcagcttgctgatgttccaggaggccctctgtttaatggacttcacaatccagatcctgcttggaaccctatgataaaagttatccaaaattcaactgaatgcactgatgcccagcagatttggcctggcacgtgggcacctcatattggaaacatgcatctcaaatatgtcaactaagttagaaggtctttactctttagccttgtttaagaaacctatgaccttggaagaaccatggggatttttttttaatgtgcctaagaaattttctctgaggctttagcaatggaaatttgattgcccattgtataagaacaaattgatttcctatccacctgattatgttctctggttagtttagccattttgaacttaagatcatatgaccttagtgcttttggctaaacatacagaatactacttgtatgcagaagagaattagttgattacatgtttcaaccttttagggtgataaatacatgtataattgtttacatacttaaaaggaaaaagttgagtaaatttcttgtcatatagtggctctacgtaatgtagcctgtattaatgtgaaatatttaccagaatattcaataaaaagatgaacagtc

SEQ ID NO: 194806 - DNA, 7623 bp, Artificial Sequence
  derived and/or modified sequence
atgctgactgactccggcggaggaggcacatccttcgaggaggacttggactctgtagctcctcgaagcgctcccgcaggcgctagtgagcctcctccaccaggcggagtcggcttgggtattagaacggtgagactgtttggcgaggcaggccctgcctcgggagtgggctcatccggcggaggtggttccgggtctggaaccggagggggagacgccgctctcgatttcaagctggcagccgcagtgctgaggaccggtggaggcggaggcgcttcaggttccgacgaggacgaggtgagcgaagtagaatcatttatcctggaccaggaagacctggataacccagtccttaagacaacctccgagatttttctttcttctacagccgagggcgctgatctgagaaccgtggaccccgagacacaggcacggctggaggcactgctggaggccgcaggcattggcaaactgagtacagccgatgggaaggcattcgctgatcccgaagtgttgcgcaggctcacctctagtgttagctgtgctctggacgaagccgctgctgcccttacccgcatgaaagccgaaaatagccataacgccggtcaggtggatacaaggagcttggccgaggcttgctctgatggcgatgtcaatgctgttcggaagctgttggacgagggccgatccgtcaacgagcatacggaggaaggggaatcccttctgtgcctagcttgcagcgcaggctactatgagctggcccaggtgctgttggctatgcatgccaatgtagaggaccggggaaacaagggagacataacccctctaatggccgcaagctccggcggttacctcgatattgtgaagttgctgttactccacgatgccgatgtaaactcacaaagcgccaccgggaacaccgctctgacgtatgcttgcgccggaggctttgttgatatcgtgaaggtcttactgaacgagggcgcaaatatcgaagaccataacgagaatggacacacacccctgatggaggcagcaagtgccggacacgttgaagtggcccgtgttctcttggaccatggtgcaggtattaacacccactctaacgagttcaaagagtcagcactgacactggcttgttacaaagggcatctcgatatggtcagattcctgctggaagccggagccgaccaagaacataagacagatgagatgcatacagcgcttatggaggcttgcatggatggtcacgtggaggttgccaggctgctgctggattctggggctcaggtcaacatgcccgcagatagctttgagagtcctctgactttggcagcatgcggcggacatgtggaactcgccgctttgctgatcgaaaggggagcaaacctagaggaagtcaacgatgagggatatacaccactaatggaagctgctagagaggggcacgaagagatggtcgctctgctgttagctcagggcgcaaatatcaatgcccagacagaagagacgcaggaaaccgccctcaccttagcttgttgtggcggtttttctgaggttgccgattttctcatcaaggcaggtgcggacatagagctaggttgttccacgcccctgatggaggccagccaggagggccaccttgagctagtgaaatacttattggcatccggagccaacgtacacgctactaccgcgacaggcgatacagctctgacctatgcgtgtgagaatggccatacggacgtagcggatgtcctcctgcaagcgggtgctgatcttgagcacgagtcagagggaggcaggactcctttgatgaaagccgcaagagccggacacctgtgcactgtccagttcctgatttctaagggcgctaacgtgaaccgcgcaaccgccaataatgaccacaccgtagtgtcactggcctgtgcgggtggacacttggcagtcgtcgagctgcttctcgcccatggggctgatcctacccacagattaaaggacggcagtaccatgctgatagaggcggcaaaggggggacataccaacgtcgtatcttacctgctggactatcccaataacgtgctgtccgttccaacaaccgatgtgagccagcttccacccccatcacaggaccagtcccaggtgcctagagtgcccacacatactcttgccatggtggtgccaccacaggagcccgaccggacctctcaggaaaactctccagctctgctcggcgtgcaaaaagggacgagcaaacaaaagtccagcagcctccaggtggccgaccaggacctactgccaagcttccatccataccaaccgctggagtgcattgtggaagagaccgagggtaaattaaatgagttgggccagagaatctctgcaatcgagaaagcccagctgaaaagccttgagctgatccaaggagagccccttaacaaagataaaattgaagagttaaagaaaaaccgcgaagaacaggtgcagaagaagaaaaaaatactgaaggagctccagaaggtcgaaagacaactccagatgaagacacagcaacaattcaccaaggagtacctggaaactaaaggccagaaggatacggtgtcacttcaccagcagtgcagtcatcgcggtgtcttcccagaaggtgaaggagacggatccctccctgaagaccattttagcgaactcccacaagtcgacaccattttattcaaggacaatgatgtcgatgacgaacagcagagtccccctagtgccgaacagattgatttcgttccagtccagccgctttcctcaccccaatgcaatttcagtagcgatctgggcagtaacgggaccaactcactggagttacagaaggtgagcggcaatcagcagatcgtgggccagccccagatagctatcacaggccatgaccagggtttgcttgttcaggagccagatggccttatggtcgcgactcccgctcagacacttaccgatactctagacgatctgattgcagctgtttctactcgcgtgcccaccggaagtaatagcagtagccagacgacggagtgccttacacctgaaagctgctcacagaccacttcgaatgtggctagccagagcatgccgcctgtgtacccatctgttgatattgacgcccacactgaatccaaccatgacacagcattaacgctggcttgcgccggaggccatgaggagctcgtgtcggtgctaatagctcgagatgctaaaattgagcatcgtgacaaaaagggctttaccccgcttatcttggcggctactgctgggcacgtgggcgtggttgaaatcctgctcgacaaggggggagacattgaggcacagagcgagagaacaaaggacaccccactgagcttggcctgctccgggggtcggcaggaggtagtggatttattgctggcacggggagctaacaaagagcaccggaacgtaagcgactacacccctctcagtttggccgcatcaggcggatatgttaatattattaagattctcctaaacgcaggggcagaaatcaattctcggactgggtcgaagctcgggattagtccccttatgctagcggctatgaacggacacgtacccgcagtcaagctgctgctggatatgggttcagatatcaatgcccagatcgagactaatcgtaataccgccttgacactcgcctgtttccagggtcgtgcagaagttgtttccctgcttctcgaccgcaaggcgaatgttgagcaccgggctaagacaggactgactcccctgatggaggccgcttctggaggctacgcggaggtgggaagagtgctactggacaaaggggcagacgtcaatgcccctccagtgccctccagccgagacacggcactcaccatcgctgcagataagggacactacaagttctgcgagctgctgatccatcggggagcccacatcgatgtgcgcaacaaaaaaggaaatacccccctgtggctagcaagtaacggcggacacttcgatgtcgtgcaacttctcgtccaggccggtgctgatgttgatgcggcagataatcgcaaaattacacccctcatgtccgctttccggaaagggcatgtcaaggtcgttcaatatctcgtgaaagaagtgaatcagtttccaagtgacatcgagtgcatgcgctatattgcaaccattacggacaaggaactgttgaaaaagtgtcatcagtgtgtggaaaccattgttaaggcaaaagaccagcaggccgcagaagctaataagaatgcttcaattctgctgaaggagctggacttggagaaatcccgggaggagtcaagaaagcaggcattggctgctaaacgggaaaaaaggaaagagaaacgcaagaagaagaaggaagaacagaagcgtaagcaggaggaggatgaggagaacaaaccaaaggaaaactcagaactccccgaggacgaggatgaggaggaaaacgatgaggacgtggagcaggaagtcccgatcgaaccacccagcgccactactaccacaaccattggaatcagcgctacctcagccactttcacaaacgtttttggaaagaagagagccaatgtggtgaccacacctagtactaacaggaagaacaagaagaataaaactaaagagacgccaccaactgcccatctgatactgcccgagcagcacatgtctctggcccagcagaaggccgacaagaacaagataaacggtgaaccacgcggtggcggtgcaggcggtaatagcgacagcgacaatttagattccactgactgcaactcagagagctcctcaggcggaaaaagtcaagaactgaattttgtcatggacgtgaatagctccaagtatcctagtcttcttctgcatagtcaggaggaaaagacatccactgctactagtaaaacccaaacccgactggaaggagaggtgacacccaacagccttagtacctcgtataaaaccgtatctctgccactgagctccccaaatataaaactcaaccttacctccccaaagcggggacagaagagagaggaaggatggaaagaggtggtgcggagaagtaagaaactgtctgttccagcctccgtcgtgagccggattatggggcgtggcggttgtaacattaccgctattcaggatgtgactggcgcacacatcgacgtggacaaacagaaagacaaaaacggggaacggatgatcactatccgcggaggaactgaaagcacccgctacgccgtgcagctgattaacgctctgattcaggatccagcaaaagagctcgaggatctcataccaaaaaaccacattcggacgcccgcaagcacgaaatctatccacgccaattttagctctggagtcgggaccacagccgcatccagcaagaacgcgttcccactaggtgcgcctaccttagtaacttcgcaggctacaaccctgagcacatttcagccggctaataagttgaacaagaacgtgcctacgaatgtccgttcctctttcccagtgagcctgccattagcataccctcaccctcacttcgctttactcgcagctcagactatgcagcagatccggcaccctaggctcccaatggcccagttcggcggaacgttttcgcctagtcctaatacctggggcccttttcctgttaggcctgtgaacccgggaaatacaaatagtagtccaaagcataataatacttcaagactgccaaatcagaatggaactgtcctgccttcggaatccgcaggtctggcgaccgccagctgccctattaccgtgtcaagtgtggttgccgctagtcagcaactttgtgtgacaaataccagaacccctagttccgtgcgtaagcaactgttcgcctgcgttcctaaaacctcccccccagccaccgtgattagttcagtcacctcaacatgctcctccctgcctagtgtaagcagtgctcctattacttctggtcaggcgcctaccacgtttttgccggcatctacgtcccaggcccaactctcctctcagaaaatggaatcattctctgccgtgcctcccaccaaggaaaaggttagtacccaggatcagcctatggcaaatctgtgcactcccagttctacggccaatagttgcagctcttcagctagtaatactccaggtgcacctgagacccacccgagcagtagtccaacccccacttcatccaatacacaggaggaggcccagcctagtagcgtatctgacttatctccgatgagcatgccatttgcctccaatagcgaacccgctccccttactctgacatcccccagaatggttgctgctgataatcaagatacctctaacctgcctcagctggctgtgccagctcccagagtgtcccataggatgcagcctcgcggtagcttttattctatggtcccgaacgcaacaatccatcaagaccctcagtccattttcgtgaccaatccggtgaccctcaccccgccacagggaccccctgcagcagttcagctctcttctgcagtgaacattatgaacggctcccagatgcacattaatccggctaataaaagtttaccacctacatttggcccagccacccttttcaaccatttcagctcactttttgatagtagccaagtgcctgcaaaccagggatggggcgatggccctttgtcatcccgggtggccaccgacgcatcttttacagtgcagtcggcctttctggggaacagtgtgttaggccacttggaaaacatgcatccagataactctaaggccccaggttttagacctcctagccagcgagtgtcgacgagccctgttggtctaccatctatcgacccttctggaagcagcccttcctccagctctgccccactcgcatctttctctggaattccaggaacccgggtcttcttacaggggccagccccagtaggaacgcccagctttaataggcagcacttctctcctcatccttggacatccgcttctaattcctgtgatagccctattccctctgtgagcagcggatccagttccccacttagcgctactagcgcccctcctactctgggtcagcccaagggagtgtccgcatctcaggacaggaagatcccgcctccaattggcacggagcgactggccagaattagacagggaggctctgtcgctcaggccccagccggtactagtttcgtggcgcctgttggacactctggcatctggtcattcggggtgaatgctgtgtcagagggactttccggctggagtcagtctgtgatggggaatcatccaatgcatcaacagctctccgatccctcaacattttctcaacaccagcccatggagagagatgacagcggcatggtggccccttctaacattttccaccagcccatggcttccggattcgtggatttctcaaaggggctgccaatttcaatgtacggcggaaccattatcccttcacacccgcaactggccgatgtcccaggtggccctcttttcaatggattgcacaaccctgatcctgcttggaatcccatgatcaaagttattcagaactcaacagaatgcaccgacgctcagcagtaa

SEQ ID NO: 194807 - DNA, 3024 bp, Artificial Sequence
  derived and/or modified sequence
atggtggctcttcttctcgcgcagggagccaacataaatgcccaaactgaggaaactcaagagaccgctttgactctggcttgttgtgggggattttcagaagtggccgatttcctcatcaaagcaggggctgatattgaactcggctgctctactcctttgatggaggcctcacaagaggggcatctggagctagtcaagtatttgctcgctagtggagccaatgtgcacgccacgactgctaccggagatacagcactgacctacgcctgcgaaaatgggcatacagacgtcgcagatgtgctcctccaggccggtgccgacctcgataagcaggaggacatgaaaactattctcgagggcatcgacccagcaaagcaccaagagcatgaaagcgaggggggtcgcactccactaatgaaggcagcaagggccggacacctttgtaccgtgcaattcctcatctcaaaaggggcaaacgtaaatcgggctaccgcaaacaatgatcacaccgttgtgagcctcgcctgcgccggagggcaccttgccgtagtggaattactgcttgctcacggcgctgaccccactcaccgactaaaggatgggtctactatgcttatagaagccgcaaaggggggtcatactaatgttgtgagttacctcctagactaccctaataatgtgcttagcgttccaactacagatgtgagtcagctgccccctccatcccaggatcagtctcaggtgccccgtgtacccacccatactttagccatggtggtcccccctcaggaacctgaccgtacaagtcaggagaactcacccgctttgctaggagtgcagaaggggacttccaagcagaagtcctcaagtctccaagtggccgatcaggatctcctacccagctttcacccttaccagcccctggaatgcatcgttgaggagactgaaggtaaactgaacgagctgggacagagaatctctgctattgaaaaagcccagctcaagtccctagagctgatacagggcgagcccctgaataaggacaagatcgaagagttgaaaaagaacagagaagagcaggtccagaaaaaaaaaaaaatactgaaagaactgcagaaggtagagcggcaactccagatgaaaactcagcagcaatttacaaaagagtacctggaaacaaagggtcagaaggacaccgtgtccctacaccagcagtgtagccataggggggtttttcctgagggtgagggcgacggatcactgcccgaagaccatttttctgagctcccccaggtcgatactattctttttaaggacaacgatgtagatgacgagcagcaatctcctcccagtgcagagcaaattgacttcgtgccagttcagcccctgtcctcaccacaatgcaatttttctagtgacctcgggtcgaacggaacaaactccctggagctgcagaaggtttcgggcaaccagcaaatcgttggccaacctcagattgccattacaggtcatgatcagggcttgctcgttcaggagcccgatgggttaatggtcgcaacaccagcacagaccctcacagacacactggacgatttgatcgccgcagtaagcactagagtgcccaccggttccaatagcagttcccaaacaactgagtgcctgacccctgaaagttgctcccagacaacatcaaacgttgcatctcagtcaatgccgccagtgtacccatctgttgatatagacgcccacacagaatctaaccacgataccgcactgactctggcgtgtgccggaggccacgaagaactggtatccgtgttaattgccagagatgccaaaatcgaacaccgcgataaaaagggctttactccactcatactcgctgctaccgctggacacgtcggggttgtagaaattctgctggacaaaggtggagacattgaggctcagtcagagcgcaccaaggatacccctctgtctctagcatgttccggcggtcgacaggaggtggttgacctcttgctggctcgcggagctaataaggagcaccgtaatgtttctgactatacgccactctccttagccgcttctggagggtatgtgaacatcatcaaaatcctgctgaatgccggagcagaaatcaatagtagaacggggagcaaactggggatcagcccgctgatgttggccgctatgaacggccatgtcccagcggtcaagttgttgctggatatgggctccgacattaacgcgcaaatcgaaaccaataggaatactgctctgacgctggcctgctttcaggggagggccgaggtggtatcattgctgctcgaccgcaaagccaacgtagagcatagggcgaaaactggattaaccccactgatggaggcagcctcaggcggatacgcagaggtcggacgcgtgttactcgataaaggcgctgacgtgaatgctccacccgtcccctcgtccagagacactgccttgactatagcagccgacaaaggccattacaagttctgcgagctcttgattcatcgcggtgcgcacatcgatgtacgcaataaaaagggcaatacccccctatggctagctagtaatggaggtcactttgacgtagtgcagctgcttgtacaagccggtgcagacgtggacgccgctgataatcgtaaaattaccccccttatgtctgcattccggaaaggccatgtgaaggttgtacaatacctcgtcaaggaggtcaaccaatttccctcggacatcgagtgtatgcgctatattgccacaataactgacaaagaactcctcaagaaatgccaccaatgcgtcgagaccatcgtcaaggccaaagatcagcaagccgctgaagcaaataagaacgcttctatcctgcttaaagaacttgacctcgagaagtctcgcgaagagagccgaaaacaagcactagcagccaagagagagaaacggaaggagaagaggaaggagaagcgtgggacagagaaggagacagggagacgctag

SEQ ID NO: 194808 - DNA, 7628 bp, Artificial Sequence
  derived and/or modified sequence
atgctgacggattcaggcggaggcggaacctcattcgaagaagacctggattcggtggccccaagaagcgctcccgcaggagcctctgaaccacctcctcccggtggagtgggtctcggcatccggacagtgagactttttggggaggccggtcccgcttccggagtagggtcttctgggggtggcggtagcgggtcaggaacaggaggaggagacgcggcactagactttaaactggcggctgccgttctgcggactggcggaggcggtggggcttcaggaagcgacgaagatgaagtgagtgaagtagaaagcttcatactcgaccaggaggacctcgataatcctgtgctcaaaacaaccagtgaaatcttcctctcgtctacagctgagggcgctgacttacgtactgtcgaccctgaaacccaggccagactcgaagccctactcgaggctgctggcatcgggaaactgtccaccgccgatggcaaggcttttgctgacccagaagtactccgccgtctgacaagctctgtcagttgcgcactcgatgaagctgcagctgccctgacccgcatgaaggcagaaaactctcacaacgctggccaagttgatacacggagtcttgctgaagcctgttcagacggcgacgtgaatgccgtgaggaagttattagatgaagggaggagtgtaaacgaacacacggaggaaggtgagagcctgctctgtctggcatgtagcgcaggatactatgagttagctcaagtccttctcgcaatgcatgccaatgtcgaggatcgagggaacaaaggcgacataacccctctgatggctgcctcaagcggcggttatttggatattgtaaaactactcctgcttcacgatgctgatgtgaactcccaatccgcgacaggaaacaccgccttgacctacgcctgtgctgggggtttcgttgacatagttaaggtactgttgaatgagggcgctaatatcgaagatcacaatgagaatgggcacacaccacttatggaggccgcatccgccggacatgttgaagtagccagggtacttctagaccacggagctggcattaacacccattctaatgagttcaaggaatctgccctgacccttgcctgctataagggacatctggatatggtcaggtttctgttggaggctggcgctgaccaggaacacaagactgatgaaatgcatacggcactgatggaagcctgcatggatggccacgttgaagtggccagattgttgctggactcaggggctcaggtgaacatgcccgctgatagctttgaaagcccattaaccctcgccgcatgcggaggtcacgtagaactagccgctttgttaattgagcggggtgccaatcttgaggaagtgaatgacgagggctacaccccactgatggaggccgctcgcgaagggcacgaagagatggtggccctgctcctggcgcaaggagccaatatcaacgctcagacagaagagacccaggaaactgccctgaccctcgcctgctgtggaggtttttcagaggttgccgacttcttaattaaagccggagccgacattgagcttggctgctctacaccgttgatggaagcttctcaggagggccacctcgaactggtcaagtacttgctggccagtggagccaatgttcacgccactaccgccacaggagacacagccctcacctatgcctgcgaaaacggacacactgacgtagctgatgtgctactacaggccggagccgacctggagcacgaaagtgagggcggacgcacaccgctgatgaaggccgctagagctggtcacctttgcaccgtccaattcctgatatcgaagggagcaaatgtgaaccgggctaccgctaacaatgatcacaccgtagtctcgctggcctgtgccggtggccacctcgccgtagtcgagctgttgttagcgcacggcgctgatcctacccatcggctgaaggacggctctaccatgctgatcgaggctgctaagggaggtcacacaaacgtggtctcttacctgctcgactaccccaacaacgtactttctgtgcccacaacagatgtatcccaactacccccaccaagtcaggaccaaagtcaagttcccagggtccccacccacacccttgctatggtcgtgccaccacaggagcctgatcgcacctctcaggagaattcgcctgccttactgggagtgcagaagggaacaagcaagcaaaagtcttcatccctccaagtggccgatcaggaccttctgccatctttccacccatatcaacccctcgaatgcatagttgaggagacagaagggaagctgaatgagctcgggcagagaataagcgccattgagaaagcacaactgaagagcttggaactgatccagggggagccacttaacaaagataaaatcgaagaattgaaaaaaaacagggaggagcaggtccagaaaaaaaagaagattttaaaagagttgcagaaagtcgaacgtcaattacagatgaaaacacaacagcaattcacgaaagagtacctcgagaccaagggccaaaaggacacagtatcgctgcaccagcagtgttcccacaggggagtgtttcccgagggagagggggatggaagtctcccagaagatcacttttccgagctgccacaggtcgacactatcctgttcaaggacaacgatgtggacgatgagcagcaatcacctccaagtgccgaacagattgatttcgtacccgtgcaaccactgtcgtcaccgcagtgtaatttctccagcgacctcggctccaacggtaccaacagtctggagctgcagaaggtctcaggtaatcagcagatcgtaggacagccacaaatcgccatcacaggacatgaccaggggttgcttgtccaggagcctgacgggttaatggtggcgaccccagcccagacactgaccgacactctggatgatctgatagccgcagtatcaacaagggtgcctactggaagcaatagtagctcacagactacggagtgtctgaccccagagtcctgctcacaaacaacctccaatgtggcatctcagtctatgccacctgtgtatccgagtgtggacatcgacgctcacacagagagtaaccatgatactgccctgactcttgcctgcgccggagggcacgaagagctggtctccgtcctcattgcacgggatgcaaagatcgagcaccgcgataaaaagggttttacacctctgatactggctgccaccgcgggtcacgtgggggtggttgaaattctgctggacaagggaggagacattgaggctcaaagcgagcgcacaaaggacacgccattatcccttgcgtgctcagggggtcgacaggaggtcgtggacttactccttgccagaggcgctaataaagaacacaggaacgtgtcagactacactccactgagcttggccgcatctggcggatacgtgaatatcattaaaatcctgttgaatgcgggagctgagattaattcacggactggcagcaagctcggcatctcccccctcatgctggcagctatgaacgggcacgtccctgccgtcaagctgctgctcgatatgggctctgatatcaatgcacaaatcgagaccaaccgtaatacggcccttactcttgcttgttttcaaggaagggcagaggtggtctcccttcttctcgaccgcaaagcaaacgtggagcatagagcaaagactggcctgactcctctcatggaggccgcttctggtggatacgccgaagtgggaagagtgctcctggacaagggcgctgatgtgaatgccccacctgtcccatcgtccagagataccgcactgactatcgccgcagataaaggtcactataagttctgtgagctgttaatacaccgtggagcacacatagatgtccgcaacaaaaagggcaacactcccctgtggctcgcctccaatggtggccatttcgacgtagtgcaattacttgtacaggctggagccgacgttgacgctgccgacaaccgaaagatcacgccacttatgagtgcttttaggaaagggcacgtcaaggtggtccaatacctcgtgaaagaagtgaaccaattcccatcggacattgagtgcatgcggtacatcgctacgataaccgataaggagctcttgaagaaatgtcatcagtgtgtggaaactattgtaaaagctaaagaccagcaggctgccgaggccaataagaatgcgagtatactgctgaaagaacttgatctggaaaagtctcgcgaagagagtaggaagcaagccctagctgctaagagggagaagcgaaaggagaagcgtaagaaaaagaaagaagaacagaagagaaagcaggaagaggacgaagagaataagccaaaggagaacagcgagctgcctgaggatgaggatgaggaggagaatgatgaggacgtagagcaagaagttcctatcgagccaccatcagctacaactactaccacaatcggtatttctgccaccagcgccactttcaccaacgtgttcgggaaaaaaagggcaaacgtcgtgacaaccccttctaccaaccggaagaacaagaagaacaaaactaaggaaacacccccaacagcccacctgatattgccagaacagcatatgagtctggcccagcaaaaggccgacaagaacaagatcaacggggagcctcgtggaggcggagcgggtggaaatagtgatagcgataatctggactctacagactgcaactccgagtcttcttccggcggtaagagccaggaactgaattttgttatggacgtcaatagcagtaaatacccctccctcttgctgcattcccaagaggaaaagacttcaacggctacctctaagacccagacacgacttgaaggcgaggttaccccaaattccttgagcacctcatataagaccgtctccctacctctctcgtcaccaaacatcaaattgaacctgacctcaccaaagcggggacagaagcgcgaggaagggtggaaggaggtcgtccgccgtagtaaaaagctatccgttccagccagcgttgtctctcgaataatgggaagaggaggatgcaatatcaccgcaattcaagatgtgactggggctcatattgacgttgataagcaaaaggataaaaacggagaacgaatgatcacaattcgcggaggtacagagtccacaaggtacgctgtgcagctaattaacgctctcatccaggacccagccaaggaactggaagacctgatcccgaagaaccacattagaacgcccgctagcactaaatccattcatgcaaatttctccagtggggtagggacaacagctgcctccagcaaaaatgcctttcccctaggtgctccgactttagtgacaagtcaggccacgaccctgtcaacattccagccagcaaataaactcaataagaatgtccccacaaatgtccggagctcctttcccgtatctctacccctggcctatcctcatcctcacttcgcgctcctggcggcacaaaccatgcagcaaattcgacatcctcggttgccgatggcgcaatttggcggaactttttcacctagtcccaatacgtggggccctttccccgtgaggccagtgaaccccggaaatacaaacagttctcctaagcataacaacacttctaggctcccgaaccagaacggcaccgtgctcccgtccgagagcgccggtctggccaccgctagctgtccgatcacggtctccagcgtggtagcggcatcacaacagctgtgcgtaactaacacccggaccccctcttctgtgagaaaacagctgtttgcttgtgtccctaaaacttctcctccagctacagtgataagcagtgtgacctctacctgctccagtctcccttctgtcagcagcgcccctatcactagcggtcaggctccgacaacattccttcccgcaagtacttctcaggcacagctttctagccagaagatggaatcattcagtgctgtgcctcccacgaaggaaaaagtcagcactcaagaccagcctatggccaacctgtgcactccatcctccaccgccaattcctgttcctcgtcggcgtctaatactcccggagcccctgagacccatccgtcatcaagccccacgcccaccagttccaatacacaggaggaggctcagccttcttcagtgtcagacctcagccctatgagcatgccattcgcctctaattcagaaccggcacctttaacgctcacatcccccagaatggtagcagccgataaccaggatacgtctaatcttcctcagcttgctgtgcccgctcctcgagttagtcaccgaatgcaacctcggggttctttttattccatggtaccgaatgcaacaatccaccaagatccccagtccatcttcgtgacaaaccctgtcactctgacccctccccagggcccacctgccgctgtgcagctcagttctgctgtgaacattatgaacgggtcgcaaatgcacatcaatccggctaataaatccctccctccaacctttggtcccgctactttgttcaaccacttttcatccctgttcgactcatctcaagtgcccgctaatcagggctggggggatggcccactctcttcgcgtgtggcgactgatgcctccttcaccgtgcagagcgccttcctgggcaattccgttctgggtcatctcgagaacatgcatcccgacaatagtaaagctcccggttttagacctccttcacagagagtgtctacctcaccagtcggtctgcccagcattgacccatctggttctagccccagcagctccagtgctccacttgcatcattttcaggtatccccggaactcgcgtattcctccagggacccgctccagtcggaacgccaagttttaaccgccagcacttctctccccacccttggacttccgcgtccaattcatcaacttcagctcctccaaccctgggacaacctaagggggtcagcgctagtcaggatagaaagattccccctcctataggaaccgaaaggctcgctagaatcaggcaggggggaagtgtggcccaggcccctgcaggcacatcctttgtggctcctgtcgggcactcaggtatttggtccttcggcgtcaacgcggtctccgagggattatccggctggtctcaaagcgtaatggggaatcaccctatgcaccagcagctgagcgacccttccaccttctcccagcatcagccaatggaaagagatgatagtggaatggtcgctccttccaatatatttcaccagcctatggcttcagggtttgtggactttagtaaggggctgcctattagtatgtacggcggaactattatccccagccacccccagttggccgatgtccctggcggtccactgttcaatggactgcataaccccgatcccgcatggaaccctatgataaaagtgatacagaactccacagaatgtacggacgctcaacaaatctggccaggcacgtgggctccacatattggcaacatgcacttaaagtatgtgaacta

SEQ ID NO: 194809 - DNA, 4461 bp, Artificial Sequence
  derived and/or modified sequence
cccagggtgggcaggcacaggcttcggctaagggtcagaacaatgctgacagattcagggggagggggaacctcattcgaggaggaccttgactccgtcgccccaagatccgctcctgcgggtgcaagtgagcctcctccgcctggtggagttgggctgggaatacgtacagtcagattgttcggagaggctggtccagcttctggggtgggcagctccggcggaggaggctcagggtcagggacagggggaggcgacgctgccctggatttcaagctggccgctgccgtgctaaggactgggggaggtgggggagccagcggcagcgatgaagatgaagtgagcgaggtggagtctttcatactcgatcaagaagacctcgataaccccgttctgaagaccacttcagaaatctttctcagctcaaccgctgagggcgctgatttgcggacagtggatcctgagacgcaagctcgcttggaggcattactggaggcggcaggcattggcaagctgtcaacagcagacggaaaagccttcgctgaccctgaggttctcagacgtttgacctctagcgtgtcgtgtgctttggacgaggctgccgctgcactgacccgcatgaaagcagagaattcccataacgctggccaggtggatactcgctccctcgccgaggcttgctcagacggcgatgtgaacgctgttcggaaactcctcgacgagggccgtagcgtcaacgagcatacagaggaaggcgagtcattgctgtgccttgcttgttctgcgggatattacgaactggcccaggttctgctggcaatgcatgctaatgtggaggatagaggtaacaagggcgacatcacgcccctgatggctgcaagttcaggaggttatcttgacattgttaagctgctgcttctgcacgatgcagatgtgaactctcaatcagccaccggtaacactgcacttacgtatgcgtgtgccggaggcttcgtggatattgtgaaggttttactgaacgaaggcgcaaatattgaggatcacaatgagaacgggcatacccccctaatggaggccgcttctgcaggacacgtcgaggtggctcgagtgctcctggaccacggtgcgggtataaacactcatagcaatgagttcaaagagagtgcactgacactggcctgctacaagggccatctggatatggtgagatttttgctggaagctggcgctgatcaggagcataagaccgatgagatgcatacagccctgatggaagcttgcatggacggacacgtggaggtggcacgacttcttttggacagtggggctcaggtgaatatgcccgcagactctttcgaaagtccactcaccctcgcggcatgcgggggtcatgttgaattggccgctctgctgatcgagcgcggtgctaacctggaggaagtcaacgatgagggctacactccgctcatggaagctgccagagaaggccacgaagaaatggtggctcttctcctcgcacaaggggctaacattaacgcacagaccgaggaaacccaggaaacagccctgaccctggcttgctgcggcggtttttcagaggtagcagattttttgataaaagctggtgcagatatcgaactcggctgctcgacaccccttatggaggcatcccaggaaggacatctggaactggtgaagtacctgctcgctagcggcgctaacgtgcatgccacaacggccacaggggacaccgctctgacctacgcttgcgagaatggccatacagatgtagctgatgtgctgctgcaagcaggcgctgatttggataagcaggaggacatgaaaactattttggaaggaatagacccggctaaacaccaggaacacgagtcagaaggcggtcgaacccctttaatgaaagcagcacgtgctggtcacctctgcacagtacagttccttattagcaagggcgcaaacgtgaacagggcaacagccaacaatgatcacactgtagtctccctggcatgcgcagggggacatctcgcagttgtggagcttttactggctcatggcgcagatccgacacacaggttaaaggacggctcaaccatgttgattgaggctgccaaggggggacacacaaatgtcgtctcatatcttctcgactacccgaacaacgtgctctccgttccaaccacagatgtttcacagctgcccccaccaagccaggaccaaagtcaggtgccgagggtccccacgcataccttggcaatggtcgtgccccctcaggaaccagataggacaagtcaggagaacagtcccgctttgctcggcgtgcagaagggcacttcaaagcagaagtcaagcagtctacaggtggcagatcaagacctacttccctctttccacccatatcagccattggaatgcatcgtcgaagagaccgaaggaaaacttaatgaattgggccagcggatcagtgcaatagagaaggctcagctaaagagcctcgagctaattcagggagagccacttaataaagacaagatagaggaattgaaaaagaatcgagaagaacaggtgcagaagaagaagaaaatcctgaaagagctacagaaggtggagcgtcagcttcaaatgaagactcagcaacagtttacaaaagaatacctggaaaccaagggccagaaggatacggtgtctctccaccagcagtgtagtcacagaggtgtatttccagagggagaaggagatggatctttgccagaggatcactttagcgagttaccacaggtggacactattttgttcaaggacaatgacgtggatgatgagcaacagagcccgccatcggctgaacagatagatttcgtgccagtgcagccactgagttcgccccagtgcaacttttcaagtgatctagggtccaatggtaccaactctctggagttacagaaggttagcggaaatcagcagattgtagggcagcctcaaatcgcaattacaggacacgatcaaggactgctagtgcaggaaccagacgggctcatggtcgctacacccgcacagaccctgacggacactctggatgacctgatcgcagcagtttcaacgagagtaccaacaggatcaaacagctcatcccaaaccacagagtgcctgacgccagagagctgctcacagaccacaagcaatgtggcttcccaaagcatgcccccagtgtacccttccgtggacatagacgcacatacagagtccaatcacgacaccgccctaactctggcgtgcgccggagggcacgaagagcttgtgagcgtgctcatcgccagggacgctaaaatcgagcaccgggataagaagggatttactcccctcatcctcgctgccactgccggacacgtcggcgtggtggagatcctgctggataagggaggcgacatcgaggcccagagcgaacggaccaaggacaccccactgtctctggcctgtagcggtggccgtcaagaggtggtggaccttctgttggcgcgaggggctaacaaagagcaccgcaacgtttcggactatacacctttgtctctggcagcatccgggggttacgttaatattattaagatactgttgaatgccggagccgagatcaattcgcgcactggaagtaaactcgggatttcaccgctgatgctggcggctatgaatgggcacgtcccagccgtaaaactcttgctcgatatgggatccgatataaacgcccagattgaaaccaaccgcaacaccgccctcaccctggcttgtttccaggggagagccgaagtggtgagcctcctgcttgacagaaaagctaatgttgagcatcgtgccaaaaccgggcttacacctctgatggaagccgcatcaggaggctacgcagaggtgggacgggtgctgctcgacaaaggagccgatgtcaatgcccctcccgttccatccagtcgcgacaccgccctgacaatagccgcagataagggtcactacaaattctgcgagctactgatccatcggggtgcacacatagacgtccggaataagaaggggaacacccccctctggctcgcatcgaatggcggacacttcgacgtagtacaactgctggtgcaggctggagcggacgtggatgctgcagataacagaaagataaccccccttatgtctgcctttagaaagggccacgtgaaagtagtacagtacctggtgaaggaagtaaatcagttcccatccgacatcgagtgtatgcgctatatagccaccatcaccgacaaggagctcttgaaaaagtgccaccagtgcgtggagacaatcgtcaaggccaaagaccaacaagccgctgaggccaataagaacgccagcatcctgcttaaagagctggatctggaaaagtcccgcgaggaatcgcgaaagcaggctctggccgcaaagcgctag

SEQ ID NO: 194810 - DNA, 1863 bp, Artificial Sequence
  derived and/or modified sequence
atgtctctggctcagcaaaaggcagacaagaacaagatcaatggagaaccgcgtggaggtggcgctggcggtaactccgattctgacaatctggattcaactgattgtaattcagagagcagttcgggaggtaagtcgcaggaacttaatttcgtcatggatgtcaattcatctaagtacccgtcgctattgctgcattctcaagaagagaaaacatccaccgccacctccaaaactcagacgcgccttgaaggggaagtcacccccaatagcttatcgacttcttataaaacagtgtcactgcctctcagcagccctaacatcaagctgaatctgactagtcccaagcggggacaaaagcgcgaggaggggtggaaggaagtggtgcggaggagcaaaaaattgagcgtgccggcttctgtcgtgagtagaataatgggcaggggcggatgtaacatcaccgccatccaggatgtgactggggctcatattgatgttgacaagcagaaggataagaatggggagagaatgattacaattcgcggaggaactgagagtacccgctacgccgttcagctaataaatgcacttattcaggacccggcaaaggagctggaggacctgatccccaaaaaccacatcaggaccccggctagcacaaaatctattcacgcaaatttttcttccggggtcggtaccacagccgcttcatctaaaaatgccttcccactcggggctcccactcttgtgacaagccaggcgactactttgtccactttccagcctgcgaataagctaaataagaacgttcccacgaatgtccgaagctcctttccagtgtcgctgcccttggcgtaccctcacccccactttgccctgttggcagcacagactatgcagcagattcggcaccctagacttccaatggcacagttcgggggaacctttagtccgtcgcccaacacttggggtcctttccctgtaaggcctgtgaaccccggtaatactaattcgagtccgaaacacaacaacaccagtaggctgcctaatcaaaacgggacggtgctccctagtgaaagtgccggactcgcaaccgcatcctgtccaatcaccgtaagttcagtcgtcgcagccagccaacagctgtgtgtcacaaatacacgcacccccagcagcgttcgcaagcagctgttcgcctgtgtcccaaagacatctcctcccgctacagtgataagttcagtgacgtcaacctgttcttctcttccatcagtgtctagtgccccaatcaccagtggccaagcgccaacaacatttctaccggcttcgacatcccaagctcagttgtcctcccagaagatggaaagcttcagtgcagtccctccaactaaagaaaaagtcagcactcaggaccagccgatggctaatctgtgtaccccttcctctacggctaactcttgttccagcagcgcctcaaacactcccggagctccagaaacccatcctagcagctcgcccacacccacgtctagtaacacccaggaagaggctcagccgtccagcgtgtcggacctgtcacctatgagtatgccgttcgcttccaactctgagcccgctccattgacgctaacaagtcctagaatggttgcggcagataaccaggacacctctaacctgcctcagctggcggtgccagcccctagggtctcgcatcgaatgcaacccagggggtctttttactccatggtgccaaacgcgactatccaccaggatccgcaaagcatcttcgtaacaaatcctgttacactgtgggaggccgaggccagtgggttgcatgaagtacggagcctgcgtcaagcgtggtag

SEQ ID NO: 194811 - DNA, 2601 bp, Artificial Sequence
  derived and/or modified sequence
atggatgtgaactcctctaagtaccctagtttactactgcatagtcaggaagagaagactagcactgctacaagtaaaacccagacaaggctcgaaggtgaggttaccccaaactctctgtctacaagttacaaaaccgtgtcacttcccttgtcgtcgccaaacattaagttgaacctgacttcacccaaacgaggacagaagcgcgaagagggctggaaggaagtcgtgcgcagatcaaaaaagctgagcgtgccggcaagtgtggtgagcagaattatgggtcggggtggatgcaatatcacagccattcaagatgttacaggggctcatattgacgtggacaaacagaaggacaaaaacggagagaggatgataaccatcaggggcggtacagaatccacccggtacgcggtgcagcttattaacgcattgatccaggatcctgcaaaggaactggaagatctgatccccaagaatcatatccgtaccccagcctccacgaagtccatccatgcaaactttagctccggagtggggactactgctgccagcagcaagaatgctttccccctgggcgcaccaacacttgtgacaagccaggcaaccacgttaagcacatttcagcccgctaataaattaaacaaaaacgtgccaactaatgtgagatcttctttcccggtgtcattacctctcgcatatccccaccctcattttgcacttctcgccgctcagacaatgcagcagattcggcaccctagacttcctatggctcagttcggcggaactttctcaccttctcccaatacatgggggccttttcctgtgaggcccgttaatcctggcaataccaactctagccctaagcacaataatacttcaagattgccaaaccagaatgggaccgtgctgcccagtgaatccgctggtttggccactgccagctgtcctatcacggtttcatccgtggtcgccgcaagccagcaactctgtgtgacaaacacgaggaccccttcctcagtacggaagcagctgtttgcatgcgtacctaagacttccccaccagccaccgtcatcagtagcgtgactagtacatgtagcagtctcccatcagtgagttctgcccctatcacttctggccaggccccaactacatttttgcctgccagtacatctcaagcacaactgtcctctcagaagatggaaagcttctcggccgttccccctacaaaagaaaaggtgtcgacccaggaccagccgatggctaacttatgcaccccatcgtcaacagcaaatagttgctcctctagtgctagcaacactcccggtgccccagaaactcatccttcgagcagccccacccctacaagcagtaatacacaggaggaggcacagccatcttccgtttcagacttaagcccaatgtctatgccgtttgcttcaaactctgaacccgctccccttacactgactagccccagaatggtagccgcagataatcaggacacatcaaatctgccacagcttgctgtgcctgctccgagggtttcacaccgcatgcagccgcgtggatctttttactcaatggtgcctaatgcaacaattcatcaggacccgcagtccattttcgtcaccaatccagtgaccttgacacctcctcagggcccacccgctgcagtgcagctgtcttcggcagtgaacattatgaacggctcacagatgcacatcaaccccgcaaacaagagtttaccccctaccttcggaccagcaactctgttcaatcactttagtagtttgtttgatagctcgcaggtgcctgctaaccagggttggggtgatgggcctttgtcatcccgggttgctactgacgcttcattcacagtgcagtccgcttttctgggcaattctgttctggggcatctggaaaatatgcaccccgacaactctaaagcaccgggttttcggccaccgtcccaaagggtgtccacctcccctgtcgccaccagcgcccctccaacccttggacagcccaagggagtttctgcctcgcaggataggaaaatccctcctccgatcggtaccgagcgcctagctcgcattagacaagggggatccgtggcgcaggcaccggcaggtacatcttttgttgcaccggttgggcatagtggaatctggagtttcggagtcaatgccgtgtcagaaggcttgtccggttggtcacaaagtgtgatgggaaaccaccctatgcaccaacagctgtcagacccatctacattcagtcaacaccagccgatggagcgcgatgacagcgggatggtggcgccatctaatatcttccatcagccgatggccagtgggtttgtggattttagtaagggacttcccatttctatgtatgggggtaccattataccatcccacccccagctggctgatgttccaggaggtccgctctttaacggactgcacaatcctgacccagcctggaatcctatgatcaaggtcatccagaactcaacagagtgcactgacgcacagcagatatggccaggcacttgggcccctcatattggcaacatgcacctaaagtacgttaattag

SEQ ID NO: 194812 - DNA, 300 bp, Artificial Sequence
  derived and/or modified sequence
atgtcctgtcaacaaaaccagcaacagtgccaaccaccccctaagtgccctatccctaaatacccccctaaatgtccttccaagtgcgccagtagctgtcctcctccgatatcgtcatgttgtgggtcctcctctggtgggtgtggatgctgcagcagcgaaggcggagggtgctgcttaagccaccaccgccatcacagatctcactgtcatagacctaagtcaagtaattgttacggatcagggtcgggtcaacagtctggaggcagcggctgttgttcaggcggaggctgctgttag

SEQ ID NO: 194813 - DNA, 7623 bp, Artificial Sequence
  derived and/or modified sequence
atgctgaccgacagcggcggcggcggcaccagcttcgaggaggacctggacagcgtggcccccagaagcgcccccgccggcgccagcgagccccccccccccggcggcgtgggcctgggcatcagaaccgtgagactgttcggcgaggccggccccgccagcggcgtgggcagcagcggcggcggcggcagcggcagcggcaccggcggcggcgacgccgccctggacttcaagctggccgccgccgtgctgagaaccggcggcggcggcggcgccagcggcagcgacgaggacgaggtgagcgaggtggagagcttcatcctggaccaggaggacctggacaaccccgtgctgaagaccaccagcgagatcttcctgagcagcaccgccgagggcgccgacctgagaaccgtggaccccgagacccaggccagactggaggccctgctggaggccgccggcatcggcaagctgagcaccgccgacggcaaggccttcgccgaccccgaggtgctgagaagactgaccagcagcgtgagctgcgccctggacgaggccgccgccgccctgaccagaatgaaggccgagaacagccacaacgccggccaggtggacaccagaagcctggccgaggcctgcagcgacggcgacgtgaacgccgtgagaaagctgctggacgagggcagaagcgtgaacgagcacaccgaggagggcgagagcctgctgtgcctggcctgcagcgccggctactacgagctggcccaggtgctgctggccatgcacgccaacgtggaggacagaggcaacaagggcgacatcacccccctgatggccgccagcagcggcggctacctggacatcgtgaagctgctgctgctgcacgacgccgacgtgaacagccagagcgccaccggcaacaccgccctgacctacgcctgcgccggcggcttcgtggacatcgtgaaggtgctgctgaacgagggcgccaacatcgaggaccacaacgagaacggccacacccccctgatggaggccgccagcgccggccacgtggaggtggccagagtgctgctggaccacggcgccggcatcaacacccacagcaacgagttcaaggagagcgccctgaccctggcctgctacaagggccacctggacatggtgagattcctgctggaggccggcgccgaccaggagcacaagaccgacgagatgcacaccgccctgatggaggcctgcatggacggccacgtggaggtggccagactgctgctggacagcggcgcccaggtgaacatgcccgccgacagcttcgagagccccctgaccctggccgcctgcggcggccacgtggagctggccgccctgctgatcgagagaggcgccaacctggaggaggtgaacgacgagggctacacccccctgatggaggccgccagagagggccacgaggagatggtggccctgctgctggcccagggcgccaacatcaacgcccagaccgaggagacccaggagaccgccctgaccctggcctgctgcggcggcttcagcgaggtggccgacttcctgatcaaggccggcgccgacatcgagctgggctgcagcacccccctgatggaggccagccaggagggccacctggagctggtgaagtacctgctggccagcggcgccaacgtgcacgccaccaccgccaccggcgacaccgccctgacctacgcctgcgagaacggccacaccgacgtggccgacgtgctgctgcaggccggcgccgacctggagcacgagagcgagggcggcagaacccccctgatgaaggccgccagagccggccacctgtgcaccgtgcagttcctgatcagcaagggcgccaacgtgaacagagccaccgccaacaacgaccacaccgtggtgagcctggcctgcgccggcggccacctggccgtggtggagctgctgctggcccacggcgccgaccccacccacagactgaaggacggcagcaccatgctgatcgaggccgccaagggcggccacaccaacgtggtgagctacctgctggactaccccaacaacgtgctgagcgtgcccaccaccgacgtgagccagctgcccccccccagccaggaccagagccaggtgcccagagtgcccacccacaccctggccatggtggtgcccccccaggagcccgacagaaccagccaggagaacagccccgccctgctgggcgtgcagaagggcaccagcaagcagaagagcagcagcctgcaggtggccgaccaggacctgctgcccagcttccacccctaccagcccctggagtgcatcgtggaggagaccgagggcaagctgaacgagctgggccagagaatcagcgccatcgagaaggcccagctgaagagcctggagctgatccagggcgagcccctgaacaaggacaagatcgaggagctgaagaagaacagagaggagcaggtgcagaagaagaagaagatcctgaaggagctgcagaaggtggagagacagctgcagatgaagacccagcagcagttcaccaaggagtacctggagaccaagggccagaaggacaccgtgagcctgcaccagcagtgcagccacagaggcgtgttccccgagggcgagggcgacggcagcctgcccgaggaccacttcagcgagctgccccaggtggacaccatcctgttcaaggacaacgacgtggacgacgagcagcagagcccccccagcgccgagcagatcgacttcgtgcccgtgcagcccctgagcagcccccagtgcaacttcagcagcgacctgggcagcaacggcaccaacagcctggagctgcagaaggtgagcggcaaccagcagatcgtgggccagccccagatcgccatcaccggccacgaccagggcctgctggtgcaggagcccgacggcctgatggtggccacccccgcccagaccctgaccgacaccctggacgacctgatcgccgccgtgagcaccagagtgcccaccggcagcaacagcagcagccagaccaccgagtgcctgacccccgagagctgcagccagaccaccagcaacgtggccagccagagcatgccccccgtgtaccccagcgtggacatcgacgcccacaccgagagcaaccacgacaccgccctgaccctggcctgcgccggcggccacgaggagctggtgagcgtgctgatcgccagagacgccaagatcgagcacagagacaagaagggcttcacccccctgatcctggccgccaccgccggccacgtgggcgtggtggagatcctgctggacaagggcggcgacatcgaggcccagagcgagagaaccaaggacacccccctgagcctggcctgcagcggcggcagacaggaggtggtggacctgctgctggccagaggcgccaacaaggagcacagaaacgtgagcgactacacccccctgagcctggccgccagcggcggctacgtgaacatcatcaagatcctgctgaacgccggcgccgagatcaacagcagaaccggcagcaagctgggcatcagccccctgatgctggccgccatgaacggccacgtgcccgccgtgaagctgctgctggacatgggcagcgacatcaacgcccagatcgagaccaacagaaacaccgccctgaccctggcctgcttccagggcagagccgaggtggtgagcctgctgctggacagaaaggccaacgtggagcacagagccaagaccggcctgacccccctgatggaggccgccagcggcggctacgccgaggtgggcagagtgctgctggacaagggcgccgacgtgaacgccccccccgtgcccagcagcagagacaccgccctgaccatcgccgccgacaagggccactacaagttctgcgagctgctgatccacagaggcgcccacatcgacgtgagaaacaagaagggcaacacccccctgtggctggccagcaacggcggccacttcgacgtggtgcagctgctggtgcaggccggcgccgacgtggacgccgccgacaacagaaagatcacccccctgatgagcgccttcagaaagggccacgtgaaggtggtgcagtacctggtgaaggaggtgaaccagttccccagcgacatcgagtgcatgagatacatcgccaccatcaccgacaaggagctgctgaagaagtgccaccagtgcgtggagaccatcgtgaaggccaaggaccagcaggccgccgaggccaacaagaacgccagcatcctgctgaaggagctggacctggagaagagcagagaggagagcagaaagcaggccctggccgccaagagagagaagagaaaggagaagagaaagaagaagaaggaggagcagaagagaaagcaggaggaggacgaggagaacaagcccaaggagaacagcgagctgcccgaggacgaggacgaggaggagaacgacgaggacgtggagcaggaggtgcccatcgagccccccagcgccaccaccaccaccaccatcggcatcagcgccaccagcgccaccttcaccaacgtgttcggcaagaagagagccaacgtggtgaccacccccagcaccaacagaaagaacaagaagaacaagaccaaggagaccccccccaccgcccacctgatcctgcccgagcagcacatgagcctggcccagcagaaggccgacaagaacaagatcaacggcgagcccagaggcggcggcgccggcggcaacagcgacagcgacaacctggacagcaccgactgcaacagcgagagcagcagcggcggcaagagccaggagctgaacttcgtgatggacgtgaacagcagcaagtaccccagcctgctgctgcacagccaggaggagaagaccagcaccgccaccagcaagacccagaccagactggagggcgaggtgacccccaacagcctgagcaccagctacaagaccgtgagcctgcccctgagcagccccaacatcaagctgaacctgaccagccccaagagaggccagaagagagaggagggctggaaggaggtggtgagaagaagcaagaagctgagcgtgcccgccagcgtggtgagcagaatcatgggcagaggcggctgcaacatcaccgccatccaggacgtgaccggcgcccacatcgacgtggacaagcagaaggacaagaacggcgagagaatgatcaccatcagaggcggcaccgagagcaccagatacgccgtgcagctgatcaacgccctgatccaggaccccgccaaggagctggaggacctgatccccaagaaccacatcagaacccccgccagcaccaagagcatccacgccaacttcagcagcggcgtgggcaccaccgccgccagcagcaagaacgccttccccctgggcgcccccaccctggtgaccagccaggccaccaccctgagcaccttccagcccgccaacaagctgaacaagaacgtgcccaccaacgtgagaagcagcttccccgtgagcctgcccctggcctacccccacccccacttcgccctgctggccgcccagaccatgcagcagatcagacaccccagactgcccatggcccagttcggcggcaccttcagccccagccccaacacctggggccccttccccgtgagacccgtgaaccccggcaacaccaacagcagccccaagcacaacaacaccagcagactgcccaaccagaacggcaccgtgctgcccagcgagagcgccggcctggccaccgccagctgccccatcaccgtgagcagcgtggtggccgccagccagcagctgtgcgtgaccaacaccagaacccccagcagcgtgagaaagcagctgttcgcctgcgtgcccaagaccagcccccccgccaccgtgatcagcagcgtgaccagcacctgcagcagcctgcccagcgtgagcagcgcccccatcaccagcggccaggcccccaccaccttcctgcccgccagcaccagccaggcccagctgagcagccagaagatggagagcttcagcgccgtgccccccaccaaggagaaggtgagcacccaggaccagcccatggccaacctgtgcacccccagcagcaccgccaacagctgcagcagcagcgccagcaacacccccggcgcccccgagacccaccccagcagcagccccacccccaccagcagcaacacccaggaggaggcccagcccagcagcgtgagcgacctgagccccatgagcatgcccttcgccagcaacagcgagcccgcccccctgaccctgaccagccccagaatggtggccgccgacaaccaggacaccagcaacctgccccagctggccgtgcccgcccccagagtgagccacagaatgcagcccagaggcagcttctacagcatggtgcccaacgccaccatccaccaggacccccagagcatcttcgtgaccaaccccgtgaccctgacccccccccagggcccccccgccgccgtgcagctgagcagcgccgtgaacatcatgaacggcagccagatgcacatcaaccccgccaacaagagcctgccccccaccttcggccccgccaccctgttcaaccacttcagcagcctgttcgacagcagccaggtgcccgccaaccagggctggggcgacggccccctgagcagcagagtggccaccgacgccagcttcaccgtgcagagcgccttcctgggcaacagcgtgctgggccacctggagaacatgcaccccgacaacagcaaggcccccggcttcagaccccccagccagagagtgagcaccagccccgtgggcctgcccagcatcgaccccagcggcagcagccccagcagcagcagcgcccccctggccagcttcagcggcatccccggcaccagagtgttcctgcagggccccgcccccgtgggcacccccagcttcaacagacagcacttcagcccccacccctggaccagcgccagcaacagctgcgacagccccatccccagcgtgagcagcggcagcagcagccccctgagcgccaccagcgccccccccaccctgggccagcccaagggcgtgagcgccagccaggacagaaagatccccccccccatcggcaccgagagactggccagaatcagacagggcggcagcgtggcccaggcccccgccggcaccagcttcgtggcccccgtgggccacagcggcatctggagcttcggcgtgaacgccgtgagcgagggcctgagcggctggagccagagcgtgatgggcaaccaccccatgcaccagcagctgagcgaccccagcaccttcagccagcaccagcccatggagagagacgacagcggcatggtggcccccagcaacatcttccaccagcccatggccagcggcttcgtggacttcagcaagggcctgcccatcagcatgtacggcggcaccatcatccccagccacccccagctggccgacgtgcccggcggccccctgttcaacggcctgcacaaccccgaccccgcctggaaccccatgatcaaggtgatccagaacagcaccgagtgcaccgacgcccagcagtag

SEQ ID NO: 194814 - DNA, 3024 bp, Artificial Sequence
  derived and/or modified sequence
atggtggccctgctgctggcccagggcgccaacatcaacgcccagaccgaggagacccaggagaccgccctgaccctggcctgctgcggcggcttcagcgaggtggccgacttcctgatcaaggccggcgccgacatcgagctgggctgcagcacccccctgatggaggccagccaggagggccacctggagctggtgaagtacctgctggccagcggcgccaacgtgcacgccaccaccgccaccggcgacaccgccctgacctacgcctgcgagaacggccacaccgacgtggccgacgtgctgctgcaggccggcgccgacctggacaagcaggaggacatgaagaccatcctggagggcatcgaccccgccaagcaccaggagcacgagagcgagggcggcagaacccccctgatgaaggccgccagagccggccacctgtgcaccgtgcagttcctgatcagcaagggcgccaacgtgaacagagccaccgccaacaacgaccacaccgtggtgagcctggcctgcgccggcggccacctggccgtggtggagctgctgctggcccacggcgccgaccccacccacagactgaaggacggcagcaccatgctgatcgaggccgccaagggcggccacaccaacgtggtgagctacctgctggactaccccaacaacgtgctgagcgtgcccaccaccgacgtgagccagctgcccccccccagccaggaccagagccaggtgcccagagtgcccacccacaccctggccatggtggtgcccccccaggagcccgacagaaccagccaggagaacagccccgccctgctgggcgtgcagaagggcaccagcaagcagaagagcagcagcctgcaggtggccgaccaggacctgctgcccagcttccacccctaccagcccctggagtgcatcgtggaggagaccgagggcaagctgaacgagctgggccagagaatcagcgccatcgagaaggcccagctgaagagcctggagctgatccagggcgagcccctgaacaaggacaagatcgaggagctgaagaagaacagagaggagcaggtgcagaagaagaagaagatcctgaaggagctgcagaaggtggagagacagctgcagatgaagacccagcagcagttcaccaaggagtacctggagaccaagggccagaaggacaccgtgagcctgcaccagcagtgcagccacagaggcgtgttccccgagggcgagggcgacggcagcctgcccgaggaccacttcagcgagctgccccaggtggacaccatcctgttcaaggacaacgacgtggacgacgagcagcagagcccccccagcgccgagcagatcgacttcgtgcccgtgcagcccctgagcagcccccagtgcaacttcagcagcgacctgggcagcaacggcaccaacagcctggagctgcagaaggtgagcggcaaccagcagatcgtgggccagccccagatcgccatcaccggccacgaccagggcctgctggtgcaggagcccgacggcctgatggtggccacccccgcccagaccctgaccgacaccctggacgacctgatcgccgccgtgagcaccagagtgcccaccggcagcaacagcagcagccagaccaccgagtgcctgacccccgagagctgcagccagaccaccagcaacgtggccagccagagcatgccccccgtgtaccccagcgtggacatcgacgcccacaccgagagcaaccacgacaccgccctgaccctggcctgcgccggcggccacgaggagctggtgagcgtgctgatcgccagagacgccaagatcgagcacagagacaagaagggcttcacccccctgatcctggccgccaccgccggccacgtgggcgtggtggagatcctgctggacaagggcggcgacatcgaggcccagagcgagagaaccaaggacacccccctgagcctggcctgcagcggcggcagacaggaggtggtggacctgctgctggccagaggcgccaacaaggagcacagaaacgtgagcgactacacccccctgagcctggccgccagcggcggctacgtgaacatcatcaagatcctgctgaacgccggcgccgagatcaacagcagaaccggcagcaagctgggcatcagccccctgatgctggccgccatgaacggccacgtgcccgccgtgaagctgctgctggacatgggcagcgacatcaacgcccagatcgagaccaacagaaacaccgccctgaccctggcctgcttccagggcagagccgaggtggtgagcctgctgctggacagaaaggccaacgtggagcacagagccaagaccggcctgacccccctgatggaggccgccagcggcggctacgccgaggtgggcagagtgctgctggacaagggcgccgacgtgaacgccccccccgtgcccagcagcagagacaccgccctgaccatcgccgccgacaagggccactacaagttctgcgagctgctgatccacagaggcgcccacatcgacgtgagaaacaagaagggcaacacccccctgtggctggccagcaacggcggccacttcgacgtggtgcagctgctggtgcaggccggcgccgacgtggacgccgccgacaacagaaagatcacccccctgatgagcgccttcagaaagggccacgtgaaggtggtgcagtacctggtgaaggaggtgaaccagttccccagcgacatcgagtgcatgagatacatcgccaccatcaccgacaaggagctgctgaagaagtgccaccagtgcgtggagaccatcgtgaaggccaaggaccagcaggccgccgaggccaacaagaacgccagcatcctgctgaaggagctggacctggagaagagcagagaggagagcagaaagcaggccctggccgccaagagagagaagagaaaggagaagagaaaggagaagagaggcaccgagaaggagaccggcagaagatag

SEQ ID NO: 194815 - DNA, 7629 bp, Artificial Sequence
  derived and/or modified sequence
atgctgaccgacagcggcggcggcggcaccagcttcgaggaggacctggacagcgtggcccccagaagcgcccccgccggcgccagcgagccccccccccccggcggcgtgggcctgggcatcagaaccgtgagactgttcggcgaggccggccccgccagcggcgtgggcagcagcggcggcggcggcagcggcagcggcaccggcggcggcgacgccgccctggacttcaagctggccgccgccgtgctgagaaccggcggcggcggcggcgccagcggcagcgacgaggacgaggtgagcgaggtggagagcttcatcctggaccaggaggacctggacaaccccgtgctgaagaccaccagcgagatcttcctgagcagcaccgccgagggcgccgacctgagaaccgtggaccccgagacccaggccagactggaggccctgctggaggccgccggcatcggcaagctgagcaccgccgacggcaaggccttcgccgaccccgaggtgctgagaagactgaccagcagcgtgagctgcgccctggacgaggccgccgccgccctgaccagaatgaaggccgagaacagccacaacgccggccaggtggacaccagaagcctggccgaggcctgcagcgacggcgacgtgaacgccgtgagaaagctgctggacgagggcagaagcgtgaacgagcacaccgaggagggcgagagcctgctgtgcctggcctgcagcgccggctactacgagctggcccaggtgctgctggccatgcacgccaacgtggaggacagaggcaacaagggcgacatcacccccctgatggccgccagcagcggcggctacctggacatcgtgaagctgctgctgctgcacgacgccgacgtgaacagccagagcgccaccggcaacaccgccctgacctacgcctgcgccggcggcttcgtggacatcgtgaaggtgctgctgaacgagggcgccaacatcgaggaccacaacgagaacggccacacccccctgatggaggccgccagcgccggccacgtggaggtggccagagtgctgctggaccacggcgccggcatcaacacccacagcaacgagttcaaggagagcgccctgaccctggcctgctacaagggccacctggacatggtgagattcctgctggaggccggcgccgaccaggagcacaagaccgacgagatgcacaccgccctgatggaggcctgcatggacggccacgtggaggtggccagactgctgctggacagcggcgcccaggtgaacatgcccgccgacagcttcgagagccccctgaccctggccgcctgcggcggccacgtggagctggccgccctgctgatcgagagaggcgccaacctggaggaggtgaacgacgagggctacacccccctgatggaggccgccagagagggccacgaggagatggtggccctgctgctggcccagggcgccaacatcaacgcccagaccgaggagacccaggagaccgccctgaccctggcctgctgcggcggcttcagcgaggtggccgacttcctgatcaaggccggcgccgacatcgagctgggctgcagcacccccctgatggaggccagccaggagggccacctggagctggtgaagtacctgctggccagcggcgccaacgtgcacgccaccaccgccaccggcgacaccgccctgacctacgcctgcgagaacggccacaccgacgtggccgacgtgctgctgcaggccggcgccgacctggagcacgagagcgagggcggcagaacccccctgatgaaggccgccagagccggccacctgtgcaccgtgcagttcctgatcagcaagggcgccaacgtgaacagagccaccgccaacaacgaccacaccgtggtgagcctggcctgcgccggcggccacctggccgtggtggagctgctgctggcccacggcgccgaccccacccacagactgaaggacggcagcaccatgctgatcgaggccgccaagggcggccacaccaacgtggtgagctacctgctggactaccccaacaacgtgctgagcgtgcccaccaccgacgtgagccagctgcccccccccagccaggaccagagccaggtgcccagagtgcccacccacaccctggccatggtggtgcccccccaggagcccgacagaaccagccaggagaacagccccgccctgctgggcgtgcagaagggcaccagcaagcagaagagcagcagcctgcaggtggccgaccaggacctgctgcccagcttccacccctaccagcccctggagtgcatcgtggaggagaccgagggcaagctgaacgagctgggccagagaatcagcgccatcgagaaggcccagctgaagagcctggagctgatccagggcgagcccctgaacaaggacaagatcgaggagctgaagaagaacagagaggagcaggtgcagaagaagaagaagatcctgaaggagctgcagaaggtggagagacagctgcagatgaagacccagcagcagttcaccaaggagtacctggagaccaagggccagaaggacaccgtgagcctgcaccagcagtgcagccacagaggcgtgttccccgagggcgagggcgacggcagcctgcccgaggaccacttcagcgagctgccccaggtggacaccatcctgttcaaggacaacgacgtggacgacgagcagcagagcccccccagcgccgagcagatcgacttcgtgcccgtgcagcccctgagcagcccccagtgcaacttcagcagcgacctgggcagcaacggcaccaacagcctggagctgcagaaggtgagcggcaaccagcagatcgtgggccagccccagatcgccatcaccggccacgaccagggcctgctggtgcaggagcccgacggcctgatggtggccacccccgcccagaccctgaccgacaccctggacgacctgatcgccgccgtgagcaccagagtgcccaccggcagcaacagcagcagccagaccaccgagtgcctgacccccgagagctgcagccagaccaccagcaacgtggccagccagagcatgccccccgtgtaccccagcgtggacatcgacgcccacaccgagagcaaccacgacaccgccctgaccctggcctgcgccggcggccacgaggagctggtgagcgtgctgatcgccagagacgccaagatcgagcacagagacaagaagggcttcacccccctgatcctggccgccaccgccggccacgtgggcgtggtggagatcctgctggacaagggcggcgacatcgaggcccagagcgagagaaccaaggacacccccctgagcctggcctgcagcggcggcagacaggaggtggtggacctgctgctggccagaggcgccaacaaggagcacagaaacgtgagcgactacacccccctgagcctggccgccagcggcggctacgtgaacatcatcaagatcctgctgaacgccggcgccgagatcaacagcagaaccggcagcaagctgggcatcagccccctgatgctggccgccatgaacggccacgtgcccgccgtgaagctgctgctggacatgggcagcgacatcaacgcccagatcgagaccaacagaaacaccgccctgaccctggcctgcttccagggcagagccgaggtggtgagcctgctgctggacagaaaggccaacgtggagcacagagccaagaccggcctgacccccctgatggaggccgccagcggcggctacgccgaggtgggcagagtgctgctggacaagggcgccgacgtgaacgccccccccgtgcccagcagcagagacaccgccctgaccatcgccgccgacaagggccactacaagttctgcgagctgctgatccacagaggcgcccacatcgacgtgagaaacaagaagggcaacacccccctgtggctggccagcaacggcggccacttcgacgtggtgcagctgctggtgcaggccggcgccgacgtggacgccgccgacaacagaaagatcacccccctgatgagcgccttcagaaagggccacgtgaaggtggtgcagtacctggtgaaggaggtgaaccagttccccagcgacatcgagtgcatgagatacatcgccaccatcaccgacaaggagctgctgaagaagtgccaccagtgcgtggagaccatcgtgaaggccaaggaccagcaggccgccgaggccaacaagaacgccagcatcctgctgaaggagctggacctggagaagagcagagaggagagcagaaagcaggccctggccgccaagagagagaagagaaaggagaagagaaagaagaagaaggaggagcagaagagaaagcaggaggaggacgaggagaacaagcccaaggagaacagcgagctgcccgaggacgaggacgaggaggagaacgacgaggacgtggagcaggaggtgcccatcgagccccccagcgccaccaccaccaccaccatcggcatcagcgccaccagcgccaccttcaccaacgtgttcggcaagaagagagccaacgtggtgaccacccccagcaccaacagaaagaacaagaagaacaagaccaaggagaccccccccaccgcccacctgatcctgcccgagcagcacatgagcctggcccagcagaaggccgacaagaacaagatcaacggcgagcccagaggcggcggcgccggcggcaacagcgacagcgacaacctggacagcaccgactgcaacagcgagagcagcagcggcggcaagagccaggagctgaacttcgtgatggacgtgaacagcagcaagtaccccagcctgctgctgcacagccaggaggagaagaccagcaccgccaccagcaagacccagaccagactggagggcgaggtgacccccaacagcctgagcaccagctacaagaccgtgagcctgcccctgagcagccccaacatcaagctgaacctgaccagccccaagagaggccagaagagagaggagggctggaaggaggtggtgagaagaagcaagaagctgagcgtgcccgccagcgtggtgagcagaatcatgggcagaggcggctgcaacatcaccgccatccaggacgtgaccggcgcccacatcgacgtggacaagcagaaggacaagaacggcgagagaatgatcaccatcagaggcggcaccgagagcaccagatacgccgtgcagctgatcaacgccctgatccaggaccccgccaaggagctggaggacctgatccccaagaaccacatcagaacccccgccagcaccaagagcatccacgccaacttcagcagcggcgtgggcaccaccgccgccagcagcaagaacgccttccccctgggcgcccccaccctggtgaccagccaggccaccaccctgagcaccttccagcccgccaacaagctgaacaagaacgtgcccaccaacgtgagaagcagcttccccgtgagcctgcccctggcctacccccacccccacttcgccctgctggccgcccagaccatgcagcagatcagacaccccagactgcccatggcccagttcggcggcaccttcagccccagccccaacacctggggccccttccccgtgagacccgtgaaccccggcaacaccaacagcagccccaagcacaacaacaccagcagactgcccaaccagaacggcaccgtgctgcccagcgagagcgccggcctggccaccgccagctgccccatcaccgtgagcagcgtggtggccgccagccagcagctgtgcgtgaccaacaccagaacccccagcagcgtgagaaagcagctgttcgcctgcgtgcccaagaccagcccccccgccaccgtgatcagcagcgtgaccagcacctgcagcagcctgcccagcgtgagcagcgcccccatcaccagcggccaggcccccaccaccttcctgcccgccagcaccagccaggcccagctgagcagccagaagatggagagcttcagcgccgtgccccccaccaaggagaaggtgagcacccaggaccagcccatggccaacctgtgcacccccagcagcaccgccaacagctgcagcagcagcgccagcaacacccccggcgcccccgagacccaccccagcagcagccccacccccaccagcagcaacacccaggaggaggcccagcccagcagcgtgagcgacctgagccccatgagcatgcccttcgccagcaacagcgagcccgcccccctgaccctgaccagccccagaatggtggccgccgacaaccaggacaccagcaacctgccccagctggccgtgcccgcccccagagtgagccacagaatgcagcccagaggcagcttctacagcatggtgcccaacgccaccatccaccaggacccccagagcatcttcgtgaccaaccccgtgaccctgacccccccccagggcccccccgccgccgtgcagctgagcagcgccgtgaacatcatgaacggcagccagatgcacatcaaccccgccaacaagagcctgccccccaccttcggccccgccaccctgttcaaccacttcagcagcctgttcgacagcagccaggtgcccgccaaccagggctggggcgacggccccctgagcagcagagtggccaccgacgccagcttcaccgtgcagagcgccttcctgggcaacagcgtgctgggccacctggagaacatgcaccccgacaacagcaaggcccccggcttcagaccccccagccagagagtgagcaccagccccgtgggcctgcccagcatcgaccccagcggcagcagccccagcagcagcagcgcccccctggccagcttcagcggcatccccggcaccagagtgttcctgcagggccccgcccccgtgggcacccccagcttcaacagacagcacttcagcccccacccctggaccagcgccagcaacagcagcaccagcgccccccccaccctgggccagcccaagggcgtgagcgccagccaggacagaaagatccccccccccatcggcaccgagagactggccagaatcagacagggcggcagcgtggcccaggcccccgccggcaccagcttcgtggcccccgtgggccacagcggcatctggagcttcggcgtgaacgccgtgagcgagggcctgagcggctggagccagagcgtgatgggcaaccaccccatgcaccagcagctgagcgaccccagcaccttcagccagcaccagcccatggagagagacgacagcggcatggtggcccccagcaacatcttccaccagcccatggccagcggcttcgtggacttcagcaagggcctgcccatcagcatgtacggcggcaccatcatccccagccacccccagctggccgacgtgcccggcggccccctgttcaacggcctgcacaaccccgaccccgcctggaaccccatgatcaaggtgatccagaacagcaccgagtgcaccgacgcccagcagatctggcccggcacctgggccccccacatcggcaacatgcacctgaagtacgtgaactag

SEQ ID NO: 194816 - DNA, 4461 bp, Artificial Sequence
  derived and/or modified sequence
cccagagtgggcagacacagactgagactgagagtgagaaccatgctgaccgacagcggcggcggcggcaccagcttcgaggaggacctggacagcgtggcccccagaagcgcccccgccggcgccagcgagccccccccccccggcggcgtgggcctgggcatcagaaccgtgagactgttcggcgaggccggccccgccagcggcgtgggcagcagcggcggcggcggcagcggcagcggcaccggcggcggcgacgccgccctggacttcaagctggccgccgccgtgctgagaaccggcggcggcggcggcgccagcggcagcgacgaggacgaggtgagcgaggtggagagcttcatcctggaccaggaggacctggacaaccccgtgctgaagaccaccagcgagatcttcctgagcagcaccgccgagggcgccgacctgagaaccgtggaccccgagacccaggccagactggaggccctgctggaggccgccggcatcggcaagctgagcaccgccgacggcaaggccttcgccgaccccgaggtgctgagaagactgaccagcagcgtgagctgcgccctggacgaggccgccgccgccctgaccagaatgaaggccgagaacagccacaacgccggccaggtggacaccagaagcctggccgaggcctgcagcgacggcgacgtgaacgccgtgagaaagctgctggacgagggcagaagcgtgaacgagcacaccgaggagggcgagagcctgctgtgcctggcctgcagcgccggctactacgagctggcccaggtgctgctggccatgcacgccaacgtggaggacagaggcaacaagggcgacatcacccccctgatggccgccagcagcggcggctacctggacatcgtgaagctgctgctgctgcacgacgccgacgtgaacagccagagcgccaccggcaacaccgccctgacctacgcctgcgccggcggcttcgtggacatcgtgaaggtgctgctgaacgagggcgccaacatcgaggaccacaacgagaacggccacacccccctgatggaggccgccagcgccggccacgtggaggtggccagagtgctgctggaccacggcgccggcatcaacacccacagcaacgagttcaaggagagcgccctgaccctggcctgctacaagggccacctggacatggtgagattcctgctggaggccggcgccgaccaggagcacaagaccgacgagatgcacaccgccctgatggaggcctgcatggacggccacgtggaggtggccagactgctgctggacagcggcgcccaggtgaacatgcccgccgacagcttcgagagccccctgaccctggccgcctgcggcggccacgtggagctggccgccctgctgatcgagagaggcgccaacctggaggaggtgaacgacgagggctacacccccctgatggaggccgccagagagggccacgaggagatggtggccctgctgctggcccagggcgccaacatcaacgcccagaccgaggagacccaggagaccgccctgaccctggcctgctgcggcggcttcagcgaggtggccgacttcctgatcaaggccggcgccgacatcgagctgggctgcagcacccccctgatggaggccagccaggagggccacctggagctggtgaagtacctgctggccagcggcgccaacgtgcacgccaccaccgccaccggcgacaccgccctgacctacgcctgcgagaacggccacaccgacgtggccgacgtgctgctgcaggccggcgccgacctggacaagcaggaggacatgaagaccatcctggagggcatcgaccccgccaagcaccaggagcacgagagcgagggcggcagaacccccctgatgaaggccgccagagccggccacctgtgcaccgtgcagttcctgatcagcaagggcgccaacgtgaacagagccaccgccaacaacgaccacaccgtggtgagcctggcctgcgccggcggccacctggccgtggtggagctgctgctggcccacggcgccgaccccacccacagactgaaggacggcagcaccatgctgatcgaggccgccaagggcggccacaccaacgtggtgagctacctgctggactaccccaacaacgtgctgagcgtgcccaccaccgacgtgagccagctgcccccccccagccaggaccagagccaggtgcccagagtgcccacccacaccctggccatggtggtgcccccccaggagcccgacagaaccagccaggagaacagccccgccctgctgggcgtgcagaagggcaccagcaagcagaagagcagcagcctgcaggtggccgaccaggacctgctgcccagcttccacccctaccagcccctggagtgcatcgtggaggagaccgagggcaagctgaacgagctgggccagagaatcagcgccatcgagaaggcccagctgaagagcctggagctgatccagggcgagcccctgaacaaggacaagatcgaggagctgaagaagaacagagaggagcaggtgcagaagaagaagaagatcctgaaggagctgcagaaggtggagagacagctgcagatgaagacccagcagcagttcaccaaggagtacctggagaccaagggccagaaggacaccgtgagcctgcaccagcagtgcagccacagaggcgtgttccccgagggcgagggcgacggcagcctgcccgaggaccacttcagcgagctgccccaggtggacaccatcctgttcaaggacaacgacgtggacgacgagcagcagagcccccccagcgccgagcagatcgacttcgtgcccgtgcagcccctgagcagcccccagtgcaacttcagcagcgacctgggcagcaacggcaccaacagcctggagctgcagaaggtgagcggcaaccagcagatcgtgggccagccccagatcgccatcaccggccacgaccagggcctgctggtgcaggagcccgacggcctgatggtggccacccccgcccagaccctgaccgacaccctggacgacctgatcgccgccgtgagcaccagagtgcccaccggcagcaacagcagcagccagaccaccgagtgcctgacccccgagagctgcagccagaccaccagcaacgtggccagccagagcatgccccccgtgtaccccagcgtggacatcgacgcccacaccgagagcaaccacgacaccgccctgaccctggcctgcgccggcggccacgaggagctggtgagcgtgctgatcgccagagacgccaagatcgagcacagagacaagaagggcttcacccccctgatcctggccgccaccgccggccacgtgggcgtggtggagatcctgctggacaagggcggcgacatcgaggcccagagcgagagaaccaaggacacccccctgagcctggcctgcagcggcggcagacaggaggtggtggacctgctgctggccagaggcgccaacaaggagcacagaaacgtgagcgactacacccccctgagcctggccgccagcggcggctacgtgaacatcatcaagatcctgctgaacgccggcgccgagatcaacagcagaaccggcagcaagctgggcatcagccccctgatgctggccgccatgaacggccacgtgcccgccgtgaagctgctgctggacatgggcagcgacatcaacgcccagatcgagaccaacagaaacaccgccctgaccctggcctgcttccagggcagagccgaggtggtgagcctgctgctggacagaaaggccaacgtggagcacagagccaagaccggcctgacccccctgatggaggccgccagcggcggctacgccgaggtgggcagagtgctgctggacaagggcgccgacgtgaacgccccccccgtgcccagcagcagagacaccgccctgaccatcgccgccgacaagggccactacaagttctgcgagctgctgatccacagaggcgcccacatcgacgtgagaaacaagaagggcaacacccccctgtggctggccagcaacggcggccacttcgacgtggtgcagctgctggtgcaggccggcgccgacgtggacgccgccgacaacagaaagatcacccccctgatgagcgccttcagaaagggccacgtgaaggtggtgcagtacctggtgaaggaggtgaaccagttccccagcgacatcgagtgcatgagatacatcgccaccatcaccgacaaggagctgctgaagaagtgccaccagtgcgtggagaccatcgtgaaggccaaggaccagcaggccgccgaggccaacaagaacgccagcatcctgctgaaggagctggacctggagaagagcagagaggagagcagaaagcaggccctggccgccaagagatag

SEQ ID NO: 194817 - DNA, 1863 bp, Artificial Sequence
  derived and/or modified sequence
atgagcctggcccagcagaaggccgacaagaacaagatcaacggcgagcccagaggcggcggcgccggcggcaacagcgacagcgacaacctggacagcaccgactgcaacagcgagagcagcagcggcggcaagagccaggagctgaacttcgtgatggacgtgaacagcagcaagtaccccagcctgctgctgcacagccaggaggagaagaccagcaccgccaccagcaagacccagaccagactggagggcgaggtgacccccaacagcctgagcaccagctacaagaccgtgagcctgcccctgagcagccccaacatcaagctgaacctgaccagccccaagagaggccagaagagagaggagggctggaaggaggtggtgagaagaagcaagaagctgagcgtgcccgccagcgtggtgagcagaatcatgggcagaggcggctgcaacatcaccgccatccaggacgtgaccggcgcccacatcgacgtggacaagcagaaggacaagaacggcgagagaatgatcaccatcagaggcggcaccgagagcaccagatacgccgtgcagctgatcaacgccctgatccaggaccccgccaaggagctggaggacctgatccccaagaaccacatcagaacccccgccagcaccaagagcatccacgccaacttcagcagcggcgtgggcaccaccgccgccagcagcaagaacgccttccccctgggcgcccccaccctggtgaccagccaggccaccaccctgagcaccttccagcccgccaacaagctgaacaagaacgtgcccaccaacgtgagaagcagcttccccgtgagcctgcccctggcctacccccacccccacttcgccctgctggccgcccagaccatgcagcagatcagacaccccagactgcccatggcccagttcggcggcaccttcagccccagccccaacacctggggccccttccccgtgagacccgtgaaccccggcaacaccaacagcagccccaagcacaacaacaccagcagactgcccaaccagaacggcaccgtgctgcccagcgagagcgccggcctggccaccgccagctgccccatcaccgtgagcagcgtggtggccgccagccagcagctgtgcgtgaccaacaccagaacccccagcagcgtgagaaagcagctgttcgcctgcgtgcccaagaccagcccccccgccaccgtgatcagcagcgtgaccagcacctgcagcagcctgcccagcgtgagcagcgcccccatcaccagcggccaggcccccaccaccttcctgcccgccagcaccagccaggcccagctgagcagccagaagatggagagcttcagcgccgtgccccccaccaaggagaaggtgagcacccaggaccagcccatggccaacctgtgcacccccagcagcaccgccaacagctgcagcagcagcgccagcaacacccccggcgcccccgagacccaccccagcagcagccccacccccaccagcagcaacacccaggaggaggcccagcccagcagcgtgagcgacctgagccccatgagcatgcccttcgccagcaacagcgagcccgcccccctgaccctgaccagccccagaatggtggccgccgacaaccaggacaccagcaacctgccccagctggccgtgcccgcccccagagtgagccacagaatgcagcccagaggcagcttctacagcatggtgcccaacgccaccatccaccaggacccccagagcatcttcgtgaccaaccccgtgaccctgtgggaggccgaggccagcggcctgcacgaggtgagaagcctgagacaggcctggtag

SEQ ID NO: 194818 - DNA, 2601 bp, Artificial Sequence
  derived and/or modified sequence
atggacgtgaacagcagcaagtaccccagcctgctgctgcacagccaggaggagaagaccagcaccgccaccagcaagacccagaccagactggagggcgaggtgacccccaacagcctgagcaccagctacaagaccgtgagcctgcccctgagcagccccaacatcaagctgaacctgaccagccccaagagaggccagaagagagaggagggctggaaggaggtggtgagaagaagcaagaagctgagcgtgcccgccagcgtggtgagcagaatcatgggcagaggcggctgcaacatcaccgccatccaggacgtgaccggcgcccacatcgacgtggacaagcagaaggacaagaacggcgagagaatgatcaccatcagaggcggcaccgagagcaccagatacgccgtgcagctgatcaacgccctgatccaggaccccgccaaggagctggaggacctgatccccaagaaccacatcagaacccccgccagcaccaagagcatccacgccaacttcagcagcggcgtgggcaccaccgccgccagcagcaagaacgccttccccctgggcgcccccaccctggtgaccagccaggccaccaccctgagcaccttccagcccgccaacaagctgaacaagaacgtgcccaccaacgtgagaagcagcttccccgtgagcctgcccctggcctacccccacccccacttcgccctgctggccgcccagaccatgcagcagatcagacaccccagactgcccatggcccagttcggcggcaccttcagccccagccccaacacctggggccccttccccgtgagacccgtgaaccccggcaacaccaacagcagccccaagcacaacaacaccagcagactgcccaaccagaacggcaccgtgctgcccagcgagagcgccggcctggccaccgccagctgccccatcaccgtgagcagcgtggtggccgccagccagcagctgtgcgtgaccaacaccagaacccccagcagcgtgagaaagcagctgttcgcctgcgtgcccaagaccagcccccccgccaccgtgatcagcagcgtgaccagcacctgcagcagcctgcccagcgtgagcagcgcccccatcaccagcggccaggcccccaccaccttcctgcccgccagcaccagccaggcccagctgagcagccagaagatggagagcttcagcgccgtgccccccaccaaggagaaggtgagcacccaggaccagcccatggccaacctgtgcacccccagcagcaccgccaacagctgcagcagcagcgccagcaacacccccggcgcccccgagacccaccccagcagcagccccacccccaccagcagcaacacccaggaggaggcccagcccagcagcgtgagcgacctgagccccatgagcatgcccttcgccagcaacagcgagcccgcccccctgaccctgaccagccccagaatggtggccgccgacaaccaggacaccagcaacctgccccagctggccgtgcccgcccccagagtgagccacagaatgcagcccagaggcagcttctacagcatggtgcccaacgccaccatccaccaggacccccagagcatcttcgtgaccaaccccgtgaccctgacccccccccagggcccccccgccgccgtgcagctgagcagcgccgtgaacatcatgaacggcagccagatgcacatcaaccccgccaacaagagcctgccccccaccttcggccccgccaccctgttcaaccacttcagcagcctgttcgacagcagccaggtgcccgccaaccagggctggggcgacggccccctgagcagcagagtggccaccgacgccagcttcaccgtgcagagcgccttcctgggcaacagcgtgctgggccacctggagaacatgcaccccgacaacagcaaggcccccggcttcagaccccccagccagagagtgagcaccagccccgtggccaccagcgccccccccaccctgggccagcccaagggcgtgagcgccagccaggacagaaagatccccccccccatcggcaccgagagactggccagaatcagacagggcggcagcgtggcccaggcccccgccggcaccagcttcgtggcccccgtgggccacagcggcatctggagcttcggcgtgaacgccgtgagcgagggcctgagcggctggagccagagcgtgatgggcaaccaccccatgcaccagcagctgagcgaccccagcaccttcagccagcaccagcccatggagagagacgacagcggcatggtggcccccagcaacatcttccaccagcccatggccagcggcttcgtggacttcagcaagggcctgcccatcagcatgtacggcggcaccatcatccccagccacccccagctggccgacgtgcccggcggccccctgttcaacggcctgcacaaccccgaccccgcctggaaccccatgatcaaggtgatccagaacagcaccgagtgcaccgacgcccagcagatctggcccggcacctgggccccccacatcggcaacatgcacctgaagtacgtgaactag

SEQ ID NO: 194819 - protein, 481 aa, Artificial Sequence
  derived and/or modified sequence
MWLPLVLLLAVLLLAVLCKVYLGLFSGSSPNPFSEDVKRPPAPLVTDKEARKKVLKQAFSANQVPEKLDVVVIGSGFGGLAAAAILAKAGKRVLVLEQHTKAGGCCHTFGKNGLEFDTGIHYIGRMEEGSIGRFILDQITEGQLDWAPLSSPFDIMVLEGPNGRKEYPMYSGEKAYIQGLKEKFPQEEAIIDKYIKLVKVVSSGAPHAILLKFLPLPVVQLLDRCGLLTRFSPFLQASTQSLAEVLQQLGASSELQAVLSYIFPTYGVTPNHSAFSMHALLVNHYMKGGFYPRGGSSEIAFHTIPVIQRAGGAVLTKATVQSVLLDSAGKACGVSVKKGHELVNIYCPIVVSNAGLFNTYEHLLPGNARCLPGVKQQLGTVRPGLGMTSVFICLRGTKEDLHLPSTNYYVYYDTDMDQAMERYVSMPREEAAEHIPLLFFAFPSAKDPTWEDRFPGGECDCRIPTHQPVLSGCSPRCLLRG

SEQ ID NO: 194820 - protein, 610 aa, Artificial Sequence
  derived and/or modified sequence
MWLPLVLLLAVLLLAVLCKVYLGLFSGSSPNPFSEDVKRPPAPLVTDKEARKKVLKQAFSANQVPEKLDVVVIGSGFGGLAAAAILAKAGKRVLVLEQHTKAGGCCHTFGKNGLEFDTGIHYIGRMEEGSIGRFILDQITEGQLDWAPLSSPFDIMVLEGPNGRKEYPMYSGEKAYIQGLKEKFPQEEAIIDKYIKLVKVVSSGAPHAILLKFLPLPVVQLLDRCGLLTRFSPFLQASTQSLAEVLQQLGASSELQAVLSYIFPTYGVTPNHSAFSMHALLVNHYMKGGFYPRGGSSEIAFHTIPVIQRAGGAVLTKATVQSVLLDSAGKACGVSVKKGHELVNIYCPIVVSNAGLFNTYEHLLPGNARCLPGVKQQLGTVRPGLGMTSVFICLRGTKEDLHLPSTNYYVYYDTDMDQAMERYVSMPREEAAEHIPLLFFAFPSAKDPTWEDRFPGRSTMIMLIPTAYEWFEEWQAELKGKRGSDYETFKNSFVEASMSVVLKLFPQLEGKVESVTAGSPLTNQFYLAAPRGACYGADHDLGRLHPCVMASLRAQSPIPNLYLTGQDIFTCGLVGALQGALLCSSAILKRNLYSDLKNLDSRIRAQKKKN

SEQ ID NO: 194821 - protein, 549 aa, Artificial Sequence [sequence omitted]

SEQ ID NO: 194822 - DNA, 1446 bp, Artificial Sequence
  derived and/or modified sequence
atgtggctgcccctggtgctgctgctggccgtgctgctgctggccgtgctgtgcaaggtgtacctgggcctgttcagcggcagcagccccaaccccttcagcgaggacgtgaagagaccccccgcccccctggtgaccgacaaggaggccagaaagaaggtgctgaagcaggccttcagcgccaaccaggtgcccgagaagctggacgtggtggtgatcggcagcggcttcggcggcctggccgccgccgccatcctggccaaggccggcaagagagtgctggtgctggagcagcacaccaaggccggcggctgctgccacaccttcggcaagaacggcctggagttcgacaccggcatccactacatcggcagaatggaggagggcagcatcggcagattcatcctggaccagatcaccgagggccagctggactgggcccccctgagcagccccttcgacatcatggtgctggagggccccaacggcagaaaggagtaccccatgtacagcggcgagaaggcctacatccagggcctgaaggagaagttcccccaggaggaggccatcatcgacaagtacatcaagctggtgaaggtggtgagcagcggcgccccccacgccatcctgctgaagttcctgcccctgcccgtggtgcagctgctggacagatgcggcctgctgaccagattcagccccttcctgcaggccagcacccagagcctggccgaggtgctgcagcagctgggcgccagcagcgagctgcaggccgtgctgagctacatcttccccacctacggcgtgacccccaaccacagcgccttcagcatgcacgccctgctggtgaaccactacatgaagggcggcttctaccccagaggcggcagcagcgagatcgccttccacaccatccccgtgatccagagagccggcggcgccgtgctgaccaaggccaccgtgcagagcgtgctgctggacagcgccggcaaggcctgcggcgtgagcgtgaagaagggccacgagctggtgaacatctactgccccatcgtggtgagcaacgccggcctgttcaacacctacgagcacctgctgcccggcaacgccagatgcctgcccggcgtgaagcagcagctgggcaccgtgagacccggcctgggcatgaccagcgtgttcatctgcctgagaggcaccaaggaggacctgcacctgcccagcaccaactactacgtgtactacgacaccgacatggaccaggccatggagagatacgtgagcatgcccagagaggaggccgccgagcacatccccctgctgttcttcgccttccccagcgccaaggaccccacctgggaggacagattccccggcggcgagtgcgactgcagaatccccacccaccagcccgtgctgagcggctgcagccccagatgcctgctgagaggctag

SEQ ID NO: 194823 - DNA, 1833 bp, Artificial Sequence
  derived and/or modified sequence
atgtggctgcccctggtgctgctgctggccgtgctgctgctggccgtgctgtgcaaggtgtacctgggcctgttcagcggcagcagccccaaccccttcagcgaggacgtgaagagaccccccgcccccctggtgaccgacaaggaggccagaaagaaggtgctgaagcaggccttcagcgccaaccaggtgcccgagaagctggacgtggtggtgatcggcagcggcttcggcggcctggccgccgccgccatcctggccaaggccggcaagagagtgctggtgctggagcagcacaccaaggccggcggctgctgccacaccttcggcaagaacggcctggagttcgacaccggcatccactacatcggcagaatggaggagggcagcatcggcagattcatcctggaccagatcaccgagggccagctggactgggcccccctgagcagccccttcgacatcatggtgctggagggccccaacggcagaaaggagtaccccatgtacagcggcgagaaggcctacatccagggcctgaaggagaagttcccccaggaggaggccatcatcgacaagtacatcaagctggtgaaggtggtgagcagcggcgccccccacgccatcctgctgaagttcctgcccctgcccgtggtgcagctgctggacagatgcggcctgctgaccagattcagccccttcctgcaggccagcacccagagcctggccgaggtgctgcagcagctgggcgccagcagcgagctgcaggccgtgctgagctacatcttccccacctacggcgtgacccccaaccacagcgccttcagcatgcacgccctgctggtgaaccactacatgaagggcggcttctaccccagaggcggcagcagcgagatcgccttccacaccatccccgtgatccagagagccggcggcgccgtgctgaccaaggccaccgtgcagagcgtgctgctggacagcgccggcaaggcctgcggcgtgagcgtgaagaagggccacgagctggtgaacatctactgccccatcgtggtgagcaacgccggcctgttcaacacctacgagcacctgctgcccggcaacgccagatgcctgcccggcgtgaagcagcagctgggcaccgtgagacccggcctgggcatgaccagcgtgttcatctgcctgagaggcaccaaggaggacctgcacctgcccagcaccaactactacgtgtactacgacaccgacatggaccaggccatggagagatacgtgagcatgcccagagaggaggccgccgagcacatccccctgctgttcttcgccttccccagcgccaaggaccccacctgggaggacagattccccggcagaagcaccatgatcatgctgatccccaccgcctacgagtggttcgaggagtggcaggccgagctgaagggcaagagaggcagcgactacgagaccttcaagaacagcttcgtggaggccagcatgagcgtggtgctgaagctgttcccccagctggagggcaaggtggagagcgtgaccgccggcagccccctgaccaaccagttctacctggccgcccccagaggcgcctgctacggcgccgaccacgacctgggcagactgcacccctgcgtgatggccagcctgagagcccagagccccatccccaacctgtacctgaccggccaggacatcttcacctgcggcctggtgggcgccctgcagggcgccctgctgtgcagcagcgccatcctgaagagaaacctgtacagcgacctgaagaacctggacagcagaatcagagcccagaagaagaagaactag

SEQ ID NO: 194824 - DNA, 1650 bp, Artificial Sequence
  derived and/or modified sequence
atgtggctgcccctggtgctgctgctggccgtgctgctgctggccgtgctgtgcaaggtgtacctgggcctgttcagcggcagcagccccaaccccttcagcgaggacgtgaagagaccccccgcccccctggtgaccgacaaggaggccagaaagaaggtgctgaagcagggcatccactacatcggcagaatggaggagggcagcatcggcagattcatcctggaccagatcaccgagggccagctggactgggcccccctgagcagccccttcgacatcatggtgctggagggccccaacggcagaaaggagtaccccatgtacagcggcgagaaggcctacatccagggcctgaaggagaagttcccccaggaggaggccatcatcgacaagtacatcaagctggtgaaggtggtgagcagcggcgccccccacgccatcctgctgaagttcctgcccctgcccgtggtgcagctgctggacagatgcggcctgctgaccagattcagccccttcctgcaggccagcacccagagcctggccgaggtgctgcagcagctgggcgccagcagcgagctgcaggccgtgctgagctacatcttccccacctacggcgtgacccccaaccacagcgccttcagcatgcacgccctgctggtgaaccactacatgaagggcggcttctaccccagaggcggcagcagcgagatcgccttccacaccatccccgtgatccagagagccggcggcgccgtgctgaccaaggccaccgtgcagagcgtgctgctggacagcgccggcaaggcctgcggcgtgagcgtgaagaagggccacgagctggtgaacatctactgccccatcgtggtgagcaacgccggcctgttcaacacctacgagcacctgctgcccggcaacgccagatgcctgcccggcgtgaagcagcagctgggcaccgtgagacccggcctgggcatgaccagcgtgttcatctgcctgagaggcaccaaggaggacctgcacctgcccagcaccaactactacgtgtactacgacaccgacatggaccaggccatggagagatacgtgagcatgcccagagaggaggccgccgagcacatccccctgctgttcttcgccttccccagcgccaaggaccccacctgggaggacagattccccggcagaagcaccatgatcatgctgatccccaccgcctacgagtggttcgaggagtggcaggccgagctgaagggcaagagaggcagcgactacgagaccttcaagaacagcttcgtggaggccagcatgagcgtggtgctgaagctgttcccccagctggagggcaaggtggagagcgtgaccgccggcagccccctgaccaaccagttctacctggccgcccccagaggcgcctgctacggcgccgaccacgacctgggcagactgcacccctgcgtgatggccagcctgagagcccagagccccatccccaacctgtacctgaccggccaggacatcttcacctgcggcctggtgggcgccctgcagggcgccctgctgtgcagcagcgccatcctgaagagaaacctgtacagcgacctgaagaacctggacagcagaatcagagcccagaagaagaagaactag

SEQ ID NO: 194825 - DNA, 1446 bp, Artificial Sequence
  derived and/or modified sequence
atgtggttacctctggtattgctgttagctgtactcttgttggcagtgctgtgcaaggtttacctgggcctcttctcggggagttcaccaaatccgttctcggaagacgtaaagcgtcctcctgccccgctggtgaccgataaggaggctagaaagaaagtgttgaaacaggccttttcggccaaccaggtccccgagaaactggacgtagtggtcatcggctctggattcggaggtctggccgcagccgcaattcttgcgaaggctggcaagcgtgtgctggtcctggaacagcacaccaaggctggaggctgctgccatactttcggcaagaacgggttggaatttgacaccggcatacattacatcggcaggatggaggaaggctctatcgggcgtttcattctcgatcagatcaccgaagggcagcttgactgggctccattaagtagccctttcgacatcatggttttggaaggacccaacggccgtaaggagtaccccatgtacagcggggagaaggcgtacatccaggggttgaaagagaaattcccacaggaggaggccattatagataagtacatcaaactcgtcaaagtggtgtcatcaggtgccccacatgcaattcttctgaagtttctccctcttcccgtggtgcagctcttggaccgatgcggtcttttgaccaggtttagtccctttttgcaggcctcaacacagtcgctcgcggaggttctgcagcagctcggggcctcctccgagctgcaagctgttttgtcctatatcttccctacatacggagttactcctaaccacagtgctttcagtatgcatgccctcctcgtcaaccattacatgaaaggcggcttctaccctcgcggaggttccagcgaaatagctttccacacaatcccggtgatacaaagggctggaggcgctgtcctgacaaaggccactgtacagagcgtgctcctggatagtgccggtaaagcttgtggggtgtctgtgaagaaaggccatgaattggtcaacatctactgtccgatcgtcgtttctaacgccggactgtttaacacgtacgagcacctcctgccagggaatgcccggtgcctcccaggcgtgaaacagcagctgggcacagtgcgcccggggctcggaatgactagcgtatttatctgtcttagaggtaccaaagaggaccttcatctgccctcaactaactattatgtttactatgataccgatatggaccaggctatggagcgctatgtttccatgccccgagaggaagccgccgagcatatccctttactgttcttcgcctttccatcagcaaaagaccctacctgggaagatcgatttcccggcggggaatgtgactgccgcataccgacacaccaacctgtgctgtcagggtgcagtccccggtgtctcctgaggggctag

SEQ ID NO: 194826 - DNA, 1833 bp, Artificial Sequence
  derived and/or modified sequence
atgtggctgcctctggttttgctgcttgctgtgctgctactcgctgtgctttgtaaagtgtacctgggccttttcagtggctcatcgccaaatcccttcagcgaggatgttaagaggccacccgcacctttagtaactgacaaggaagccagaaagaaggtcctgaagcaggcattttctgctaaccaggttcccgaaaagctcgatgtcgttgttatcggctctgggttcggcggcttggccgctgcggcaatcttagctaaagctggcaaacgcgtgttggtcttggagcagcataccaaggcaggaggctgttgccacacgttcggcaagaacggcctcgagttcgacacaggcatccactatattggcagaatggaagaaggcagcatcgggaggtttattctggatcagatcaccgagggtcagctcgattgggctcctttgagttcaccgtttgatatcatggtcctggaaggtcctaatgggagaaaggagtacccaatgtactcaggcgagaaggcttacatacaagggcttaaagaaaaattcccccaggaagaggctattatagacaaatatattaagctcgtgaaagttgtgtcttcaggcgcgcctcacgccattctgctgaaatttctgcctctgcccgtcgtccaattgctggaccggtgtgggctactgactcgcttttcgccgtttctccaggcgtccacgcagtcattagctgaggtgctgcagcagctgggggcctcctctgagctgcaggcagtgctgagctacatcttcccaacttatggcgtcacacctaatcactctgccttcagtatgcacgctctcctggtgaatcactatatgaaaggcggcttctatccaagaggtggctcaagcgagattgcgtttcatactatcccagttattcagcgcgccggaggtgctgtgctgacaaaagcgaccgtgcagtccgtcctgctggattccgccgggaaagcttgtggtgtaagcgttaaaaagggccatgaactcgttaacatctactgccccatcgtcgtctcaaacgcgggcctctttaacacctacgaacatctgctaccaggtaatgcccggtgtctgcctggagttaagcagcagctaggaactgtcagaccggggttaggcatgacatctgtgtttatttgccttcggggtacaaaggaggatcttcacttaccatcgacaaattactacgtgtattacgacactgatatggaccaggccatggagagatatgtgtcgatgccacgggaggaagctgccgaacatattccattactcttttttgctttcccctcggcaaaggatcccacctgggaggaccgctttccagggcgcagtaccatgatcatgcttattccaacggcatacgaatggtttgaggagtggcaagcagagttgaaaggcaagcgcggcagcgactacgagacttttaagaattcttttgtggaagcatctatgtcggtggttctgaaactgttccctcagctggagggtaaagtggagtccgtgactgcgggtagccccctcacgaatcagttctatttagcggccccaaggggcgcgtgctatggagctgatcacgacctagggagactgcatccctgtgttatggctagcctgcgcgcacagtcccctatacctaacctatacctcaccggacaagatatctttacctgcgggctggtgggagcgctgcaaggggcactcctctgttcttctgcaatcctcaaaagaaatctgtacagcgacctcaaaaacctggattctagaatccgagcgcaaaagaagaaaaactag

SEQ ID NO: 194827 - DNA, 1650 bp, Artificial Sequence
  derived and/or modified sequence
atgtggttacccctggtgctgctcctggccgtcctgctcctggccgtcttgtgcaaggtgtatttaggactgttctccggttcaagtcctaatccttttagtgaagatgtgaaacggccccccgcaccacttgtgacggacaaagaagccagaaagaaagttcttaagcagggcatccactacataggacgcatggaggaggggtcaatcgggcgatttatactcgatcagataactgagggacagttggactgggccccactgagctccccctttgacatcatggtgctggaggggcctaatggacgaaaggaatatcccatgtattctggtgagaaggcatatattcaagggctgaaggaaaagttccctcaggaggaagctattatcgacaaatacataaagctcgtgaaggttgtctcgtcaggagcgccacatgccatcttgctgaagtttctgccgctgcctgtcgttcagctcctggaccggtgcgggttgttaacacggttcagccctttcctgcaggcctctacacagtccctggccgaagttctccagcagctcggggcctcgtccgaactccaggccgtattgagctacatctttcctacatacggagttacacccaaccactctgcattcagcatgcacgcgctcctggtgaatcattatatgaagggcggtttctatccccgtggtggctcgtccgagattgcattccacaccatccctgtcattcagagagctggcggcgccgttctgaccaaggccactgtccagtctgtgctgctggatagtgccggaaaagcctgcggagtgtccgtcaaaaagggtcatgaacttgttaatatctattgtcctatagtggtttctaatgcgggcttatttaatacttatgagcatctgctccccggtaacgccagatgtttaccgggcgtcaagcaacagctgggtacagtccgtccaggccttggaatgactagcgtgtttatctgccttaggggaacaaaggaagatctgcacctccctagcaccaattactacgtgtactacgacacagatatggaccaggccatggagcgctacgttagcatgcccagagaagaagctgccgaacatattccgctccttttttttgcctttccaagtgccaaagacccaacgtgggaggatcgctttcctgggaggagtaccatgattatgctgattccgaccgcctacgagtggtttgaagagtggcaggccgaactgaaagggaaacggggtagcgattacgagacctttaaaaactctttcgtcgaggcttccatgtcggtggttttgaaattattcccccagttggagggaaaggtagaaagcgtgaccgcgggatctcccctgacaaaccagttctacctggcggcacctaggggagcctgttacggtgcagaccacgacttgggtcgattacatccctgtgtgatggcttcactgcgcgcccagagtccaattcccaacttgtatctgaccggccaggacatatttacatgcggtcttgtgggggcactgcaaggggccttactgtgctcttctgccatcctgaagaggaatttgtacagcgacctgaagaatctcgatagccgcatcagagctcagaaaaaaaagaattag

SEQ ID NO: 194828 - DNA, 1446 bp, Artificial Sequence
  derived and/or modified sequence
atgtggctgcccctggtgctgctgctggccgtgctgctgctggccgtgctgtgcaaggtgtacctgggcctcttcagcggcagcagccccaaccccttctctgaagatgtgaagaggcccccagcccccctggtgacagacaaggaggccaggaagaaggtgctgaagcaggccttcagcgccaaccaggtgcctgagaagctggatgtggtggtgattggcagcggctttggaggcctggccgctgctgccatcctggccaaggccggcaagagggtgctggtgctggagcagcacaccaaggccggcggctgctgccacaccttcggcaagaatggcctggagtttgacaccggcatccactacatcggccgcatggaggagggcagcatcggccgcttcatcctggaccagatcacagagggccagctggactgggcccccctgagcagcccctttgacatcatggtgctggagggccccaacggcaggaaggagtaccccatgtacagcggggagaaggcctacatccagggcctgaaggagaagttcccccaggaggaggccatcatcgacaagtacatcaagctggtgaaggtggtgtcctctggggcccctcatgccatcctgctgaagttcctgcccctgcctgtggtgcagctgctggacagatgtggcctgctgacccgcttcagccccttcctgcaggccagcacccagagcctggccgaggtgctgcagcagctgggcgccagcagcgagctgcaggccgtgctgagctacatcttccccacctacggcgtgacccccaaccacagcgccttctccatgcacgccctgctggtgaaccactacatgaagggcggcttctacccccggggcggcagcagcgagatcgccttccacaccatccctgtgatccagagagctgggggcgctgtgctgaccaaggccaccgtgcagagcgtgctgctggacagcgctgggaaggcctgtggggtgtctgtgaagaagggccacgagctggtgaacatctactgccccatcgtggtgtccaatgccggcctcttcaacacctatgagcacctgctgcctggaaatgcccgctgcctgcccggggtgaagcagcagctgggcaccgtgcggcccggcctgggcatgacctctgtgttcatctgcctgcggggcaccaaggaggacctgcacctgcccagcaccaactactacgtgtactatgacacagacatggaccaggccatggagagatatgtgtccatgccccgggaggaggccgctgagcacatccccctgctcttctttgccttccccagcgccaaggaccccacctgggaggaccgcttccctggaggagaatgtgactgccgcatccccacccaccagcctgtgctgagcggctgcagcccccgctgcctgctgcggggctag

SEQ ID NO: 194829 - DNA, 1833 bp, Artificial Sequence
  derived and/or modified sequence
atgtggctgcccctggtgctgctgctggccgtgctgctgctggccgtgctgtgcaaggtgtacctgggcctcttcagcggcagcagccccaaccccttctctgaagatgtgaagaggcccccagcccccctggtgacagacaaggaggccaggaagaaggtgctgaagcaggccttcagcgccaaccaggtgcctgagaagctggatgtggtggtgattggcagcggctttggaggcctggccgctgctgccatcctggccaaggccggcaagagggtgctggtgctggagcagcacaccaaggccggcggctgctgccacaccttcggcaagaatggcctggagtttgacaccggcatccactacatcggccgcatggaggagggcagcatcggccgcttcatcctggaccagatcacagagggccagctggactgggcccccctgagcagcccctttgacatcatggtgctggagggccccaacggcaggaaggagtaccccatgtacagcggggagaaggcctacatccagggcctgaaggagaagttcccccaggaggaggccatcatcgacaagtacatcaagctggtgaaggtggtgtcctctggggcccctcatgccatcctgctgaagttcctgcccctgcctgtggtgcagctgctggacagatgtggcctgctgacccgcttcagccccttcctgcaggccagcacccagagcctggccgaggtgctgcagcagctgggcgccagcagcgagctgcaggccgtgctgagctacatcttccccacctacggcgtgacccccaaccacagcgccttctccatgcacgccctgctggtgaaccactacatgaagggcggcttctacccccggggcggcagcagcgagatcgccttccacaccatccctgtgatccagagagctgggggcgctgtgctgaccaaggccaccgtgcagagcgtgctgctggacagcgctgggaaggcctgtggggtgtctgtgaagaagggccacgagctggtgaacatctactgccccatcgtggtgtccaatgccggcctcttcaacacctatgagcacctgctgcctggaaatgcccgctgcctgcccggggtgaagcagcagctgggcaccgtgcggcccggcctgggcatgacctctgtgttcatctgcctgcggggcaccaaggaggacctgcacctgcccagcaccaactactacgtgtactatgacacagacatggaccaggccatggagagatatgtgtccatgccccgggaggaggccgctgagcacatccccctgctcttctttgccttccccagcgccaaggaccccacctgggaggaccgcttccctggccgcagcaccatgatcatgctgatccccacagcctatgagtggtttgaggagtggcaggccgagctgaagggcaagaggggcagtgactatgagaccttcaagaacagctttgtggaggcctccatgtctgtggtgctgaagctgttcccccagctggagggcaaggtggagagcgtgacagctggcagccccctgaccaaccagttctacctggccgcccccaggggggcctgctatggagctgaccatgacctgggccgcctgcacccctgtgtgatggccagcctgcgggcccagagccccatccccaacctgtacctgaccggccaggacatcttcacctgtggcctggtgggcgccctgcagggcgccctgctgtgcagcagcgccatcctgaagaggaacctgtacagcgacctgaagaacctggacagccgcatccgggcccagaagaagaagaactag

SEQ ID NO: 194830 - DNA, 1650 bp, Artificial Sequence
  derived and/or modified sequence
atgtggctgcccctggtgctgctgctggccgtgctgctgctggccgtgctgtgcaaggtgtacctgggcctcttcagcggcagcagccccaaccccttctctgaagatgtgaagaggcccccagcccccctggtgacagacaaggaggccaggaagaaggtgctgaagcagggcatccactacatcggccgcatggaggagggcagcatcggccgcttcatcctggaccagatcacagagggccagctggactgggcccccctgagcagcccctttgacatcatggtgctggagggccccaatggaaggaaggagtaccccatgtacagcggggagaaggcctacatccagggcctgaaggagaagttcccccaggaggaggccatcatcgacaagtacatcaagctggtgaaggtggtgagcagcggggccccccacgccatcctgctgaagttcctgcccctgcctgtggtgcagctgctggacagatgtggcctgctgacccgcttcagccccttcctgcaggccagcacccagagcctggccgaggtgctgcagcagctgggcgccagcagcgagctgcaggccgtgctgagctacatcttccccacctatggagtgacccccaaccacagcgccttctccatgcacgccctgctggtgaaccactacatgaagggcggcttctacccccggggcggcagcagcgagatcgccttccacaccatccctgtgatccagagagctggaggagctgtgctgaccaaggccaccgtgcagagcgtgctgctggacagcgctgggaaggcctgtggggtgtctgtgaagaagggccacgagctggtgaacatctactgccccatcgtggtgtccaatgccggcctcttcaacacctatgagcacctgctgcctggaaatgcccgctgcctgcccggggtgaagcagcagctgggcaccgtgcggcccggcctgggcatgaccagcgtcttcatctgcctgcggggcaccaaggaggacctgcacctgcccagcaccaactactacgtgtactatgacacagacatggaccaggccatggagcgctacgtgtccatgccccgggaggaggccgctgagcacatccccctgctcttctttgccttccccagcgccaaggaccccacctgggaggaccgcttccctggccgcagcaccatgatcatgctgatccccacagcctatgagtggtttgaggagtggcaggccgagctgaagggcaagaggggcagtgactatgagaccttcaagaacagctttgtggaggcctccatgtctgtggtgctgaagctgttcccccagctggagggcaaggtggagagcgtgacagctggcagccccctgaccaaccagttctacctggccgcccccaggggggcctgctacggggctgaccatgacctgggccgcctgcacccctgtgtgatggccagcctgcgggcccagagccccatccccaacctgtacctgaccggccaggacatcttcacctgtggcctggtgggcgccctgcagggcgccctgctgtgcagcagcgccatcctgaagaggaacctgtacagcgacctgaagaacctggacagccgcatccgggcccagaagaagaagaactag

SEQ ID NO: 194831 - DNA, 1446 bp, Artificial Sequence
  derived and/or modified sequence
atgtggctgcccctggtgctgctgctggccgtgctgctgctggccgtcctgtgtaaggtgtatcttggactgtttagcggcagcagcccgaatcccttttccgaagatgtgaagagaccccccgccccgttagttacggacaaggaggcgcgcaaaaaagtcttgaaacaggcctttagtgcgaatcaggtgccagagaagcttgatgtggtcgtgattggatcaggatttgggggtttagcagccgccgctatattggcaaaagcaggtaagcgggtcctcgtgttagagcagcataccaaggccgggggctgctgtcacacttttgggaagaatggcctggagttcgacactggaattcactacattgggcggatggaggaaggttcaattggcagatttatacttgaccaaatcacagagggccagcttgactgggcccccctgtcaagtccattcgacataatggtcttggaaggtcctaatggccggaaagagtacccaatgtatagtggagaaaaggcctatatccaaggacttaaagaaaagttcccgcaggaagaggctataattgacaagtatatcaagctcgtaaaggtcgtgtcaagtggcgctccacatgccattttgctgaagtttctgccactgcctgtcgtgcagctgcttgatcggtgtggattgctcacccgatttagtccctttctccaagcgagcacacagtccctggccgaggtactgcagcagctcggcgctagctcagaactccaagctgtgctgtcatatatcttccctacatatggtgtaactcccaatcatagtgcctttagtatgcatgccctgttggtgaatcactacatgaaggggggattttaccccaggggtggatcatctgaaatcgcttttcacactattcccgtgatccagagagctggcggggccgtgttaacgaaagccactgttcagtcggttcttctggattcagccggtaaggcctgcggtgtaagcgtgaagaaaggacatgaattggtgaacatctactgcccaatagtggtgtctaacgccggactgtttaacacctacgaacatctcctccccgggaacgcccgatgcctccctggtgttaagcagcagttaggcaccgtgaggcccggccttggaatgaccagcgtcttcatatgcctgagagggacaaaagaggacctgcacctaccaagtacgaattattacgtgtactatgacacagacatggaccaagcaatggaacgttacgtgagtatgcctagggaagaagctgccgagcatatccccttgttattcttcgcttttccctccgcgaaggacccaacctgggaggacagatttccaggcggtgagtgcgactgcaggatcccaactcatcagcccgtgctgagtggctgcagtccgcgatgtttactgcgcggatag

SEQ ID NO: 194832 - DNA, 1833 bp, Artificial Sequence
  derived and/or modified sequence
atgtggctgcccctggtgctgctgctggccgtgctgctgctggccgttctttgtaaggtgtatcttggcttatttagcgggagctcacccaacccattcagcgaggacgtgaagagacctccagcccctttggtgaccgacaaggaagcaagaaagaaagtgctgaaacaagccttctctgcaaatcaggtgcctgaaaagttagatgtggtcgtgataggctccggattcgggggacttgcagcagccgccattctggccaaggccggaaagagggtgcttgtcctggaacaacatacaaaggccgggggatgttgtcacacgtttgggaaaaatggcctggaattcgatacaggtatacactacattggccggatggaggaggggagtatcggtcgctttatcctcgaccagattacggagggccagctggactgggcacccttgtcaagtccatttgacatcatggttctggaaggaccgaacggcaggaaagaataccctatgtattctggtgaaaaggcctatattcagggactcaaggagaagtttccacaggaagaagccatcattgacaaatacataaaactcgttaaggtggtgtcgtctggggcaccccacgccattttgttgaaatttctgcccctcccagtggtgcagcttctggaccgttgtggattgctaacccgattcagcccttttctgcaagctagtacccagtcactggctgaggtgttgcaacagctcggagcctcttccgagctgcaggccgtgctgtcttacatatttccaacctatggagtaacacccaatcacagcgccttttcgatgcatgccctgcttgtgaaccattatatgaagggtggcttttacccaagggggggctcttctgaaatcgccttccacaccattcctgtgatccaaagagccgggggagcggtgctaaccaaggcgactgtccaatctgtactgctggacagcgcgggcaaggcatgtggcgtgagtgtgaaaaaggggcatgaactagtgaacatctattgccctattgtagtgagcaacgctggcctcttcaacacttacgaacacctgctgccaggaaacgccagatgccttcctggggtgaaacagcagttggggacggttcgacctggcctgggaatgacctccgtcttcatttgtttacggggcactaaggaggatctgcacttgcccagcactaattattatgtgtactatgacactgacatggatcaggccatggagcgatacgtttccatgcctcgggaggaggcagcagaacacatacccctgctgtttttcgcgtttccatcagctaaagatccaacctgggaggatcggttccccggccgttccactatgatcatgctcattcctacggcctacgagtggttcgaggagtggcaagctgagttgaaaggtaagcgcggatccgactatgagactttcaagaacagcttcgtcgaagcatccatgtcagtggtgttgaaactgtttcctcagctggagggcaaggtggagagtgtgacagccgggagccctttgaccaaccagttttatttggccgctccacggggtgcttgttatggcgccgatcatgacctgggtcgccttcacccttgcgttatggcctctctcagggcacagtcccccattcctaacctatatctaactgggcaagatatattcacatgcgggttggtgggggccctgcagggcgccttgctgtgtagctctgcgatactcaagcggaatctgtactcggatcttaagaacctcgactctcgaattagagcgcaaaagaaaaagaattag

SEQ ID NO: 194833 - DNA, 1650 bp, Artificial Sequence
  derived and/or modified sequence
atgtggctgcccctggtgctgctgctggccgtgctgctgctggccgtgctatgcaaggtgtatttgggcttgttcagcggcagctcaccaaaccctttctccgaggatgtgaaaagacccccagcaccactggtgacagataaggaggcacggaaaaaagtgctgaagcagggtatccactatatcgggagaatggaagaagggagtataggccgcttcatcctcgaccagatcacggagggacagcttgattgggcacccctcagcagtcctttcgacattatggttttagagggtcccaatggaagaaaggagtaccccatgtactctggtgagaaggcttacatccagggtctcaaggagaaattcccacaggaagaggccatcatcgacaaatatattaagttagttaaagtagtctcaagcggcgcacctcatgccatccttctaaagtttttgccattgcccgtggttcaacttctggacagatgtggactgctaacccgtttttcaccgttccttcaggcctctactcagtcactggcagaggtactacaacagcttggcgctagttcagagctccaagcagtcctaagttacattttcccaacgtacggcgtcacaccgaaccactccgcatttagtatgcacgcactgcttgtgaatcattacatgaaggggggattttatccacggggagggagttccgaaatagccttccacaccatcccagtcattcagcgagcaggaggggcagtgttgacaaaggctacagtgcagagcgttctgctggattcagcaggcaaggcctgtggcgtgtccgtcaaaaaaggacacgagctcgtgaacatctattgccctatcgtggttagcaacgcagggctgttcaacacttatgaacacttgctgcctggcaacgctaggtgtctgcctggtgtgaagcaacagctgggcaccgtgaggcccggtctggggatgacgtccgtctttatttgcctcagggggaccaaagaagacctgcatttgcctagtactaactactatgtctattacgacactgacatggatcaagccatggaaagatacgtaagcatgccacgagaagaggccgcagagcatattcccctccttttcttcgcattcccctctgctaaagatcccacttgggaggaccggttccctggccgcagcaccatgataatgcttatccccacggcctacgagtggttcgaggagtggcaagccgaactgaaaggcaagaggggctctgactatgagactttcaagaactcattcgtagaggcgtccatgtccgttgtgctgaagctgtttccacagctggaaggcaaggtcgaaagcgttactgctggatctcctctgactaaccaattctatttggcagcgccacgcggagcttgctacggagcagatcatgatctcgggaggctgcacccctgcgtgatggctagcctgcgagctcagagcccaattccaaatttgtacctgacgggacaggatatttttacctgcgggctcgtgggcgccctgcagggggcattgctctgttcttccgccatcctgaagagaaatttgtacagcgacctgaaaaacctagactcgcggattagggctcagaaaaaaaaaaactag

SEQ ID NO: 194834 - DNA, 1446 bp, Artificial Sequence
  derived and/or modified sequence
atgtggttaccattggtgcttctgttggccgtcttgcttctggccgtgctctgtaaagtgtatctgggcctgttcagtggctcttctccaaacccttttagcgaggatgtcaagcgcccacccgctcccctggtgaccgacaaggaagcacggaagaaggtgctgaagcaagcattctcagcaaatcaggttcccgagaagcttgatgtggtggtgatcggatccgggtttggaggcttggcagctgcggcaatactcgctaaggccggtaaacgcgtgcttgttctggaacagcatactaaggcagggggttgctgccacacgtttggaaagaacggtctcgagtttgacaccggcattcactatattggcagaatggaggagggctccatcggtcggttcatccttgaccagatcaccgaaggccaacttgattgggcacctttgtccagtccttttgacatcatggtgcttgagggcccaaacggaagaaaggagtatcctatgtattctggtgaaaaagcctacattcagggtctgaaagaaaagtttcctcaggaagaagctattatcgataagtacataaagctggtgaaagtggtgtcatccggagcgcctcacgccatcctcctgaaatttcttcctttgccggtagtacagctgctggatagatgtggactgctcaccagatttagcccatttcttcaggcgagtactcagagcctggccgaagttctgcagcagttaggagcttcgagcgaactgcaagcagttctgtcatatattttccccacatatggagttaccccgaatcacagcgccttttctatgcacgcgctgctggtgaatcattacatgaaaggaggtttctatcccaggggtgggtcaagcgagatcgctttccataccatccccgtgattcaacgcgcaggcggagcggtgctgaccaaagcgacagtccagtccgtcctgttagactcagctggaaaagcttgcggtgtgtccgtcaagaagggacatgaactggtcaacatctattgtccaatagtggtatcaaatgctggcctgtttaatacatacgagcatttgctgccaggcaacgctcggtgcttaccaggcgttaaacagcagctcggtaccgtgaggcctggcttaggcatgacgtctgttttcatctgcttacggggaactaaggaagacctgcacctcccctccaccaattattatgtgtattacgataccgacatggaccaagccatggagcgctacgtgagtatgccaagagaggaagcagccgaacatatacccctcctgttcttcgcctttccatcggctaaggacccaacatgggaagacaggttccccggaggggaatgcgactgtcgtatccctacccaccagcccgtcctctcgggttgcagcccacggtgccttttaagagggtag

SEQ ID NO: 194835 - DNA, 1833 bp, Artificial Sequence
  derived and/or modified sequence
atgtggctgcctctggtactgctactggcggtgctgttgttggctgtcttgtgtaaggtctacttgggtctgtttagtgggagcagccccaacccctttagtgaggatgtcaagcgccctcctgcccctctagtgaccgacaaagaagctcgtaagaaggtgctcaagcaagcctttagcgccaatcaggtgcctgaaaagctggatgtagtggtgatcggatcaggcttcggcggtctggcagctgccgctatactcgctaaagctggaaaaagggttttggtgctggaacagcatactaaggccggaggctgttgccacaccttcgggaagaatggcctggagtttgacaccggaatccactacatcgggcgtatggaggagggaagcattggtcgattcatcctggaccagattaccgaaggacaactggactgggccccactctcttctccttttgacatcatggtgctcgagggaccaaatgggcgaaaggaataccccatgtactcaggggagaaggcttatatccagggactgaaggagaagtttccgcaagaggaggcaattatcgataaatacatcaagctcgtcaaagtggtaagctccggggctcctcacgctatactcctaaagttcctgccactcccggtagttcagcttctcgatcgatgtgggctactgaccagattttcgccattcctacaagcttctacccaaagcctggccgaagtcctgcaacaattgggcgcatctagcgaacttcaggccgtcctgagttacattttccctacgtacggggtcaccccaaaccacagcgcattctctatgcatgcgctgcttgtgaaccattatatgaaagggggtttttatccgagggggggttcatccgaaatcgccttccatacaattcccgtgatccagcgagccggtggcgctgtcctcacaaaagccaccgtccagagtgtgctccttgactctgcaggaaaggcctgcggggtttcagtaaagaaggggcacgagctcgtgaacatatattgcccaatcgtcgtgtcaaacgctggtctgtttaacacctatgagcacctgcttccaggaaacgccaggtgtctgcctggagtcaaacagcagttaggcactgtgcgccctggactagggatgaccagcgtctttatctgcctgagaggaacaaaagaggacctgcaccttcctagcaccaattactacgtgtattatgataccgatatggaccaagcgatggagcgttacgtgtctatgcctagggaggaagccgctgagcacattccactccttttttttgcgtttccatccgctaaggatcctacatgggaggatcgctttccaggccgatcaacaatgattatgctgattcccaccgcatatgaatggttcgaggagtggcaggcagagttaaagggtaagcgaggatccgattacgaaacattcaaaaattcgttcgtagaagcttctatgtctgtggtactcaagttatttccacagctggaaggcaaagtcgaatccgtgacggctggctctcctctcaccaatcaattttatctggccgctcctcgcggagcatgctacggggcagaccacgatctggggaggctccatccctgcgttatggcaagcctccgcgctcagagtcctatccccaatctctatctcaccggtcaggatatcttcacctgtgggctcgtgggagctctgcagggcgcactcctgtgcagttctgcaatactcaaacggaatctctattccgatctgaagaatttggattcccgaatcagggctcagaagaagaagaattag

SEQ ID NO: 194836 - DNA, 1650 bp, Artificial Sequence
  derived and/or modified sequence
atgtggcttcccttagtcctgctgctcgccgtcctacttctggccgttctgtgtaaagtgtacctcggattgttttcagggtcttcccctaatccttttagcgaagacgttaaacggccaccggctcccctcgtcacagataaggaggccagaaagaaagtgcttaagcaaggtatccattacattggcagaatggaagaaggttcaataggacggtttattttagatcagatcacagaagggcaactagattgggcaccgctgagctccccctttgacataatggtgcttgagggtcccaatgggagaaaagagtacccgatgtactcaggagagaaagcctacatccagggactgaaagagaagtttccacaggaagaagctattatcgataagtacatcaaacttgtgaaagttgtgtcttcaggggctcctcacgctatcctgctgaaattcctcccattaccagttgtgcagctcctcgatagatgcggtcttttgaccagattctccccgttcctgcaggcatccacccagtccttggccgaagtgttgcaacagctcggtgcctcgtcagagcttcaggcggtgctgtcttacattttccccacttatggggttacacctaaccacagtgccttctctatgcatgctttgttggtcaatcactatatgaagggaggcttctatcctcgcggtggaagcagtgagatagccttccacacaatacccgtcatccagagagcaggcggtgccgtcttaaccaaagctaccgttcaaagcgtgttgcttgattctgcgggtaaggcatgtggggtgtcagtaaaaaagggccacgagctcgtgaacatttattgtccgatcgtggtgtccaatgctggcctgttcaacacctacgagcaccttctgcccggaaacgccagatgcctgcccggtgtcaagcagcagttgggcaccgtgaggccaggactgggcatgacatccgtgtttatttgtttgaggggcaccaaggaagatctgcatttgccaagcaccaactactacgtttactatgatactgacatggaccaggcaatggaacggtatgtgtccatgccccgagaggaggcggcagagcatataccacttctgttcttcgctttcccttccgcaaaggacccgacatgggaggaccgctttcctggacgctcaacaatgattatgcttatacctactgcgtatgaatggttcgaagaatggcaagccgaactgaaaggcaagagaggctccgactacgagacattcaagaactccttcgtagaagcctccatgagtgtggtgttgaagctgtttccgcagcttgagggcaaggtggaaagcgttaccgctggcagccccctcaccaaccagttctacctggccgcaccgaggggcgcttgttacggtgccgaccatgatctgggccgactgcatccctgcgtgatggccagcctgagagctcagagcccaatccctaacctgtacttaactgggcaggacatattcacctgcggcctggttggggctttgcagggggctctattgtgcagttcggccattctcaaacggaatctgtatagcgacctcaaaaacctggattcccgaatacgcgctcagaagaaaaaaaactag

SEQ ID NO: 194837 - DNA, 2834 bp, Artificial Sequence
  derived and/or modified sequence
atttacccgacccgacgccggcgtgatgtggcttccgctggtgctgctcctggctgtgctgctgctggccgtcctctgcaaagtttacttgggactattctctggcagctccccgaatcctttctccgaagatgtcaaacggcccccagcgcccctggtaactgacaaggaggccaggaagaaggttctcaaacaagctttttcagccaaccaagtgccggagaagctggatgtggtggtaattggcagtggctttgggggcctggctgcagctgcaattctagctaaagctggcaagcgagtcctggtgctggaacaacataccaaggcagggggctgctgtcatacctttggaaagaatggccttgaatttgacacaggaatccattacattgggcgtatggaagagggcagcattggccgttttatcttggaccagatcactgaagggcagctggactgggctcccctgtcctctccttttgacatcatggtactggaagggcccaatggccgaaaggagtaccccatgtacagtggagagaaagcctacattcagggcctcaaggagaagtttccacaggaggaagctatcattgacaagtatataaagctggttaaggtggtatccagtggagcccctcatgccatcctgttgaaattcctcccattgcccgtggttcagctcctcgacaggtgtgggctgctgactcgtttctctccattccttcaagcatccacccagagcctggctgaggtcctgcagcagctgggggcctcctctgagctccaggcagtactcagctacatcttccccacttacggtgtcacccccaaccacagtgccttttccatgcacgccctgctggtcaaccactacatgaaaggaggcttttatccccgagggggttccagtgaaattgccttccacaccatccctgtgattcagcgggctgggggcgctgtcctcacaaaggccactgtgcagagtgtgttgctggactcagctgggaaagcctgtggtgtcagtgtgaagaaggggcatgagctggtgaacatctattgccccatcgtggtctccaacgcaggactgttcaacacctatgaacacctactgccggggaacgcccgctgcctgccaggtgtgaagcagcaactggggacggtgcggcccggcttaggcatgacctctgttttcatctgcctgcgaggcaccaaggaagacctgcatctgccgtccaccaactactatgtttactatgacacggacatggaccaggcgatggagcgctacgtctccatgcccagggaagaggctgcggaacacatccctcttctcttcttcgctttcccatcagccaaagatccgacctgggaggaccgattcccaggtggagagtgtgactgcaggatccccactcaccaaccagttctatctggctgctccccgaggtgcctgctacggggctgaccatgacctgggccgcctgcacccttgtgtgatggcctccttgagggcccagagccccatccccaacctctatctgacaggccaggatatcttcacctgtggactggtcggggccctgcaaggtgccctgctgtgcagcagcgccatcctgaagcggaacttgtactcagaccttaagaatcttgattctaggatccgggcacagaagaaaaagaattagttccatcagggaggagtcagaggaatttgcccaatggctggggcatctcccttgacttacccataatgtctttctgcattagttccttgcacgtataaagcactctaatttggttctgatgcctgaagagaggcctagtttaaatcacaattccgaatctggggcaatggaatcactgcttccagctggggcaggtgagatctttacgccttttataacatgccatccctactaataggatattgacttggatagcttgatgtctcatgacgagcggcgctctgcatccctcacccatgcctcctaactcagtgatcaaagcgaatattccatctgtggatagaacccctggcagtgttgtcagctcaacctggtgggttcagttctgtcctgaggcttctgctctcattcatttagtgctacgctgcacagttctacactgtcaagggaaaagggagactaatgaggcttaactcaaaacctgggcgtggttttggttgccattccataggtttggagagctctagatctcttttgtgctgggttcagtggctcttcaggggacaggaaatgcctgtgtctggccagtgtggttctggagctttggggtaacagcaggatccatcagttagtagggtgcatgtcagatgatcatatccaattcatatggaagtcccgggtctgtcttccttatcatcggggtggcagctggttctcaatgtgccagcagggactcagtacctgagcctcaatcaagccttatccaccaaatacacagggaagggtgatgcagggaagggtgacatcaggagtcagggcatggactggtaagatgaatactttgctgggctgaagcaggctgcagggcattccagccaagggcacagcaggggacagtgcagggaggtgtggggtaagggagggaagtcacatcagaaaagggaaagccacggaatgtgtgtgaagcccagaaatggcatttgcagttaattagcacatgtgagggttagacaggtaggtgaatgcaagctcaaggtttggaaaaatgacttttcagttatgtctttggtatcagacatacgaaaggtctctttgtagttcgtgttaatgtaacattaataaatttattgattccattgcttt

SEQ ID NO: 194838 - DNA, 3100 bp, Artificial Sequence
  derived and/or modified sequence
tcaaagctgcctccgcctcctgactggagagcgaactagcccgggcggagccacagtcctagaggctgagcgcagtcggagctgtcccatttacccgacccgacgccggcgtgatgtggcttccgctggtgctgctcctggctgtgctgctgctggccgtcctctgcaaagtttacttgggactattctctggcagctccccgaatcctttctccgaagatgtcaaacggcccccagcgcccctggtaactgacaaggaggccaggaagaaggttctcaaacaagctttttcagccaaccaagtgccggagaagctggatgtggtggtaattggcagtggctttgggggcctggctgcagctgcaattctagctaaagctggcaagcgagtcctggtgctggaacaacataccaaggcagggggctgctgtcatacctttggaaagaatggccttgaatttgacacaggaatccattacattgggcgtatggaagagggcagcattggccgttttatcttggaccagatcactgaagggcagctggactgggctcccctgtcctctccttttgacatcatggtactggaagggcccaatggccgaaaggagtaccccatgtacagtggagagaaagcctacattcagggcctcaaggagaagtttccacaggaggaagctatcattgacaagtatataaagctggttaaggtggtatccagtggagcccctcatgccatcctgttgaaattcctcccattgcccgtggttcagctcctcgacaggtgtgggctgctgactcgtttctctccattccttcaagcatccacccagagcctggctgaggtcctgcagcagctgggggcctcctctgagctccaggcagtactcagctacatcttccccacttacggtgtcacccccaaccacagtgccttttccatgcacgccctgctggtcaaccactacatgaaaggaggcttttatccccgagggggttccagtgaaattgccttccacaccatccctgtgattcagcgggctgggggcgctgtcctcacaaaggccactgtgcagagtgtgttgctggactcagctgggaaagcctgtggtgtcagtgtgaagaaggggcatgagctggtgaacatctattgccccatcgtggtctccaacgcaggactgttcaacacctatgaacacctactgccggggaacgcccgctgcctgccaggtgtgaagcagcaactggggacggtgcggcccggcttaggcatgacctctgttttcatctgcctgcgaggcaccaaggaagacctgcatctgccgtccaccaactactatgtttactatgacacggacatggaccaggcgatggagcgctacgtctccatgcccagggaagaggctgcggaacacatccctcttctcttcttcgctttcccatcagccaaagatccgacctgggaggaccgattcccaggccggtccaccatgatcatgctcatacccactgcctacgagtggtttgaggagtggcaggcggagctgaagggaaagcggggcagtgactatgagaccttcaaaaactcctttgtggaagcctctatgtcagtggtcctgaaactgttcccacagctggaggggaaggtggagagtgtgactgcaggatccccactcaccaaccagttctatctggctgctccccgaggtgcctgctacggggctgaccatgacctgggccgcctgcacccttgtgtgatggcctccttgagggcccagagccccatccccaacctctatctgacaggccaggatatcttcacctgtggactggtcggggccctgcaaggtgccctgctgtgcagcagcgccatcctgaagcggaacttgtactcagaccttaagaatcttgattctaggatccgggcacagaagaaaaagaattagttccatcagggaggagtcagaggaatttgcccaatggctggggcatctcccttgacttacccataatgtctttctgcattagttccttgcacgtataaagcactctaatttggttctgatgcctgaagagaggcctagtttaaatcacaattccgaatctggggcaatggaatcactgcttccagctggggcaggtgagatctttacgccttttataacatgccatccctactaataggatattgacttggatagcttgatgtctcatgacgagcggcgctctgcatccctcacccatgcctcctaactcagtgatcaaagcgaatattccatctgtggatagaacccctggcagtgttgtcagctcaacctggtgggttcagttctgtcctgaggcttctgctctcattcatttagtgctacgctgcacagttctacactgtcaagggaaaagggagactaatgaggcttaactcaaaacctgggcgtggttttggttgccattccataggtttggagagctctagatctcttttgtgctgggttcagtggctcttcaggggacaggaaatgcctgtgtctggccagtgtggttctggagctttggggtaacagcaggatccatcagttagtagggtgcatgtcagatgatcatatccaattcatatggaagtcccgggtctgtcttccttatcatcggggtggcagctggttctcaatgtgccagcagggactcagtacctgagcctcaatcaagccttatccaccaaatacacagggaagggtgatgcagggaagggtgacatcaggagtcagggcatggactggtaagatgaatactttgctgggctgaagcaggctgcagggcattccagccaagggcacagcaggggacagtgcagggaggtgtggggtaagggagggaagtcacatcagaaaagggaaagccacggaatgtgtgtgaagcccagaaatggcatttgcagttaattagcacatgtgagggttagacaggtaggtgaatgcaagctcaaggtttggaaaaatgacttttcagttatgtctttggtatcagacatacgaaaggtctctttgtagttcgtgttaatgtaacattaataaatttattgattccattgctttaacatttgaaa

SEQ ID NO: 194839 - DNA, 1802 bp, Artificial Sequence
  derived and/or modified sequence
acccgacccgacgccggcgtgatgtggcttccgctggtgctgctcctggctgtgctgctgctggccgtcctctgcaaagtttacttgggactattctctggcagctccccgaatcctttctccgaagatgtcaaacggcccccagcgcccctggtaactgacaaggaggccaggaagaaggttctcaaacaaggaatccattacattgggcgtatggaagagggcagcattggccgttttatcttggaccagatcactgaagggcagctggactgggctcccctgtcctctccttttgacatcatggtactggaagggcccaatggccgaaaggagtaccccatgtacagtggagagaaagcctacattcagggcctcaaggagaagtttccacaggaggaagctatcattgacaagtatataaagctggttaaggtggtatccagtggagcccctcatgccatcctgttgaaattcctcccattgcccgtggttcagctcctcgacaggtgtgggctgctgactcgtttctctccattccttcaagcatccacccagagcctggctgaggtcctgcagcagctgggggcctcctctgagctccaggcagtactcagctacatcttccccacttacggtgtcacccccaaccacagtgccttttccatgcacgccctgctggtcaaccactacatgaaaggaggcttttatccccgagggggttccagtgaaattgccttccacaccatccctgtgattcagcgggctgggggcgctgtcctcacaaaggccactgtgcagagtgtgttgctggactcagctgggaaagcctgtggtgtcagtgtgaagaaggggcatgagctggtgaacatctattgccccatcgtggtctccaacgcaggactgttcaacacctatgaacacctactgccggggaacgcccgctgcctgccaggtgtgaagcagcaactggggacggtgcggcccggcttaggcatgacctctgttttcatctgcctgcgaggcaccaaggaagacctgcatctgccgtccaccaactactatgtttactatgacacggacatggaccaggcgatggagcgctacgtctccatgcccagggaagaggctgcggaacacatccctcttctcttcttcgctttcccatcagccaaagatccgacctgggaggaccgattcccaggccggtccaccatgatcatgctcatacccactgcctacgagtggtttgaggagtggcaggcggagctgaagggaaagcggggcagtgactatgagaccttcaaaaactcctttgtggaagcctctatgtcagtggtcctgaaactgttcccacagctggaggggaaggtggagagtgtgactgcaggatccccactcaccaaccagttctatctggctgctccccgaggtgcctgctacggggctgaccatgacctgggccgcctgcacccttgtgtgatggcctccttgagggcccagagccccatccccaacctctatctgacaggccaggatatcttcacctgtggactggtcggggccctgcaaggtgccctgctgtgcagcagcgccatcctgaagcggaacttgtactcagaccttaagaatcttgattctaggatccgggcacagaagaaaaagaattagttccatcagggaggagtcagaggaatttgcccaatggctggggcatctcccttgacttacccataatgtctttctgcattagttccttgcacgtataaagcactctaatttggttctgatgcctgaagaga

SEQ ID NO: 194840 - protein, 1440 aa, Artificial Sequence
  derived and/or modified sequence
MAGIIKKQILKHLSRFTKNLSPDKINLSTLKGEGQLTNLELDEEVLQNVLELPTWLAITRVYCNRASIRIQWTKLKTHPICLCLDKVEVEMKTCEDPRPPNGQSPIALASGQSEYGFAEKVVEGMFIIVNSITIKIHSKAFHASFELWQLQGYSVNPNWQQSDLRLTRITDPCRGEVLTFKEITWQTLRIEADATDNGDQDPVTTPLRLITNQGRIQIALKRRTKDCNVISSKLMFLLDDLLWVLTDSQLKAMMKYAESLSEAMEKSAHQRKSLAPEPVQITPPAPSAQQSWAQAFGGSQGNSNSSSSRLSQYFEKFDVKESSYHLLISRLDLHICDDSQSREPGVSANRLMGGAMQLTFRKMAFDYYPFHWAGDSCKHWVRHCEAMETRGQWAQKLVMEFQSKMEKWHEETGLKPPWHLGVDSLFRRKADSLSSPRKNPLERSPSQGRQPAFQPPAWNRLRSSCMVVRVDDLDIHQVSTAGQPSKKPSTLLSCSRKLHNLPTQVSAIHIEFTEYYFPDNQELPVPCPNLYIQLNGLTFTMDPVSLLWGNLFCLDLYRSLEQFKAIYKLEDSSQKDEHLDIRLDAFWLKVSFPLEKRERAELHRPQALVFSASGMIATNTRHAPHCSCSDLQSLFRGFAAAEFFHSNYDHFPKVPGGFSLLHMLFLHHAFQMDSCLPQPNTLPPQRPKASWDLWSVHFTQISLDFEGTENFKGHTLNFVAPFPLSIWACLPLRWQQAQARKLLLASEGRLKPSASFGSPVQSEALAPDSMSHPRSKTEHDLKSLSGLTEVMEILKEGSSGMDNKGPLTELEDVADVHMLVHSPAHVRVRLDHYQYLALLRLKEVLQRLQEQLTKDTESMTGSPLQNQTACIGVLFPSAEVALLMHPAPGAVDADSAGSDSTSLVDSELSPSEDRELKSDASSDQGPASPEKVLEESSIENQDVSQERPHSNGELQDSGPLAQQLAGKGHEAVESLQAKKLSRTQASSSPAALKPPAGRETAVNGQGELIPLKNIEGELSSAIHMTKDATKEALHATMDLTKEAVSLTKDAFSLGRDRMTSTMHKMLSLPPAKEPMAKTDEGVAAPVSGGAARLRFFSMKRTVSQQSFDGVSLDSSGPEDRISVDSDGSDSFVMLLESESGPESVPPGSLSNVSDNAGVQGSPLVNNYGQGSPAANSSVSPSGEDLIFHPVSVLVLKVNEVSFGIEVRGEDLTVALQAEELTLQQLGTVGLWQFLHGQCPGTCFQESSTLKTGHIRPAVGLRFEVGPGAAVHSPLASQNGFLHLLLHGCDLELLTSVLSGLGPFLEDEEIPVVVPMQIELLNSSITLKDDIPPIYPTSPGPIPITLAMEHVVLKRSDDGVFHIGAAAQDKPSAEVLKSEKRQPPKEQVFLVPTGEVFEQQVKELPILQKELIETKQALANANQDKEKLLQEIRKYNPFFEL

SEQ ID NO: 194841 - protein, 1400 aa, Artificial Sequence
  derived and/or modified sequence
MAGIIKKQILKHLSRFTKNLSPDKINLSTLKGEGQLTNLELDEEVLQNVLELPTWLAITRVYCNRASIRIQWTKLKTHPICLCLDKVEVEMKTCEDPRPPNGQSPIALASGQSEYGFAEKVVEGMFIIVNSITIKIHSKAFHASFELWQLQGYSVNPNWQQSDLRLTRITDPCRGEVLTFKEITWQTLRIEADATDNGDQDPVTTPLRLITNQGRIQIALKRRTKDCNVISSKLMFLLDDLLWVLTDSQLKAMMKYAESLSEAMEKSAHQRKSLAPEPVQITPPAPSAQQSWAQAFGGSQGNSNSSSSRLSQYFEKFDVKESSYHLLISRLDLHICDDSQSREPGVSANRLMGGAMQLTFRKMAFDYYPFHWAGDSCKHWVRHCEAMETRGQWAQKLVMEFQSKMEKWHEETGLKPPWHLGVDSLFRRKADSLSSPRKNPLERSPSQGRQPAFQPPAWNRLRSSCMVVRVDDLDIHQVSTAGQPSKKPSTLLSCSRKLHNLPTQVSAIHIEFTEYYFPDNQELPVPCPNLYIQLNGLTFTMDPVSLLWGNLFCLDLYRSLEQFKAIYKLEDSSQKDEHLDIRLDAFWLKVSFPLEKRERAELHRPQALVFSASGMIATNTRHAPHCSCSDLQSLFRGFAAAEFFHSNYDHFPKVPGGFSLLHMLFLHHAFQMDSCLPQPNTLPPQRPKASWDLWSVHFTQISLDFEGTENFKGHTLNFVAPFPLSIWACLPLRWQQAQARKLLLASEGRLKPSASFGSPVQSEALAPDSMSHPRSKTEHDLKSLSGLTEVMEILKEGSSGMDNKGPLTELEDVADVHMLVHSPAHVRVRLDHYQYLALLRLKEVLQRLQEQLTKDTESMTGSPLQNQTACIGVLFPSAEVALLMHPAPGAVDADSAGSDSTSLVDSELSPSEDRELKSDASSDQGPASPEKVLEESSIENQDVSQERPHSNGELQDSGPLAQQLAGKGHEAVESLQAKKLSRTQASSSPAALKPPAGRETAVNGQGELIPLKNIEGELSSAIHMTKDATKEALHATMDLTKEAVSLTKDAFSLGRDRMTSTMHKMLSLPPAKEPMAKTDEGVAAPVSGGAARLRFFSMKRTVSQQSFDGVSLDSSGPEDRISVDSDGSDSFVMLLESESGPESVPPGSLSNVSDNAGVQGSPLVNNYGQGSPAANSSVSPSGEDLIFHPVSVLVLKVNEVSFGIEVRGEDLTVALQAEELTLQQLGTVGLWQFLHGQCPGTCFQESSTLKTGHIRPAVGLRFEVGPGAAVHSPLASQNGFLHLLLHGCDLELLTSVLSGLGPFLEDEEIPVVVPMQIELLNSSITLKDDIPPIYPTSPGPIPITLAMEHVVLKRSDDGVFHIGAAAQDKPSAEVLKSEKRQPPKEQVFLVPTGEVFEQQT

SEQ ID NO: 194842 - DNA, 4323 bp, Artificial Sequence
  derived and/or modified sequence
atggccggcatcatcaagaagcagatcctgaagcacctgagcagattcaccaagaacctgagccccgacaagatcaacctgagcaccctgaagggcgagggccagctgaccaacctggagctggacgaggaggtgctgcagaacgtgctggagctgcccacctggctggccatcaccagagtgtactgcaacagagccagcatcagaatccagtggaccaagctgaagacccaccccatctgcctgtgcctggacaaggtggaggtggagatgaagacctgcgaggaccccagaccccccaacggccagagccccatcgccctggccagcggccagagcgagtacggcttcgccgagaaggtggtggagggcatgttcatcatcgtgaacagcatcaccatcaagatccacagcaaggccttccacgccagcttcgagctgtggcagctgcagggctacagcgtgaaccccaactggcagcagagcgacctgagactgaccagaatcaccgacccctgcagaggcgaggtgctgaccttcaaggagatcacctggcagaccctgagaatcgaggccgacgccaccgacaacggcgaccaggaccccgtgaccacccccctgagactgatcaccaaccagggcagaatccagatcgccctgaagagaagaaccaaggactgcaacgtgatcagcagcaagctgatgttcctgctggacgacctgctgtgggtgctgaccgacagccagctgaaggccatgatgaagtacgccgagagcctgagcgaggccatggagaagagcgcccaccagagaaagagcctggcccccgagcccgtgcagatcaccccccccgcccccagcgcccagcagagctgggcccaggccttcggcggcagccagggcaacagcaacagcagcagcagcagactgagccagtacttcgagaagttcgacgtgaaggagagcagctaccacctgctgatcagcagactggacctgcacatctgcgacgacagccagagcagagagcccggcgtgagcgccaacagactgatgggcggcgccatgcagctgaccttcagaaagatggccttcgactactaccccttccactgggccggcgacagctgcaagcactgggtgagacactgcgaggccatggagaccagaggccagtgggcccagaagctggtgatggagttccagagcaagatggagaagtggcacgaggagaccggcctgaagcccccctggcacctgggcgtggacagcctgttcagaagaaaggccgacagcctgagcagccccagaaagaaccccctggagagaagccccagccagggcagacagcccgccttccagccccccgcctggaacagactgagaagcagctgcatggtggtgagagtggacgacctggacatccaccaggtgagcaccgccggccagcccagcaagaagcccagcaccctgctgagctgcagcagaaagctgcacaacctgcccacccaggtgagcgccatccacatcgagttcaccgagtactacttccccgacaaccaggagctgcccgtgccctgccccaacctgtacatccagctgaacggcctgaccttcaccatggaccccgtgagcctgctgtggggcaacctgttctgcctggacctgtacagaagcctggagcagttcaaggccatctacaagctggaggacagcagccagaaggacgagcacctggacatcagactggacgccttctggctgaaggtgagcttccccctggagaagagagagagagccgagctgcacagaccccaggccctggtgttcagcgccagcggcatgatcgccaccaacaccagacacgccccccactgcagctgcagcgacctgcagagcctgttcagaggcttcgccgccgccgagttcttccacagcaactacgaccacttccccaaggtgcccggcggcttcagcctgctgcacatgctgttcctgcaccacgccttccagatggacagctgcctgccccagcccaacaccctgcccccccagagacccaaggccagctgggacctgtggagcgtgcacttcacccagatcagcctggacttcgagggcaccgagaacttcaagggccacaccctgaacttcgtggcccccttccccctgagcatctgggcctgcctgcccctgagatggcagcaggcccaggccagaaagctgctgctggccagcgagggcagactgaagcccagcgccagcttcggcagccccgtgcagagcgaggccctggcccccgacagcatgagccaccccagaagcaagaccgagcacgacctgaagagcctgagcggcctgaccgaggtgatggagatcctgaaggagggcagcagcggcatggacaacaagggccccctgaccgagctggaggacgtggccgacgtgcacatgctggtgcacagccccgcccacgtgagagtgagactggaccactaccagtacctggccctgctgagactgaaggaggtgctgcagagactgcaggagcagctgaccaaggacaccgagagcatgaccggcagccccctgcagaaccagaccgcctgcatcggcgtgctgttccccagcgccgaggtggccctgctgatgcaccccgcccccggcgccgtggacgccgacagcgccggcagcgacagcaccagcctggtggacagcgagctgagccccagcgaggacagagagctgaagagcgacgccagcagcgaccagggccccgccagccccgagaaggtgctggaggagagcagcatcgagaaccaggacgtgagccaggagagaccccacagcaacggcgagctgcaggacagcggccccctggcccagcagctggccggcaagggccacgaggccgtggagagcctgcaggccaagaagctgagcagaacccaggccagcagcagccccgccgccctgaagccccccgccggcagagagaccgccgtgaacggccagggcgagctgatccccctgaagaacatcgagggcgagctgagcagcgccatccacatgaccaaggacgccaccaaggaggccctgcacgccaccatggacctgaccaaggaggccgtgagcctgaccaaggacgccttcagcctgggcagagacagaatgaccagcaccatgcacaagatgctgagcctgccccccgccaaggagcccatggccaagaccgacgagggcgtggccgcccccgtgagcggcggcgccgccagactgagattcttcagcatgaagagaaccgtgagccagcagagcttcgacggcgtgagcctggacagcagcggccccgaggacagaatcagcgtggacagcgacggcagcgacagcttcgtgatgctgctggagagcgagagcggccccgagagcgtgccccccggcagcctgagcaacgtgagcgacaacgccggcgtgcagggcagccccctggtgaacaactacggccagggcagccccgccgccaacagcagcgtgagccccagcggcgaggacctgatcttccaccccgtgagcgtgctggtgctgaaggtgaacgaggtgagcttcggcatcgaggtgagaggcgaggacctgaccgtggccctgcaggccgaggagctgaccctgcagcagctgggcaccgtgggcctgtggcagttcctgcacggccagtgccccggcacctgcttccaggagagcagcaccctgaagaccggccacatcagacccgccgtgggcctgagattcgaggtgggccccggcgccgccgtgcacagccccctggccagccagaacggcttcctgcacctgctgctgcacggctgcgacctggagctgctgaccagcgtgctgagcggcctgggccccttcctggaggacgaggagatccccgtggtggtgcccatgcagatcgagctgctgaacagcagcatcaccctgaaggacgacatcccccccatctaccccaccagccccggccccatccccatcaccctggccatggagcacgtggtgctgaagagaagcgacgacggcgtgttccacatcggcgccgccgcccaggacaagcccagcgccgaggtgctgaagagcgagaagagacagccccccaaggagcaggtgttcctggtgcccaccggcgaggtgttcgagcagcaggtgaaggagctgcccatcctgcagaaggagctgatcgagaccaagcaggccctggccaacgccaaccaggacaaggagaagctgctgcaggagatcagaaagtacaaccccttcttcgagctgtag

SEQ ID NO: 194843 - DNA, 4203 bp, Artificial Sequence
  derived and/or modified sequence
atggccggcatcatcaagaagcagatcctgaagcacctgagcagattcaccaagaacctgagccccgacaagatcaacctgagcaccctgaagggcgagggccagctgaccaacctggagctggacgaggaggtgctgcagaacgtgctggagctgcccacctggctggccatcaccagagtgtactgcaacagagccagcatcagaatccagtggaccaagctgaagacccaccccatctgcctgtgcctggacaaggtggaggtggagatgaagacctgcgaggaccccagaccccccaacggccagagccccatcgccctggccagcggccagagcgagtacggcttcgccgagaaggtggtggagggcatgttcatcatcgtgaacagcatcaccatcaagatccacagcaaggccttccacgccagcttcgagctgtggcagctgcagggctacagcgtgaaccccaactggcagcagagcgacctgagactgaccagaatcaccgacccctgcagaggcgaggtgctgaccttcaaggagatcacctggcagaccctgagaatcgaggccgacgccaccgacaacggcgaccaggaccccgtgaccacccccctgagactgatcaccaaccagggcagaatccagatcgccctgaagagaagaaccaaggactgcaacgtgatcagcagcaagctgatgttcctgctggacgacctgctgtgggtgctgaccgacagccagctgaaggccatgatgaagtacgccgagagcctgagcgaggccatggagaagagcgcccaccagagaaagagcctggcccccgagcccgtgcagatcaccccccccgcccccagcgcccagcagagctgggcccaggccttcggcggcagccagggcaacagcaacagcagcagcagcagactgagccagtacttcgagaagttcgacgtgaaggagagcagctaccacctgctgatcagcagactggacctgcacatctgcgacgacagccagagcagagagcccggcgtgagcgccaacagactgatgggcggcgccatgcagctgaccttcagaaagatggccttcgactactaccccttccactgggccggcgacagctgcaagcactgggtgagacactgcgaggccatggagaccagaggccagtgggcccagaagctggtgatggagttccagagcaagatggagaagtggcacgaggagaccggcctgaagcccccctggcacctgggcgtggacagcctgttcagaagaaaggccgacagcctgagcagccccagaaagaaccccctggagagaagccccagccagggcagacagcccgccttccagccccccgcctggaacagactgagaagcagctgcatggtggtgagagtggacgacctggacatccaccaggtgagcaccgccggccagcccagcaagaagcccagcaccctgctgagctgcagcagaaagctgcacaacctgcccacccaggtgagcgccatccacatcgagttcaccgagtactacttccccgacaaccaggagctgcccgtgccctgccccaacctgtacatccagctgaacggcctgaccttcaccatggaccccgtgagcctgctgtggggcaacctgttctgcctggacctgtacagaagcctggagcagttcaaggccatctacaagctggaggacagcagccagaaggacgagcacctggacatcagactggacgccttctggctgaaggtgagcttccccctggagaagagagagagagccgagctgcacagaccccaggccctggtgttcagcgccagcggcatgatcgccaccaacaccagacacgccccccactgcagctgcagcgacctgcagagcctgttcagaggcttcgccgccgccgagttcttccacagcaactacgaccacttccccaaggtgcccggcggcttcagcctgctgcacatgctgttcctgcaccacgccttccagatggacagctgcctgccccagcccaacaccctgcccccccagagacccaaggccagctgggacctgtggagcgtgcacttcacccagatcagcctggacttcgagggcaccgagaacttcaagggccacaccctgaacttcgtggcccccttccccctgagcatctgggcctgcctgcccctgagatggcagcaggcccaggccagaaagctgctgctggccagcgagggcagactgaagcccagcgccagcttcggcagccccgtgcagagcgaggccctggcccccgacagcatgagccaccccagaagcaagaccgagcacgacctgaagagcctgagcggcctgaccgaggtgatggagatcctgaaggagggcagcagcggcatggacaacaagggccccctgaccgagctggaggacgtggccgacgtgcacatgctggtgcacagccccgcccacgtgagagtgagactggaccactaccagtacctggccctgctgagactgaaggaggtgctgcagagactgcaggagcagctgaccaaggacaccgagagcatgaccggcagccccctgcagaaccagaccgcctgcatcggcgtgctgttccccagcgccgaggtggccctgctgatgcaccccgcccccggcgccgtggacgccgacagcgccggcagcgacagcaccagcctggtggacagcgagctgagccccagcgaggacagagagctgaagagcgacgccagcagcgaccagggccccgccagccccgagaaggtgctggaggagagcagcatcgagaaccaggacgtgagccaggagagaccccacagcaacggcgagctgcaggacagcggccccctggcccagcagctggccggcaagggccacgaggccgtggagagcctgcaggccaagaagctgagcagaacccaggccagcagcagccccgccgccctgaagccccccgccggcagagagaccgccgtgaacggccagggcgagctgatccccctgaagaacatcgagggcgagctgagcagcgccatccacatgaccaaggacgccaccaaggaggccctgcacgccaccatggacctgaccaaggaggccgtgagcctgaccaaggacgccttcagcctgggcagagacagaatgaccagcaccatgcacaagatgctgagcctgccccccgccaaggagcccatggccaagaccgacgagggcgtggccgcccccgtgagcggcggcgccgccagactgagattcttcagcatgaagagaaccgtgagccagcagagcttcgacggcgtgagcctggacagcagcggccccgaggacagaatcagcgtggacagcgacggcagcgacagcttcgtgatgctgctggagagcgagagcggccccgagagcgtgccccccggcagcctgagcaacgtgagcgacaacgccggcgtgcagggcagccccctggtgaacaactacggccagggcagccccgccgccaacagcagcgtgagccccagcggcgaggacctgatcttccaccccgtgagcgtgctggtgctgaaggtgaacgaggtgagcttcggcatcgaggtgagaggcgaggacctgaccgtggccctgcaggccgaggagctgaccctgcagcagctgggcaccgtgggcctgtggcagttcctgcacggccagtgccccggcacctgcttccaggagagcagcaccctgaagaccggccacatcagacccgccgtgggcctgagattcgaggtgggccccggcgccgccgtgcacagccccctggccagccagaacggcttcctgcacctgctgctgcacggctgcgacctggagctgctgaccagcgtgctgagcggcctgggccccttcctggaggacgaggagatccccgtggtggtgcccatgcagatcgagctgctgaacagcagcatcaccctgaaggacgacatcccccccatctaccccaccagccccggccccatccccatcaccctggccatggagcacgtggtgctgaagagaagcgacgacggcgtgttccacatcggcgccgccgcccaggacaagcccagcgccgaggtgctgaagagcgagaagagacagccccccaaggagcaggtgttcctggtgcccaccggcgaggtgttcgagcagcagacctag

SEQ ID NO: 194844 - DNA, 4323 bp, Artificial Sequence
  derived and/or modified sequence
atggctgggattattaaaaagcaaatactcaagcatctcagtagattcacaaagaatctgagccctgacaaaatcaatctgagtaccctgaagggagaaggacagttgaccaacctggaattagatgaggaagtgctccagaacgtcctggagctgcccacgtggttggcaatcactcgcgtctactgtaaccgcgcttctatccggatccagtggacgaagctgaaaacccatcctatctgcctttgtcttgataaagtggaggttgagatgaagacatgcgaagacccccggcccccaaatggccaaagtccaatcgccctggcttcaggacagagcgagtacggcttcgctgaaaaggtggtggagggtatgtttatcatcgtcaactcaatcactattaaaatccattcgaaggcgtttcatgcatccttcgagctgtggcaactacaaggctactccgtcaacccgaactggcaacaatccgatctgaggcttacccgcattaccgacccttgccgaggcgaagtgctcacttttaaagagataacctggcagacactgaggatcgaggctgacgctactgacaatggggaccaggacccagtgacaaccccactgagactaattacaaaccagggaaggatacaaatagctttaaaaaggaggacaaaggattgtaatgtgatcagcagtaaactgatgttcttgttagatgacttattgtgggtgctgaccgacagtcaactcaaagccatgatgaaatacgctgaatcattatctgaggcaatggaaaagtcagctcatcagcgtaaaagcctggcaccagagcctgtacagattactccacccgcccccagcgcccagcagtcttgggctcaggcatttggcggctcccagggaaattctaactcaagcagcagtaggctgagtcaatattttgagaaatttgatgtaaaggaatcgagctaccacctcctcatttctcgactggacttgcatatatgtgatgacagccaaagtcgggaaccaggggttagtgccaatcgactgatgggtggtgccatgcagctgacattcagaaagatggcgtttgattattacccatttcactgggccggcgactcatgcaaacattgggtcagacactgtgaggcaatggaaacccgcggccagtgggctcagaagctcgtgatggaattccagtcaaaaatggaaaagtggcacgaagagacaggtctgaagcctccttggcatctaggagtcgactcactgttccgcaggaaagccgattctctgtcttcaccccgcaaaaatcctctggaacgctcacccagtcagggaagacagcctgcgtttcagccaccggcctggaaccgccttcgcagcagctgtatggtggttagagttgacgatctcgatattcaccaggtgtcaacagctgggcagccaagtaaaaagcctagcacattgctgtcctgctcccggaaacttcacaacctgcctactcaagtgtctgcaattcatattgaattcactgaatactatttccctgataatcaggaactgccagttccatgcccgaacctgtatattcagctcaatggacttactttcaccatggaccccgtgtccctcctctggggcaacttgttctgcctagacctgtatagaagtttggaacagtttaaagcgatctacaaactcgaggacagcagtcagaaggacgagcacctggacattcggcttgatgcattctggttaaaggtgtctttcccactggagaagcgcgaacgagcggaactccaccgtcctcaggctctggtattcagcgcctccgggatgattgctaccaatactaggcacgcacctcactgcagctgttccgacctacagagcctgtttagaggcttcgctgccgccgagttctttcacagtaactacgaccattttcccaaggtgcccggcggttttagcctactgcatatgctttttttacaccacgcgttccaaatggactcttgtctgccccagcctaacacactgcccccgcagcgccccaaggccagttgggacctgtggtccgtccatttcacacagatttccttagacttcgaaggaacagagaactttaagggtcacacattgaacttcgtggcccccttccctttaagtatctgggcatgtctccctctgcgctggcaacaagcacaggctcggaaactgctgctcgcctccgaaggccggttgaagccctcagctagttttgggtcaccagtccagagcgaggctcttgctcctgactcaatgtctcaccctcggtcaaagaccgagcatgatctgaaatcgctgagcgggctaacagaagtcatggagatcctcaaggagggcagttctggcatggacaacaaggggcccctgacagaattggaagacgtcgccgacgtacacatgcttgtgcactcacccgcacacgtccgcgtgcggcttgaccattatcagtatcttgccttgttacggttgaaggaggtcctccagcgcctgcaggagcagttgaccaaagatacagaaagcatgactggatcaccccttcagaaccagacggcttgcatcggggtgctctttccctccgctgaagttgctttgctgatgcacccagcgccaggcgctgttgacgctgactctgctggatccgactctactagtctggtggacagcgagctgtcaccgagcgaagaccgcgaactgaaatccgatgcatcttccgatcagggacctgcttcacctgaaaaggtcttggaggagtcctccattgagaatcaggatgtgagtcaagagcgcccccattccaacggcgagcttcaggactcgggaccacttgcccagcaattggccggcaagggacacgaggcagtggaaagcctacaagccaagaagctctcaagaacacaggcctcctcatctcccgctgcactgaagcctcccgctgggagagagactgcggttaacggccagggtgagctgataccactgaagaacattgagggtgagttatcaagcgctatccatatgactaaggatgcgactaaggaagcattgcacgcaacaatggatctgacaaaggaggctgtctcattaaccaaggatgccttttctctcgggcgggacaggatgacgtctacaatgcataagatgctgtccctgccacccgccaaagagccgatggctaagactgacgagggggtggccgcacctgtgagtgggggtgctgcgcgcctcaggtttttctcaatgaagcgcacagttagccagcagtctttcgatggcgtatctctcgatagctctggccctgaagataggatttccgttgactctgatggaagtgatagtttcgtgatgctcctggaaagcgagtcggggcccgagtctgtgccacccggaagcctgagtaatgtaagcgataacgccggtgtgcaaggaagcccccttgttaacaattacgggcagggaagcccagccgcaaattcttcagtgtctccatccggcgaggacttgatatttcaccctgtttctgtattagtgctgaaggtgaacgaggtgagttttgggattgaggtgcggggcgaagacctcacagtcgccttacaagctgaggaactgaccctgcagcagctcgggacggtggggctatggcagttcctgcacggccagtgccccggaacttgcttccaggaatcaagcacattgaagaccgggcacattcggccagccgtgggcttacggtttgaagtgggccccggggccgcggtacactccccgctggcctcacagaacggcttcttgcacctactacttcacggctgtgatctcgagttactgacctcagttctttcgggcctgggtccgttcctggaagatgaagaaatcccagtagtggttcccatgcagatcgagctcttgaactcctccatcaccctcaaagatgacattccccctatctatccaacctctcccggtcctatccccatcaccctggctatggagcacgtcgtgttgaaacgatcagatgatggagttttccatataggcgccgcagctcaggacaaaccttctgccgaggttctgaaatctgagaaacggcaaccccccaaagagcaggtgttcctggttccaactggggaggttttcgagcagcaagtgaaggaactccccatcctacagaaagagctgatagaaacaaagcaagccctggccaacgcgaaccaagacaaagagaagcttctccaggaaattcggaaatacaatccatttttcgagctttag

SEQ ID NO: 194845 - DNA, 4203 bp, Artificial Sequence
  derived and/or modified sequence
atggctgggattatcaaaaagcagatcctgaagcatctgtcccggtttaccaaaaatctttctccggataaaataaacctttccaccctcaaaggcgagggtcaattgaccaacctggaattagacgaggaagtcctacagaacgttttggaacttccgacttggctggccattacaagagtgtattgtaacagagcttctatcagaatccaatggactaaattaaaaacccacccaatttgcctgtgcctagacaaagtcgaagtggagatgaaaacatgtgaggatcccaggccccctaacggacagagcccaattgccctcgcgtccggccaatccgaatacggatttgcagagaaagtcgttgagggtatgttcatcattgtcaatagcatcacgataaagattcacagcaaggccttccatgcatcttttgagctttggcagcttcagggatactcggttaaccccaactggcaacaaagtgatctgcggctcacccggattaccgatccttgcaggggcgaggttctgacgttcaaggagattacctggcagacactgaggatcgaagcagacgccacagacaacggcgaccaggatccagtcacaacacctctgcgactaatcaccaatcagggtcggatacaaattgcactgaaaagaaggacaaaagattgcaatgtcatctcttcaaaactgatgtttctgctggatgatctgctgtgggtgctgaccgattctcaactcaaggccatgatgaagtacgctgaatctctcagtgaagccatggaaaaaagtgctcaccagagaaaaagcctagcacctgaaccagtacagatcacccctccagccccctcagcacagcaatcttgggctcaggctttcggcggcagccagggtaactcaaatagctcatcctccaggttgagccaatattttgaaaagttcgacgttaaggagtctagttaccacctgctgataagtagacttgatctgcacatctgtgacgatagccagtctcgggagcccggcgtgtcagccaaccgcctcatgggcggcgccatgcagcttacttttcgcaaaatggcatttgattactacccatttcattgggctggcgattcctgcaagcattgggttcgccattgcgaagccatggagaccaggggacagtgggcccagaagcttgttatggagtttcagtcgaaaatggagaagtggcatgaggaaaccggattaaaacctccatggcatctgggggttgactctctcttcaggcggaaggctgactccctctcctcccctcgaaagaatccgcttgagcgttccccctcacaaggccggcagcctgcctttcaaccacccgcctggaaccgcctcagatcttcatgcatggtggtacgggtcgatgatctcgatattcatcaggtatctacagcaggtcagccttcaaaaaagccttcaacgttgctctcatgctcccgcaagctacacaacttgccaactcaggtgtccgcgattcacatcgaatttacagaatactacttcccggacaaccaggagcttcccgtcccctgcccaaatctctacattcaactgaacggcttgactttcaccatggacccagtcagtttattgtggggcaacttattctgccttgacctttatagaagcctcgagcagttcaaagcgatttacaagctcgaggatagttctcaaaaggacgagcacctggacatccgactggacgctttctggcttaaagtgtctttccctctggaaaagcgggagcgtgccgaactccacaggccacaagcattggtattctcagcctccggcatgatcgccacaaacaccagacacgcaccacattgttcttgtagcgacctgcaatctctgtttagggggtttgcggccgccgagttttttcattccaactacgatcatttcccaaaggttcctggggggttctctttgctgcatatgctttttctccaccacgcattccaaatggactcttgcttgccgcaacccaataccctgccccctcagcgtccaaaagccagttgggacctgtggtccgttcattttacccaaatttctctggacttcgagggaactgagaactttaagggacacaccttaaatttcgtggcacccttcccactctctatttgggcatgtcttcctttgagatggcagcaggctcaagccaggaagctgctgctggctagcgagggccgccttaagccttcagcttccttcggatcaccagtgcagtcagaagccttagcacccgactccatgagtcatccacgttccaagactgaacacgatctgaaaagcctgtccggcttgacagaggtaatggagatcctcaaagaaggctcatccggtatggacaataaggggcccttgacagaacttgaggacgtggccgatgttcacatgctcgtgcattcacctgcccatgtgagggttaggctggaccattatcagtacctggcactcttgagacttaaggaagtactacaacgcttacaggaacagctgaccaaagacaccgaaagcatgactggatctccgctccagaatcagaccgcctgcattggggttctttttccaagtgccgaggtggccttgctgatgcaccccgctcctggagccgtcgacgccgatagtgcaggctccgactctacaagcctggttgattcagagctgtccccatcggaagatcgcgaattgaaatcagacgcatcctcagatcaggggcccgccagcccagaaaaggtcttggaagagtcctccattgagaaccaggacgtctcccaggaaagaccgcacagcaacggggaactgcaggactcgggccctttagcccaacagcttgccggcaaaggccacgaagcagtggagtcgcttcaggctaaaaaactgtcaagaacacaagcatcttcttctcctgccgctctcaaaccacctgccggccgcgagactgctgtgaacggacagggtgagctcattcctctcaaaaatatcgaaggagagctcagctcggcaatccacatgaccaaggacgcaacaaaggaggcactgcatgcaactatggacctgacaaaggaagcagtgagtctgactaaggacgccttctcactgggccgggacaggatgacctcgacaatgcacaagatgctgtctttgcctcccgccaaggagccaatggcaaagaccgacgaaggtgtggctgcaccggtcagtgggggtgccgccaggcttagattcttctctatgaagagaacggtatcccagcaaagcttcgacggagtgtccctggatagctccggacccgaggacagaatttctgtggactccgacggatcagactcttttgtgatgttgctggaaagcgagagcggacccgagagtgtcccccctggcagcctgagtaatgtgtccgataatgctggcgttcagggttcaccactcgttaacaactatgggcagggaagccccgccgctaacagcagcgtatctccttctggcgaggacctgattttccatcctgtcagcgtactcgtgctcaaagttaatgaggtgtcctttggaatcgaggtacggggcgaggacctgaccgtggcattacaagcggaggagctaacattgcaacagttgggtacagttgggctgtggcaatttctccacgggcagtgcccagggacctgctttcaggagtcctctaccctaaagactgggcatattagacctgctgtaggcttgcgcttcgaggtaggacctggtgcagcagtgcacagccctctcgcgagccagaacggctttctgcatcttttgttacacggctgcgacttggagctgttgaccagcgtcctgtcggggctggggccgtttctcgaggatgaagaaatcccggtggttgtccccatgcaaatcgagctactaaattcctccataaccctgaaagatgatattccccccatctatccaaccagcccgggcccaatcccgatcacactcgccatggaacacgtagttcttaagcggtcagacgacggtgtatttcacatcggagccgctgcccaagataagccgagtgccgaagtgctcaaaagcgaaaagcggcaaccaccaaaggagcaagtgttcctagtgcccacaggtgaggttttcgagcagcagacgtag

SEQ ID NO: 194846 - DNA, 4323 bp, Artificial Sequence
  derived and/or modified sequence
atggccggcatcatcaagaagcagatcctgaagcacctgagccgcttcaccaagaacctgagcccagacaagatcaacctgagcaccctgaagggggagggccagctgaccaacctggagctggatgaggaggtgctgcagaatgtgctggagctgcccacctggctggccatcaccagggtgtactgcaacagagccagcatccgcatccagtggaccaagctgaagacccaccccatctgcctgtgcctggacaaggtggaggtggagatgaagacctgtgaggacccccggcccccaaatggccagagccccatcgccctggccagcggccagagtgaatatggctttgctgagaaggtggtggagggcatgttcatcatcgtgaacagcatcaccatcaagatccacagcaaggccttccacgccagctttgagctgtggcagctgcagggctacagcgtgaaccccaactggcagcagagcgacctgcggctgacccgcatcacagacccctgccgcggggaggtgctgaccttcaaggagatcacctggcagaccctgcgcatcgaggctgatgccacagacaatggagaccaggaccctgtgaccacccccctgcggctcatcaccaaccagggccgcatccagatcgccctgaagaggaggaccaaggactgcaacgtcatcagcagcaagctgatgttcctgctggatgacctgctgtgggtgctgacagacagccagctgaaggccatgatgaagtatgcagagagcctgtctgaggccatggagaagagcgcccaccagaggaagagcctggcccctgagcctgtgcagatcaccccaccagcccccagcgcccagcagagctgggcccaggccttcggcggcagccagggcaacagcaacagcagcagcagccggctgagccagtactttgagaagtttgatgtgaaggagagcagctaccacctgctgatcagccggctggacctgcacatctgtgatgacagccagagccgggagcccggggtgtctgccaaccggctgatgggcggggccatgcagctgaccttcaggaagatggcctttgactactaccccttccactgggccggggacagctgcaagcactgggtgcgccactgtgaggccatggagacccggggccagtgggcccagaagctggtgatggagttccagagcaagatggagaagtggcatgaggagaccggcctgaagccaccctggcacctgggcgtggacagcctcttccggaggaaggctgacagcctgagcagccccaggaagaaccccctggagaggagccccagccagggccggcagcctgccttccagcccccagcctggaaccggctgcggagcagctgcatggtggtgcgggtggatgacctggacatccaccaggtgtccacagctggccagcccagcaagaagcccagcaccctgctgagctgcagcaggaagctgcacaacctgcccacccaggtgtctgccatccacatcgagttcacagagtactacttcccagacaaccaggagctgcctgtgccctgccccaacctgtacatccagctgaatggcctgaccttcaccatggaccctgtgtccctgctgtggggcaacctcttctgcctggacctgtaccgcagcctggagcagttcaaggccatctacaagctggaggacagcagccagaaggatgagcacctggacatccggctggatgccttctggctgaaggtgtccttccccctggagaagcgggagcgggcagagctgcaccggccccaggccctggtgttttctgccagcggcatgattgccaccaacaccaggcatgccccccactgcagctgcagcgacctgcagagcctcttccggggctttgctgctgctgagttcttccacagcaactatgaccacttccccaaggtgcctgggggcttcagcctgctgcacatgctgttcctgcaccacgccttccagatggacagctgcctgccccagcccaacaccctgcccccccagaggcccaaggcctcctgggacctgtggagcgtgcacttcacccagatcagcctggactttgagggcacagagaacttcaagggccacaccctgaactttgtggcccccttccccctgagcatctgggcctgcctgcccctgcgctggcagcaggcccaggccaggaagctgctgctggccagcgagggccgcctgaagcccagcgccagctttggcagccctgtgcagagcgaggccctggccccagacagcatgagccaccccaggagcaagacagaacatgacctgaagagcctgagcggcctgacagaggtgatggagatcctgaaggagggcagcagcggcatggacaacaagggccccctgacagagctggaggatgtggctgatgtgcacatgctggtgcacagccctgcccacgtgcgggtgcggctggaccactaccagtacctggccctgctgcggctgaaggaggtgctgcagaggctgcaggagcagctgaccaaggacacagagagcatgacaggcagccccctgcagaaccagacagcctgcattggagtgctcttccccagcgctgaggtggccctgctgatgcacccagcccctggagctgtggatgctgacagcgctggcagtgacagcaccagcctggtggacagcgagctgagccccagcgaggaccgggagctgaagagtgatgccagcagtgaccagggccctgccagccctgagaaggtgctggaggagagcagcattgagaaccaggatgtgtcccaggagcggccccacagcaatggagagctgcaggacagcggccccctggcccagcagctggccgggaaaggacatgaagctgtggagagcctgcaggccaagaagctgagcaggacccaggccagcagcagccctgctgccctgaagcccccagctggccgggagacagctgtgaatggccagggcgagctgatccccctgaagaacatcgagggggagctgagcagcgccatccacatgaccaaggatgccaccaaggaggccctgcacgccaccatggacctgaccaaggaggccgtgtccctgaccaaggatgccttcagcctgggccgggacaggatgaccagcaccatgcacaagatgctgagcctgcccccagccaaggagcccatggccaagacagatgaaggagtggccgcccctgtgtctggaggagctgcccggctgcgcttcttctccatgaagaggacagtgtcccagcagagctttgatggagtgtccctggacagcagcggccctgaggaccgcatctctgtggacagtgatggcagtgacagctttgtgatgctgctggagagcgagagcggccctgagagcgtgcccccaggcagcctgagcaatgtgtctgacaatgctggggtgcagggcagccccctggtgaacaactacggccagggcagccctgctgccaacagctctgtgagccccagcggagaagatctcatcttccaccctgtgtctgtgctggtgctgaaggtgaatgaggtgtcctttggcatcgaggtgagaggagaggacctgactgtggccctgcaggccgaggagctgaccctgcagcagctgggcaccgtgggcctgtggcagttcctgcacggccagtgccccggcacctgcttccaggagagcagcaccctgaagacaggccacatccggcctgctgtgggcctgcgctttgaggtgggccctggagctgctgtgcacagccccctggccagccagaatggcttcctgcacctgctgctgcacggctgtgacctggagctgctgacctctgtgctgagcggcctgggccccttcctggaggatgaggagatccctgtggtggtgcccatgcagatcgagctgctgaacagcagcatcaccctgaaggatgacatcccccccatctaccccaccagccctggccccatccccatcaccctggccatggagcacgtggtgctgaagagaagtgatgatggagtcttccacatcggggctgctgcccaggacaagcccagcgctgaggtgctgaagtctgagaagaggcagccccccaaggagcaggtgttcctggtgcccaccggggaggtgtttgagcagcaggtgaaggagctgcccatcctgcagaaggagctgattgagaccaagcaggccctggccaatgccaaccaggacaaggagaagctgctgcaggagatcaggaagtacaaccccttctttgagctgtag

SEQ ID NO: 194847 - DNA, 4203 bp, Artificial Sequence
  derived and/or modified sequence
atggccggcatcatcaagaagcagatcctgaagcacctgagccgcttcaccaagaacctgagcccagacaagatcaacctgagcaccctgaagggggagggccagctgaccaacctggagctggatgaggaggtgctgcagaatgtgctggagctgcccacctggctggccatcaccagggtgtactgcaacagagccagcatccgcatccagtggaccaagctgaagacccaccccatctgcctgtgcctggacaaggtggaggtggagatgaagacctgtgaggacccccggcccccaaatggccagagccccatcgccctggccagcggccagagtgaatatggctttgctgagaaggtggtggagggcatgttcatcatcgtgaacagcatcaccatcaagatccacagcaaggccttccacgccagctttgagctgtggcagctgcagggctacagcgtgaaccccaactggcagcagagcgacctgcggctgacccgcatcacagacccctgccgcggggaggtgctgaccttcaaggagatcacctggcagaccctgcgcatcgaggctgatgccacagacaatggagaccaggaccctgtgaccacccccctgcggctcatcaccaaccagggccgcatccagatcgccctgaagaggaggaccaaggactgcaacgtcatcagcagcaagctgatgttcctgctggatgacctgctgtgggtgctgacagacagccagctgaaggccatgatgaagtatgcagagagcctgtctgaggccatggagaagagcgcccaccagaggaagagcctggcccctgagcctgtgcagatcaccccaccagcccccagcgcccagcagagctgggcccaggccttcggcggcagccagggcaacagcaacagcagcagcagccggctgagccagtactttgagaagtttgatgtgaaggagagcagctaccacctgctgatcagccggctggacctgcacatctgtgatgacagccagagccgggagcccggggtgtctgccaaccggctgatgggcggggccatgcagctgaccttcaggaagatggcctttgactactaccccttccactgggccggggacagctgcaagcactgggtgcgccactgtgaggccatggagacccggggccagtgggcccagaagctggtgatggagttccagagcaagatggagaagtggcatgaggagaccggcctgaagccaccctggcacctgggcgtggacagcctcttccggaggaaggctgacagcctgagcagccccaggaagaaccccctggagaggagccccagccagggccggcagcctgccttccagcccccagcctggaaccggctgcggagcagctgcatggtggtgcgggtggatgacctggacatccaccaggtgtccacagctggccagcccagcaagaagcccagcaccctgctgagctgcagcaggaagctgcacaacctgcccacccaggtgtctgccatccacatcgagttcacagagtactacttcccagacaaccaggagctgcctgtgccctgccccaacctgtacatccagctgaatggcctgaccttcaccatggaccctgtgtccctgctgtggggcaacctcttctgcctggacctgtaccgcagcctggagcagttcaaggccatctacaagctggaggacagcagccagaaggatgagcacctggacatccggctggatgccttctggctgaaggtgtccttccccctggagaagcgggagcgggcagagctgcaccggccccaggccctggtgttttctgccagcggcatgattgccaccaacaccaggcatgccccccactgcagctgcagcgacctgcagagcctcttccggggctttgctgctgctgagttcttccacagcaactatgaccacttccccaaggtgcctgggggcttcagcctgctgcacatgctgttcctgcaccacgccttccagatggacagctgcctgccccagcccaacaccctgcccccccagaggcccaaggcctcctgggacctgtggagcgtgcacttcacccagatcagcctggactttgagggcacagagaacttcaagggccacaccctgaactttgtggcccccttccccctgagcatctgggcctgcctgcccctgcgctggcagcaggcccaggccaggaagctgctgctggccagcgagggccgcctgaagcccagcgccagctttggcagccctgtgcagagcgaggccctggccccagacagcatgagccaccccaggagcaagacagaacatgacctgaagagcctgagcggcctgacagaggtgatggagatcctgaaggagggcagcagcggcatggacaacaagggccccctgacagagctggaggatgtggctgatgtgcacatgctggtgcacagccctgcccacgtgcgggtgcggctggaccactaccagtacctggccctgctgcggctgaaggaggtgctgcagaggctgcaggagcagctgaccaaggacacagagagcatgacaggcagccccctgcagaaccagacagcctgcattggagtgctcttccccagcgctgaggtggccctgctgatgcacccagcccctggagctgtggatgctgacagcgctggcagtgacagcaccagcctggtggacagcgagctgagccccagcgaggaccgggagctgaagagtgatgccagcagtgaccagggccctgccagccctgagaaggtgctggaggagagcagcattgagaaccaggatgtgtcccaggagcggccccacagcaatggagagctgcaggacagcggccccctggcccagcagctggccgggaaaggacatgaagctgtggagagcctgcaggccaagaagctgagcaggacccaggccagcagcagccctgctgccctgaagcccccagctggccgggagacagctgtgaatggccagggcgagctgatccccctgaagaacatcgagggggagctgagcagcgccatccacatgaccaaggatgccaccaaggaggccctgcacgccaccatggacctgaccaaggaggccgtgtccctgaccaaggatgccttcagcctgggccgggacaggatgaccagcaccatgcacaagatgctgagcctgcccccagccaaggagcccatggccaagacagatgaaggagtggccgcccctgtgtctggaggagctgcccggctgcgcttcttctccatgaagaggacagtgtcccagcagagctttgatggagtgtccctggacagcagcggccctgaggaccgcatctctgtggacagtgatggcagtgacagctttgtgatgctgctggagagcgagagcggccctgagagcgtgcccccaggcagcctgagcaatgtgtctgacaatgctggggtgcagggcagccccctggtgaacaactacggccagggcagccctgctgccaacagctctgtgagccccagcggagaagatctcatcttccaccctgtgtctgtgctggtgctgaaggtgaatgaggtgtcctttggcatcgaggtgagaggagaggacctgactgtggccctgcaggccgaggagctgaccctgcagcagctgggcaccgtgggcctgtggcagttcctgcacggccagtgccccggcacctgcttccaggagagcagcaccctgaagacaggccacatccggcctgctgtgggcctgcgctttgaggtgggccctggagctgctgtgcacagccccctggccagccagaatggcttcctgcacctgctgctgcacggctgtgacctggagctgctgacctctgtgctgagcggcctgggccccttcctggaggatgaggagatccctgtggtggtgcccatgcagatcgagctgctgaacagcagcatcaccctgaaggatgacatcccccccatctaccccaccagccctggccccatccccatcaccctggccatggagcacgtggtgctgaagagaagtgatgatggagtcttccacatcggggctgctgcccaggacaagcccagcgctgaggtgctgaagtctgagaagaggcagccccccaaggagcaggtgttcctggtgcccaccggggaggtgtttgagcagcagacctag

SEQ ID NO: 194848 - DNA, 4323 bp, Artificial Sequence
  derived and/or modified sequence
atggccggcatcatcaagaagcagatcctgaagcacctgagccggttcacgaagaacctgagccccgacaagattaacctgagtacgctgaaaggcgagggtcagttgactaatctcgagttggacgaggaagtgctgcaaaacgtgttggaacttcccacgtggctagccattaccagagtgtattgcaatcgggcgtctattagaattcagtggaccaagttgaagacccacccaatatgcttgtgtctggataaggtcgaggtggaaatgaaaacgtgtgaggatccacgacctcctaacggccaaagccctatcgccctcgcttcggggcagtcagagtacgggttcgccgagaaggtggtggagggtatgttcatcatagttaattctatcactatcaagatccattcaaaagctttccacgcatcatttgagctgtggcaactgcaggggtactctgtgaacccaaactggcagcagtctgacctgcgcctaacaagaataaccgatccatgtcgtggtgaagtcttgacctttaaagagattacctggcagacattaaggatcgaggctgatgccacagacaacggagaccaagacccagtgacgactcctttgcgtttgattactaatcagggccgtatacaaattgctttaaaacgacgaaccaaagattgtaacgtgataagctctaaattgatgtttctgctcgacgatctcttatgggtacttacagattctcaactcaaagcaatgatgaagtatgctgaatcactatccgaagcaatggagaagtccgctcaccaacgcaagagcctcgcacctgaaccagtccagatcaccccccccgccccctcagcacagcagtcttgggcgcaggcctttggaggatcacagggtaacagcaatagttctagttctcggttatctcaatattttgagaaatttgacgtaaaagaatccagctaccacttgctaatcagtagactagacctgcacatttgcgatgattcacagagtagagaaccaggtgtctcggcaaacaggctaatgggtggagccatgcaactcacattccggaaaatggcattcgactactacccattccactgggctggggactcgtgcaaacactgggttaggcactgtgaagctatggagaccagagggcagtgggcccagaagctggtgatggagtttcagtcaaagatggaaaagtggcatgaggagacaggtctgaagccaccatggcacctcggagtagactcgctcttccggagaaaggccgattcactgtcaagccctcggaaaaatccactggagcgtagcccaagccaggggaggcagcccgcattccaacctcctgcctggaacaggctaaggagctcatgtatggtggttagggtggatgacctggacattcaccaggttagcaccgcggggcagcctagtaaaaagccatccaccctcctctcgtgtagcagaaagctacataatctaccaacccaggtaagtgccattcatattgagtttaccgagtattactttcccgataaccaagagctgccagttccctgccccaatctgtatatacagcttaacggactcacgtttacaatggaccccgtttccctgctatggggcaacctgttctgtctggatctctaccgatcacttgagcagtttaaggctatctacaagctagaggactcaagtcaaaaggacgaacacttggatataaggttggacgctttctggttgaaggtgtccttccctcttgagaaaagggaacgcgcagagctccaccggccacaggccctcgtgttttctgcaagtgggatgatcgccaccaatacgcgacatgcaccgcactgttcttgcagcgatttgcagtctctcttcaggggcttcgccgctgccgaattttttcattccaattatgatcattttccaaaagtacccggtggattctcactactccacatgctttttctccaccacgcatttcaaatggattcttgcctccctcaacccaatacactgccccctcaacgtcccaaggcatcatgggacctgtggtctgtccactttactcaaatatctcttgatttcgagggtaccgagaacttcaagggccacacattaaattttgtcgccccgtttccactgtcaatttgggcttgtctcccccttcggtggcagcaagctcaggctcggaagcttctactcgcaagtgaaggccgtctcaagccatcagcctcctttggctccccggtgcaatctgaggctctagcacctgacagcatgagccatccgaggtcaaagactgagcacgacctcaagagtcttagcgggctgaccgaagtgatggagatactcaaagagggcagctccgggatggacaataagggccctctgacagaattggaagacgtcgcagatgtccacatgcttgttcattctcccgcccatgtcagggtgagactagatcattaccagtatttggctctcctcaggctgaaagaggtgctgcagcgactgcaggaacagcttactaaggacaccgagtctatgacaggtagccctctccaaaaccagacagcctgcattggggtgctctttccgagtgcggaagtcgccctgctgatgcatcccgccccaggcgctgttgacgcagatagtgcgggcagcgacagcacgtcattagtggactctgagctgtcaccatcagaagacagagagctcaagtctgatgccagttcggatcaggggcctgcctctccagagaaggtgcttgaagaaagctccattgaaaaccaggatgttagccaagagagaccacattcaaatggagaattgcaagactcaggaccgctggcccagcagcttgctggcaaaggccacgaggccgtcgagtccctccaggcgaagaagcttagtcgcacgcaagcctcctcctcccctgccgcactgaaaccacccgcggggcgcgagacggcagtgaacggacagggggagctcatcccgttgaaaaacatcgagggggagctttcaagcgctattcacatgaccaaagacgctacaaaagaagcgctccacgcaaccatggacctgacaaaagaggccgtgagtctgacgaaggacgctttttctctcgggcgtgatcgaatgactagcacaatgcataaaatgctctctttaccccctgccaaggagccaatggcgaagactgatgaaggtgtagccgctcccgtgtctggcggcgccgcccgcctaaggttcttttcgatgaaacggacagtctcgcagcagtctttcgacggcgtctccctggattcttctgggcctgaggatcggatatctgttgatagtgatggcagcgattccttcgttatgctgctggaatccgagtccggcccagagagtgtgccgcccgggtctctcagcaacgtcagtgataacgctggagtgcaaggcagtccactcgtcaataactacggccaaggctcacccgcagctaatagctcagtgtctccctcgggtgaggacctgatttttcatcctgtgtccgtcctcgtgctgaaagtgaatgaagtgagcttcggaatcgaggtccgcggcgaggatttaacggtcgcgttacaggcggaggaattgacactccagcagttgggcaccgtgggcctgtggcagttcttgcatggtcagtgccctggaacctgctttcaggaatcctcgacactgaaaaccggacatattcgacctgccgtagggttaaggttcgaagtggggccaggcgcagccgttcacagtcctctggcaagccagaatggcttcctccacctccttttacacggatgtgatcttgagttattgacctctgttctatctggactgggaccatttctggaggacgaggaaatccctgtggtcgtgccaatgcaaattgaacttctaaattctagcattacactgaaggatgacattccgcctatatacccaacaagtccgggccccattcccattaccctggcaatggagcatgttgtccttaaaagatcagacgatggggtgttccacatcggggccgccgcccaggacaagccctcagccgaagtgctcaaatccgaaaagagacagcctccgaaggaacaggtgtttctggtgcccacgggtgaggttttcgaacagcaggtgaaagagcttcccattctgcaaaaagaactgattgagaccaagcaggccttagctaatgcgaatcaggataaggaaaaacttctgcaagagatacgcaaatataacccgttttttgagctgtag

SEQ ID NO: 194849 - DNA, 4203 bp, Artificial Sequence
  derived and/or modified sequence
atggccggcatcatcaagaagcagatcctgaagcacctgagccggtttaccaagaacctgagcccggataaaattaacctgtcaacattgaagggtgaagggcagctcaccaacctcgaacttgatgaagaagtgttacaaaacgttctcgagctgcccacctggcttgccatcaccagagtctattgcaatagggcatccatccgtatccagtggacaaagctcaagactcatcccatttgtctgtgcctggacaaggtggaggttgaaatgaaaacctgcgaagaccccaggcctcccaacggccagtcaccgatcgcccttgcttccggccagagtgagtatggcttcgctgagaaggtagtggagggcatgtttatcatcgtcaatagcataaccattaaaatccactccaaggcctttcacgccagcttcgaattatggcaactacagggctactctgttaatcccaattggcagcaaagcgacctacgcctgacgcggatcaccgacccctgtcggggagaggtgctgacgtttaaggagatcacttggcagaccctaagaattgaagctgacgcaacggataacggagaccaggatcccgtgaccaccccgttgagactcatcacaaaccagggtcgtatccaaattgccctgaagagacgtaccaaggactgcaatgttatctctagcaagctgatgttcctgctggacgatcttctgtgggtgcttaccgacagtcagctgaaagctatgatgaagtacgccgaaagtctgagcgaggcgatggaaaagtccgcccatcaacgcaaatctctcgcgccggagccagtgcagattaccccccctgcaccaagtgcacaacagtcttgggcccaggccttcggcgggagtcagggcaacagtaactctagttcatcacgactgagccagtatttcgagaaattcgatgtaaaagaaagctcctatcatctcctcatttcaagacttgacttgcacatctgcgacgactctcagagccgcgagccaggcgtgagcgccaatagacttatggggggggcaatgcagctaacctttaggaagatggccttcgactattacccctttcactgggccggcgactcttgtaaacattgggtccgccattgcgaggcgatggagacacgcggccaatgggcccagaaactagttatggagttccagagcaagatggagaaatggcacgaagagacgggactgaaacccccatggcatctgggagtggatagcttattccggagaaaagccgactcccttagcagcccccgtaaaaacccactggagcgcagcccgtctcagggtagacagcccgcctttcagcccccagcatggaaccggttgagaagttcctgtatggttgtcagggtggacgatctggatatacaccaggtgtcgactgcaggccaaccttcgaagaagccatcgacactcttgtcttgttcaaggaaactgcataacctgccaacacaagtatccgcaattcacatcgagttcaccgagtactatttccctgataatcaggagctgcctgtgccttgcccaaatctttacattcagcttaacggtctgaccttcaccatggatcctgtgtcactgctgtgggggaacctgttttgcctggacctgtataggagcctggaacagtttaaggccatctacaaactggaagattctagccagaaagacgagcacctcgacattcgactagatgcgttttggttgaaagtctcattcccactagagaagagagagcgtgcggagctccaccggccccaggcgctggtattttcggcatctggcatgatcgcaaccaacacacgccatgccccacattgttcctgctcagatctgcagagccttttcaggggctttgctgccgctgaattttttcattcaaattatgaccacttcccaaaagtgcccggaggtttctctctactccatatgctgtttctgcaccacgcgttccagatggatagctgcctgccgcagcccaacacactcccccctcagcgccccaaagcgtcatgggacttgtggagcgtgcactttactcagatcagtctcgattttgagggtacagagaacttcaaaggccatacactgaacttcgttgccccgttccccttgtctatatgggcatgtctgccactgcgatggcaacaagcccaggctcgcaagttgttattggcctccgagggcagactgaaaccttctgcaagctttggaagtcctgtgcaaagtgaggccctggcacctgacagtatgtcccacccccggtccaaaactgagcacgacctgaaaagcttgtccggattgacagaagtgatggaaatcctcaaggagggatcttctggtatggacaacaaaggcccactcacagagcttgaagacgtggccgatgtacacatgctcgttcacagccccgcccatgtgcgtgttagactggaccactatcagtacctggccctgcttagactcaaggaagtcctgcagcgcctgcaagagcagctcacaaaagacactgagtctatgaccggctcccccctgcagaaccagacggcttgtatcggagtgttgtttccctcggccgaagtggctctactgatgcacccagctcctggtgctgtggacgctgactcagccggctccgacagtacctccctcgtcgactccgagctgagtcccagcgaggacagagaacttaagtccgacgcgagctctgaccaagggcccgcaagtcctgagaaagtcctggaagaaagttccattgaaaaccaagacgtaagccaggagcggccacactcgaatggggaactgcaggactccggaccgctggcgcaacaacttgccggtaaaggtcatgaggctgtggagtctctccaggcgaagaagctcagtaggacccaagcttcgagtagcccagccgccctcaaacctcccgccgggcgagaaaccgctgtgaacggccagggtgaactgatcccattaaagaacatcgagggcgaattgtcaagtgcgatccacatgacaaaagatgctacaaaggaggctctgcatgcaacgatggatctgaccaaggaagctgtcagccttaccaaggatgcattttcactaggacgtgaccggatgacttcgacaatgcacaagatgttgagtctgccgcccgccaaggagcccatggccaagacggacgagggagtcgcggctcccgtttcgggaggagccgctcgattgcggtttttctctatgaaacggacagtaagtcagcagtccttcgacggagtgtcgctggatagcagtgggcccgaggaccggataagcgtagatagtgatggctcagattcattcgtgatgctcctggagtctgagtccgggccagaatcagtgccaccggggagcctctcgaatgtcagcgataatgcaggtgtccaggggtctccacttgtgaataattacgggcagggctcacccgctgctaactcaagtgtaagccctagcggcgaagatctaatttttcaccccgttagcgtgctagtattaaaggtaaatgaggtgtcttttggtatcgaggtcagaggtgaggacttgaccgtcgccctccaggcggaggagttaaccctacagcaactgggaaccgtgggtttatggcagtttctgcacggccaatgtccaggcacctgcttccaggaatccagcactctcaagacagggcacatcagacctgccgtgggtctccggtttgaggtcgggccaggagctgccgttcatagtcctctcgctagccaaaacggatttttacatcttctgttgcacggctgtgacctagaactgctcacttccgtgctgtcaggtttgggcccatttttggaggacgaagaaattccagtggtcgtgcctatgcagatcgaacttctaaactcctcgatcactctgaaggatgatatcccccctatttatcctacttcgccaggccccattcccatcactctggctatggagcacgtggtgctgaaacgtagcgacgacggcgtgtttcacatcggagcggcggcccaggacaaaccctccgccgaggttttaaaatccgagaagagacagcctccaaaggaacaagtgtttctcgttccaaccggagaggtattcgagcagcagacatag

SEQ ID NO: 194850 - DNA, 4323 bp, Artificial Sequence
  derived and/or modified sequence
atggcgggtatcataaagaagcagatactgaagcatctgtcacgctttactaagaatctcagccccgataaaattaacctaagtacactaaagggtgaaggtcagctcacaaacctggagcttgacgaggaagtcctgcagaatgtgctggagctccctacctggctagccataacacgggtctactgcaacagggccagcatccgcatccagtggaccaaacttaagacacaccccatctgtctgtgccttgacaaagtcgaggtcgaaatgaagacctgcgaagacccgcgacccccaaatggccagagcccaatagcccttgcgtctgggcagtccgagtacggatttgctgaaaaggtggtcgagggcatgtttatcatagtaaactcaatcacaataaaaatacattctaaggctttccacgcgagcttcgaattgtggcagcttcagggatatagcgtgaaccctaattggcagcagtcagacttgaggcttaccaggataaccgacccgtgtcggggagaagttctgactttcaaggaaatcacttggcagacactccggattgaagcggatgcaaccgataacggagaccaggacccggtcactacacccctgcgactgatcacgaaccagggtagaatccagatcgcgctaaaacgacgtacgaaagactgcaatgttatatcctctaaacttatgtttctccttgatgatttgttgtgggttttaactgactcacaactcaaagcgatgatgaagtatgcggagagtctgagcgaggccatggagaagtccgctcatcaacggaagtccctggcccctgagccagttcagataacaccacccgcaccctctgcccaacagagttgggcccaagcttttgggggaagccagggcaactcaaactcctcctcttcccggctttcacaatacttcgagaaattcgacgtgaaggaaagtagctatcatctcctcataagccgcctggacctgcatatttgcgatgatagtcagtctcgggaacctggtgtatcggccaacagacttatgggcggagctatgcagcttactttccggaagatggctttcgattactaccctttccactgggcaggggattcgtgcaaacactgggttcgacactgcgaggccatggaaacgcggggacagtgggcccagaaactcgtcatggagtttcagtctaagatggagaagtggcacgaagagacgggcctgaaacccccatggcacttaggcgtggactccttgtttcggaggaaggccgatagccttagtagtccaaggaaaaatcccctggaacggagtccgtcacagggtaggcagccggcattccaaccacccgcatggaataggcttcggagcagctgtatggtagttagggtggacgacctggatattcatcaggtgtccaccgcaggacagccctcaaaaaaaccttcaacattgctatcatgcagcagaaaactgcacaatctgcccactcaagtgtccgccattcatatcgaattcaccgagtactactttcctgataaccaagagctgccagtcccttgtcctaatctgtatatccaacttaacggccttactttcactatggacccggtctcgctgctctgggggaatctcttttgtctcgatctgtaccgttctctggaacagttcaaggctatctacaagctggaggattcaagccagaaggacgagcatctggatatacggcttgacgcattctggctgaaggttagttttcccctggaaaagcgggagcgggcagagttgcacaggccccaggccctggtatttagcgcctctggcatgatcgctacaaatacccggcacgccccacactgctcctgtagtgatctgcagagcctgttccgtgggttcgccgctgccgaatttttccactccaactacgaccacttccctaaagttcctgggggattctcactcttacacatgctgtttctgcaccacgcttttcagatggattcatgtctgccccagccaaataccttgcctcctcagcgacccaaggctagttgggatctttggagtgttcactttacccagatcagcttagatttcgaaggcacggagaactttaagggtcatacgttaaactttgttgcaccattccctttatctatatgggcctgcctaccgctgagatggcagcaggcacaggcaagaaaactgcttctggcttctgagggacgattgaaacccagcgcttcctttgggtcacccgtacagtccgaagccctcgcacctgattcaatgagtcatcctaggtctaagacagagcatgacctaaagtccctgagtgggttaactgaggtcatggaaattctcaaagagggcagcagcggaatggacaacaagggacccctgacagagctcgaagacgtcgccgacgtgcacatgttagtgcattcccctgcgcacgtaagagtgcggctggaccactaccaatacctggccctattgcggctaaaggaggtcctgcagcggctgcaggagcaactcactaaagacaccgagagcatgacggggtcgcccttgcagaatcaaaccgcttgtataggagtgttgtttccctccgcagaagttgctcttcttatgcacccagctcccggtgccgtcgatgctgattccgctggttcagacagcacatctttggtcgactccgaactgtcacccagtgaagaccgggaactgaagtccgacgctagcagtgaccaggggcctgcctccccagagaaagtcctcgaggagtcaagcatagagaaccaagacgtgtctcaggagaggccccactccaacggggaactgcaggactctggtcccctggcccagcaactggctgggaaaggccatgaagcggttgaaagcctacaggccaagaagctgagccgcacgcaggcctcctcttcccccgctgcattgaaacccccagccggacgagaaacagccgtgaacggtcagggggagcttattccccttaagaatatcgagggggagcttagttccgctatacatatgacaaaggatgccaccaaggaagctctgcacgcaaccatggaccttaccaaagaggcggtgtctctgaccaaagacgccttttctcttggaagggatagaatgactagcactatgcacaagatgctgtctctgcctcccgctaaggagccgatggcaaagacagacgagggtgtggccgctcccgttagcgggggtgccgctcgcctgcgcttcttcagcatgaaaagaaccgtttctcagcaatcttttgacggcgtctcgctggattcatcaggtcctgaggatagaatttctgtggatagtgatgggtcggattcatttgtaatgttattggaatcagaaagtggtccagaaagcgttccacccggatctctttcaaatgtgtcagataatgccggtgtccagggcagccctttggtaaataattatggacagggatctccggcagccaactcttctgtgtcaccaagcggggaagacctgatcttccacccggtcagtgtgttggttttgaaagtaaacgaggtgagtttcggcattgaagtgaggggtgaggacctcactgtcgctctacaggccgaggaattaaccttgcaacaactgggtactgtgggcctgtggcagtttctgcacggccagtgtccaggtacgtgtttccaggaaagctccaccttgaaaacaggacacatcaggcccgctgtaggccttcgattcgaggtggggcctggcgctgccgtccactctccgctggcctcccagaatggtttcctgcatttactactccacggttgcgatctcgagctactcactagtgtgctcagcgggttgggaccctttctagaagacgaggagattccagtggtggtgcccatgcagattgagctcttgaattcttctattaccttaaaggatgacatcccccctatatatcccacatcacctggccctatccctatcaccctcgcaatggagcatgtggtgctaaagagatccgatgatggcgtattccatatcggcgctgctgcccaagacaagcccagcgcagaagtgctgaaaagtgaaaaacgccaaccacccaaagaacaggtctttctggtccctaccggggaagtattcgagcagcaagtcaaagagttgcccattctccaaaaggagctgattgagactaagcaggccttagctaacgcgaatcaagacaaggagaagctcttacaggaaattcgcaagtataatccttttttcgagctctag

SEQ ID NO: 194851 - DNA, 4203 bp, Artificial Sequence
  derived and/or modified sequence
atggccggaatcatcaagaaacaaatcctgaagcatctgagcaggttcacaaagaatctgtctccagataagattaacctgagtacactcaagggtgagggacagctcacaaacttagagcttgatgaagaagtgcttcagaacgtgctcgagctccccacatggctggccatcactagagtgtattgtaatagagctagtatacgtatacagtggactaaactcaagacccacccgatctgcctctgcctggacaaggtcgaggtggaaatgaagacctgcgaagacccaaggcccccaaacggccagtccccaatcgccctggcatccgggcaaagcgaatacggctttgccgaaaaggtcgtggaggggatgtttatcatcgtaaattcgattaccatcaagatccactccaaggcttttcacgcctccttcgagctgtggcaactccagggttacagcgttaacccaaattggcagcaaagcgacctgcggctgacaagaatcacagacccttgtaggggcgaggtgctgaccttcaaggagataacctggcaaaccttgagaatcgaggcagacgccacagacaacggtgaccaggaccctgtgacaactccccttagactgattactaaccagggtagaatccaaatagccctcaaacgccgtaccaaagactgcaacgtgatttcaagcaaactgatgttcctactcgatgatcttctgtgggtcctgaccgactcccaactcaaggctatgatgaagtacgccgagtcactgtcggaggccatggagaagagtgcacaccaacggaagagcctggctcccgagccggtgcagattaccccgccagctccctccgcgcagcagtcctgggctcaggcattcgggggttctcagggcaatagcaactcctcatcctctaggctgagccagtactttgagaagtttgatgtcaaggaatccagttatcacctgctgatctccaggcttgacctgcacatatgcgacgactcccagtcccgtgagcccggagtcagcgcaaatcgcctcatgggaggggctatgcaactcaccttccgcaagatggccttcgactattaccccttccactgggcaggggacagctgcaaacattgggtgcgacactgcgaagcaatggagacccgtggacagtgggcacaaaaattggtgatggaattccagtccaaaatggagaaatggcacgaagaaactgggctgaagcctccgtggcatctgggcgtggatagtctgttccggagaaaagcagattctttgagcagcccaaggaaaaatccgctggaaaggtccccaagccagggcaggcagccagcctttcagcccccagcttggaaccgactcaggagcagctgcatggtggtaagggtggatgatttagacatacatcaggtcagtaccgccggtcagcccagtaaaaagccttctacgctcctttcctgttcacgtaaactgcataacctacccacccaagtcagcgccattcatattgagttcacagaatattatttccccgacaatcaagaactgcccgttccttgtcccaatctgtacatccagttaaacgggcttacgtttacaatggaccctgtgagtctgctgtggggcaatctgttttgcctagacctgtacaggagccttgaacagtttaaggcgatttacaagctcgaagacagttctcaaaaagacgaacacctcgatattaggctcgacgccttctggctgaaggtgagcttccctctagagaagagggagcgagctgagctccacaggccacaggcactagtgttcagcgcatccgggatgatcgctacaaacactcggcacgctccccactgttcatgctccgacctgcagtcattattccgaggattcgccgcagctgaattttttcattccaattacgatcacttccctaaggtgccaggagggttttccctgctgcatatgttgtttttgcatcacgccttccaaatggactcttgcttgccacagcctaacaccctccccccacagaggccaaaggccagttgggatctttggtcggtgcatttcacgcagatttctctggacttcgagggcaccgagaacttcaagggacacaccctaaacttcgtggcaccttttcctctgtctatctgggcctgcctgcctctcagatggcaacaggcccaggcgagaaaactattgctggcgagcgagggacgcctgaaaccctctgcatccttcgggtcacctgtgcagagcgaggcattagcgccagatagcatgtcccatccgaggtctaagacggagcatgacctgaaatccctctcaggtctgactgaagtaatggagatccttaaggagggaagcagcggcatggacaacaagggcccactgacagagctagaagatgtcgctgatgttcacatgttggtgcattctccggcacacgtccgcgttcgcctagaccattatcagtacttggcgctgttaaggctcaaagaggtgctacagcgactgcaggagcagttgaccaaggacaccgagagtatgactggcagtccgcttcagaatcagacagcttgtatcggcgtcttgtttccgtcagcagaggtggctttgctaatgcacccggcacccggagctgtggatgccgactccgccggttcagacagcacaagcctggtagattccgagctttctccaagtgaggaccgggagctgaagagtgacgcctccagcgaccaaggacctgcctcccccgaaaaggttctagaggagagctccattgagaatcaggacgtgagccaagaaaggccccactcaaatggcgaactgcaggactccggacccctggcccagcagctcgcgggaaaaggacacgaagccgtagaatctctgcaggcaaagaagcttagtcggacacaagcatctagtagcccggctgccttgaagcctcccgctggaagggagactgcggtaaatggtcagggcgaactgatccccttaaagaacattgaaggcgagctgtcatctgccatacatatgaccaaggatgcaactaaggaagcactccacgcgactatggatctgactaaggaagcagtgagtctgactaaagatgccttttcattgggtcgggatcgcatgactagtacaatgcacaagatgctctcactgcctcccgcaaaagagcctatggcaaagactgatgaaggcgtggcagctcccgttagcggcggagccgcacgtcttaggttttttagcatgaagcgtacagtgtcacagcagtcattcgacggcgtgagcctggattcttctgggccagaggaccggatatctgtcgactcggacgggtccgactcgtttgtgatgctgctcgagtccgagtccggacccgaatccgtccctccaggctcactttcaaatgtgtcagacaatgccggagtccagggttcaccactggtcaacaactacggtcaaggatctcccgctgctaatagtagtgtgagtccgtctggagaagatttgattttccaccccgtcagcgtgctggtgcttaaagtaaatgaggtaagcttcggaatagaagtgcggggtgaggatttaaccgtggccctgcaggccgaagagctaactctgcagcaactgggaaccgtgggcctgtggcagtttttgcatggccagtgccccggtacatgcttccaggagagcagcactcttaaaacgggccacattcgtccagccgtgggcctgcggtttgaggttggtcccggtgcagcagtgcatagcccgctggcctcgcagaatggcttcctccatctgcttctgcatggttgcgaccttgaactgttgacctctgtactctcagggttgggaccctttctggaagatgaggagatcccggtggtagtgccgatgcagattgagcttcttaattccagtattactcttaaggatgatattccacctatatatccgacaagtccgggacctatccccataacgctggccatggagcacgtggtgctcaaacggtccgatgatggggtattccacataggagcggctgcgcaagataaaccttccgctgaggtactgaagtccgagaaacggcaacctcctaaggagcaggtcttcttagtgcccacgggcgaagtctttgaacagcagacctag

SEQ ID NO: 194852 - DNA, 9570 bp, Artificial Sequence
  derived and/or modified sequence
atcgtggcggagcgccaggcgcccaaagaggggcgagaaagcgccatggcggcggcggcggctgtgtccggtgctcacgccgcggcgaggtgaggggaccgcctcttctccacaactgaggaggccacagctgccggcccacccgccttccacgcgggccgcggctccggcatggccgggatcattaagaagcagatcctgaaacacctgtcccggttcactaagaatctttccccagacaaaatcaacctgagcaccctgaaaggggagggtcagctgaccaacctggagctggatgaagaggttctacagaatgtactggagctgcccacctggttagccatcactcgggtctactgcaacagggcctccatccggatccagtggacaaagttgaagacacaccctatttgcttgtgtctggataaggtagaggtggagatgaagacatgtgaggatcctcggccccccaatggacagtctcccattgcccttgcttcaggacagagtgaatatggctttgccgaaaaggtggtggaagggatgttcatcattgtcaattctatcaccatcaagattcactccaaggccttccacgcttcttttgaattgtggcagctccagggctatagtgtcaaccccaactggcagcagagtgaccttcgccttacccgcatcactgacccctgccgaggagaggttttaacatttaaggaaataacttggcaaacactccgaattgaggcagatgctacagacaatggtgatcaggacccagtcaccactccattgaggcttattacgaaccaaggcaggatccaaatagccctcaaaagaagaaccaaagattgcaatgtgatatcctccaagctgatgttcctgttggatgacctgctctgggtgctgactgactcacagctcaaggctatgatgaagtatgcagagtcactgagtgaagccatggagaagtcagcccatcaaagaaagagcctggcccctgaacctgtgcagatcactccaccagcccccagtgcccagcagtcctgggcccaggcatttggtggcagccagggcaacagcaacagcagcagcagccgcctcagccagtactttgagaaatttgatgtgaaagagtcctcctaccatctgctcatctcccgcctggacctgcacatttgtgatgatagccagtcccgagagccaggtgtctctgccaacagactcatgggtggtgccatgcagcttaccttccgcaagatggcgtttgactattaccctttccattgggcaggtgatagctgcaaacattgggtacgccactgtgaggccatggagacccgaggccagtgggcccagaagctggtgatggaatttcagagcaaaatggagaagtggcatgaagagacgggtctgaaaccaccctggcaccttggagtagactctctctttcggagaaaagcagattctctttccagtcctcgaaagaaccctcttgagagaagcccctctcagggcagacagcctgcctttcagcctccagcatggaaccgcttacgctctagctgcatggtggtacgggtggatgacctggacatccaccaggtttccaccgctggacagccaagtaaaaagccatctacactcctttcctgcagtcggaaacttcacaacctccctacccaggtctctgccattcatattgagttcacagagtattacttcccagataatcaggagcttccagttccttgtcctaatctctacattcagttaaatggtctgacatttactatggatcctgtcagtttgctctggggaaacctcttttgcctggatttataccgcagcttggagcagttcaaagctatctacaagctggaagattcaagtcagaaagatgaacacttggacatccgactagatgcattctggttgaaggtgagctttccactggaaaagagagagcgggcagagttgcatcgtccccaggcccttgtcttctctgcgtcaggcatgattgccaccaatacacgtcatgctccacattgtagttgttcagacctccagagtctcttccggggttttgctgctgctgagttctttcattccaattatgatcactttcctaaggttccaggtggctttagccttctgcacatgctttttttgcatcatgcctttcagatggattcctgcctgcctcagcctaataccctccctccccagagacctaaggcttcctgggatctctggtctgtccactttacccagatctccttggactttgagggaacagaaaacttcaaaggccataccttgaattttgtagcccccttccccctgtccatttgggcctgcctacccctccgctggcagcaagcccaggcacggaagcttcttttggcctcagaggggaggctgaaaccatcagccagttttggaagtcctgtccagtctgaggctcttgcccctgactctatgtcccatccgcggtcaaagactgaacatgacttgaaaagcttatcaggacttacagaagtcatggaaattctgaaagaaggcagtagtggtatggacaacaaagggcctctgacagagctggaggatgtagcagatgttcatatgcttgtacattccccggcccatgtccgcgtgaggcttgaccactaccagtacttggctctgcttcgcctgaaggaggtgctgcagaggcttcaggagcagctgactaaggatacagagtcaatgactgggtctcccctgcagaatcagacagcttgcattggagttctctttcccagtgctgaagtggctctgcttatgcatcctgcacccggtgctgtcgatgctgactctgcaggctcagatagcactagcctcgtagattcagagctatctccttcagaggatcgggaactgaagtctgatgcctcatcagaccagggcccagcaagccctgagaaggtcttggaggaaagtagcattgaaaatcaggatgtatcccaggagaggccacatagcaatggagaactgcaggactcaggtccacttgcccagcagctggcagggaagggccatgaggcagtagagtccctacaggccaagaaactgagcagaacccaagcctccagctcaccagctgcattgaagcccccagctggcagggagactgctgtgaatggacagggtgagctcatccccttgaagaacattgagggagaattgtcaagtgctattcacatgaccaaggatgccaccaaggaggctctacatgccaccatggacctcaccaaggaagctgtgtccctgactaaggatgccttcagtttgggcagagatcgaatgacctccaccatgcacaagatgttgtccctgcccccagccaaggagcccatggccaagacagatgagggggtggcagccccagtgagtggaggtgctgcacgactccgatttttctccatgaagaggacggtatctcaacagtcatttgatggtgtctcattggatagcagtggccctgaagaccggatttcagtggacagtgatggcagtgatagctttgtgatgctcttggagtctgagtctggtccagaatctgttccaccaggatctctttcaaatgtctcagataatgctggtgttcaagggagccctcttgtgaataattatggccaggggtcaccagcagccaacagttcagtttcacccagtggagaagacctcatctttcacccggtctcagttctggtcctgaaggtgaatgaggtgtcttttgggattgaggtacgtggtgaggacctgactgtggccctgcaagcagaggaactgaccctccagcagctgggcaccgtgggactctggcagttcctgcatggacagtgcccaggtacatgctttcaggaatcctcaactttgaagactggccacatcaggccagctgtgggccttcgctttgaggtggggcctggagcagctgttcattcccccctggcctcacaaaatggcttcctacatttattgcttcatggctgtgacctcgagctgctcacttcagtgctcagtggcctggggcccttcttggaggatgaggagatcccggtggtagtccccatgcagattgagcttctgaactccagcatcaccctaaaggatgatatcccccccatctatccaacatctccaggccccatccccatcactctggccatggaacatgttgtgctgaagaggagtgatgatggtgtgttccacataggcgctgctgctcaggacaaaccatcagctgaagtacttaaaagtgagaagagacagcccccaaaagaacaggtgtttttggtgcccacaggagaggtttttgaacagcaggtgaaagaactgcctatcctacaaaaagaacttatagaaactaaacaagccttggccaatgccaaccaggataaagaaaaacttcttcaggagattaggaaatataaccccttctttgagctctgaaaccagtggctcagccatctgtgccaaggagagaggctatcaccagcaatagcaccacctaggacagagggcactgtccagtgctgaataagtcactacggatgccagagggactggggagcactcacttcacttgtgtgggtgtgctttccactagctgttcttacttggactgaggacaagggcaaagcatgattgtatcccaggaaactggggcttgccctgtgtgtggcacaagcatcatgtcttgcctgtataaagccttttggtcctctgtgtactaggtggaatcttctcaacactgtagggccatttcacctcatggtttcatggcagggacatttgcttccttcacaggcctgtgtgaacaagcaaaagtacccacctcctcggtcacccacagagccaccaaagattccatgtcccagagcttcccatagcagacctgaaaagtccatgacctgagctttggccatggtagtggagtggaacaggaaatagtccagcagaggagtgtgggggaagggggcaggagaggcacaagaataagggagacctggactctgcctttttgggaaaaggaaccaagctcatagcaatttggctgataacacaatcagatttttccaggttaagcttcctttctgttatactttcatcattgtgatgctgtggtagaaagtaaataacagtagtggctcagtcatttaatctttcccctctataatacaacttacttgaaatttaaatcaagaaaaaatttctgacgctgagctaggttggtggcatgatatgccaggggtcagtgggggagcttgcttctgagccccctgttgtccgcctggagtcctgcttgtctttcccagctgtgctgagtggctcttctgtctccctggggtccctggcacatctgctttcccagctctgtgaccttaccagttctctcctcagcccttggtggtttgggagctgaatatatgttttaaacttttacataaacaactcaacctgttgcctctcacttccctccatcactgtggcttttaaaactcatgtattttgactcaagtgaaaaaaacacaaaaatccctcatcccagctaggttttgccccctgccctataagagagctatttccccctttctttcctttgaattcttctccaacaccatcccttcattcatactgccctgtgatacacttgaagctgtgttgattggacagacgttcatcagctaacttacctttacttggcaagatggtaaaatagtaacttagtgatgttactaaagtctcgaccattcacctttccatactgaaggaaaggtaaaaaggtttcttctatgggaaattatgcttgacttgcatactctagtttgatgaggataaaaagaaacatgtaattgcagtggtgtttacaactaattgatcacaaccaatcatagatttctttgttccttctccactctcaacacttcatttgactagaaaaaaaaaatgtattcaccaaggaacaggacccaatttgttcagacttttgttaagtttctttactaaggcaatttttgaaacaccagttactatgggatggtgggaatttttcatgcttaagaaatagagacttaggaacaaagaaacatctttctggagaagatgctaatgggaagttacctaaggcttgatgcttggttcaaccttatttaaaatttttataaatgacctgaaagtaggattttacagtgaaatcaaatgtcactacttccaggcagtgaaaggtaatctagaagaggtttaaaaaacacaaaaccggtcgggcacagcggctcacgcctgtaatcccagcactttgggaggccgaggcggggagatcacgagttcaggagatcgagaccatcctggccaacatggtgaaactttgtttccactaaaaatacaaaaattagctgggtgtggtggtgggtgcctgtagttccagccactcgggaggctgaagcaggagaatcgcttgaacccgggaggcagaggttgcagtgagccgagatagcgccattgcactccagcctgtcaacagagtgagactccgtctcacaacaaacaaacaaacacaaaaccacagaagggttactaataagcagggctgagaatactcagaaaactgacaggtgaggttcaacataatataaggaaatgtatttatggaagaattatcaactgatatgcctgaacactgttagaactcaggaaagaaacaagcattgctgagggggaggagagatcaatgtgctgctgtggccaaaagcctaattgccctgtgggcatcatcaggaagggcttttggagataacagagaacagcactttatacaaaaccatggatatgtcttgatcggattatctgtgtttctagtgaccttatttacaagatatatgataaagggaggaaaggtccagagaacagccaaaattatcaggggatggaggtatatccatatgaggacacatttttaaaatatagactctatcctgcaaagatgaaagcagaggggagttagatcaaatatccaatcaagagcaaggacccggtcctgtactactagctctagggctctatctcatagccttagtaaagaaagcacttctcatagcaaatcagaaatgtaaggagctcattgtctaagaagggatgccaccagaaactatacatgggtgcaggtttatgaggaatccttgcatgacggccttctacaaggaattatagaaaagtagggctacttggtaatatacaactgagagggtaactgtgtccctcaacaaactactccttagtgcctctttcaaaggcagaatgttgatctgaatggatcactggtcaagtatggcatctctaatgttcttgaagggggaggaaggagatctggtagctggaaaatataattattccacgttaggctcacctgaattggtttaaaatcatattctgattctcttctcatcccttcctcccctcacccaccatatacctctggcatccctccatgcaaagaaatgtcgaataggcatttcttggtataatttacctacacttgtgcttgtggggtgggagtaaaaacatatccagtaagtaccaaggctaacctcctaatggctggagctcagttaggtctctgggctctctaaaggagtccagagctcttgtccatgtcacaaatggagccttagaatttctgtctttccttatgtggcagctttggccattgtgtcttgaaattctccctcaggaaatgtgataggggatattatcccatgggattttagtaaaaatcagcttgcctaatttcatattcgtgttcataatgaagaaatgcgaagtggtggtagtcctcaggattaagtgtaaaggaaaatatgcaaggaaaaagtagcagtgtcagcccttttggactgcttatgatttctgccttagagctacaagacttggaacaagaaataacaatacctcaagaaaatgtctggagagatagcaccactgtccctcaaagacttcagccactgcacattaccaattcagctgtgaagcatttacaactgtattatctgtgattgtctgcatttcctgtttacatgcatgtgctggggatatgctttagtgtgtatggactagagtttaaatcctgtctttaactgggctgcaaggatggctatcaatcccaaattctgttttcaactcactggaataattaatctggtgttcctgatataaaacaggtgggttctattcacatgatggctgctctttaccatatatttcacctgaccctcattttgccatgggcctcaacctttatgtgtgctttttatggctctgaaaggactggctcccgtgtgtggaatatacaaggtataaacaccacccctcacatacccctgtaacttaaatgcttccatttaactcacttagattactttccccttagtggtaaacgggttgggggatgggtggtagtgcaaagaaggtagtttgaaatattgccatagtaatatgggaactttttattccaaccctttaccctggcttttttttctctcaatatttgcctaaaattctaaaatgagttatagtaaaatcataaaactatggaaacaactgaactttggtacacaagttagttcgatgacatcttgttatttgagaacagtaaaaggtgtgtcattgcctcatgatttatcatagtcattactaagggtttcagagagaatctggtgtgaagcactatcctttcagacactaaggcctttacctagttgctcccctaccttctgtcggaataggattattcccatgcacctctgggtaggtataggtagtagctattgaacggggattattttccccatggcacaaggggaaacactcttggataaccttcaacaatgaggctttgctaagtggccagacttgggatttgatcttcctcacttgttatttattaagtttaagccttattcagtatctctaattgcaatagatatagttcctgtgacttctaaaaaaaattcctgttaatgctgagacagtatcttttttgtcagtttattaatttttggtcaagatttagcctgagtcttaaagcatttatttgtggaatgccccactgaagtgtcttctccattggctaagtacatgtttaaagccatgggttttaatgtaagatactttcagtatctaattctgtttcccccactgagggtgctaaagagaattagaatctttactaagacatgctcaggaaagcttcacgagagaacagcttcaaaatcctccctatgacactgaatggtagtgaggaaagaattcttggggatgccagttacatacaatagccttattactgctaatcactgtcaataaaaggtcacttcattcacctctatttgaggaaaacaatgagaatgtatctgatgaactagaatccttgtcagtattgggaaattttaatgttgcaatatctagtcaaactttgagtgtactggttctgtgaaccacctgaaaaaacaaattaaatgtattaaaccataa

SEQ ID NO: 194853 - DNA, 4535 bp, Artificial Sequence
  derived and/or modified sequence
ctccacaactgaggaggccacagctgccggcccacccgccttccacgcgggccgcggctccggcatggccgggatcattaagaagcagatcctgaaacacctgtcccggttcactaagaatctttccccagacaaaatcaacctgagcaccctgaaaggggagggtcagctgaccaacctggagctggatgaagaggttctacagaatgtactggagctgcccacctggttagccatcactcgggtctactgcaacagggcctccatccggatccagtggacaaagttgaagacacaccctatttgcttgtgtctggataaggtagaggtggagatgaagacatgtgaggatcctcggccccccaatggacagtctcccattgcccttgcttcaggacagagtgaatatggctttgccgaaaaggtggtggaagggatgttcatcattgtcaattctatcaccatcaagattcactccaaggccttccacgcttcttttgaattgtggcagctccagggctatagtgtcaaccccaactggcagcagagtgaccttcgccttacccgcatcactgacccctgccgaggagaggttttaacatttaaggaaataacttggcaaacactccgaattgaggcagatgctacagacaatggtgatcaggacccagtcaccactccattgaggcttattacgaaccaaggcaggatccaaatagccctcaaaagaagaaccaaagattgcaatgtgatatcctccaagctgatgttcctgttggatgacctgctctgggtgctgactgactcacagctcaaggctatgatgaagtatgcagagtcactgagtgaagccatggagaagtcagcccatcaaagaaagagcctggcccctgaacctgtgcagatcactccaccagcccccagtgcccagcagtcctgggcccaggcatttggtggcagccagggcaacagcaacagcagcagcagccgcctcagccagtactttgagaaatttgatgtgaaagagtcctcctaccatctgctcatctcccgcctggacctgcacatttgtgatgatagccagtcccgagagccaggtgtctctgccaacagactcatgggtggtgccatgcagcttaccttccgcaagatggcgtttgactattaccctttccattgggcaggtgatagctgcaaacattgggtacgccactgtgaggccatggagacccgaggccagtgggcccagaagctggtgatggaatttcagagcaaaatggagaagtggcatgaagagacgggtctgaaaccaccctggcaccttggagtagactctctctttcggagaaaagcagattctctttccagtcctcgaaagaaccctcttgagagaagcccctctcagggcagacagcctgcctttcagcctccagcatggaaccgcttacgctctagctgcatggtggtacgggtggatgacctggacatccaccaggtttccaccgctggacagccaagtaaaaagccatctacactcctttcctgcagtcggaaacttcacaacctccctacccaggtctctgccattcatattgagttcacagagtattacttcccagataatcaggagcttccagttccttgtcctaatctctacattcagttaaatggtctgacatttactatggatcctgtcagtttgctctggggaaacctcttttgcctggatttataccgcagcttggagcagttcaaagctatctacaagctggaagattcaagtcagaaagatgaacacttggacatccgactagatgcattctggttgaaggtgagctttccactggaaaagagagagcgggcagagttgcatcgtccccaggcccttgtcttctctgcgtcaggcatgattgccaccaatacacgtcatgctccacattgtagttgttcagacctccagagtctcttccggggttttgctgctgctgagttctttcattccaattatgatcactttcctaaggttccaggtggctttagccttctgcacatgctttttttgcatcatgcctttcagatggattcctgcctgcctcagcctaataccctccctccccagagacctaaggcttcctgggatctctggtctgtccactttacccagatctccttggactttgagggaacagaaaacttcaaaggccataccttgaattttgtagcccccttccccctgtccatttgggcctgcctacccctccgctggcagcaagcccaggcacggaagcttcttttggcctcagaggggaggctgaaaccatcagccagttttggaagtcctgtccagtctgaggctcttgcccctgactctatgtcccatccgcggtcaaagactgaacatgacttgaaaagcttatcaggacttacagaagtcatggaaattctgaaagaaggcagtagtggtatggacaacaaagggcctctgacagagctggaggatgtagcagatgttcatatgcttgtacattccccggcccatgtccgcgtgaggcttgaccactaccagtacttggctctgcttcgcctgaaggaggtgctgcagaggcttcaggagcagctgactaaggatacagagtcaatgactgggtctcccctgcagaatcagacagcttgcattggagttctctttcccagtgctgaagtggctctgcttatgcatcctgcacccggtgctgtcgatgctgactctgcaggctcagatagcactagcctcgtagattcagagctatctccttcagaggatcgggaactgaagtctgatgcctcatcagaccagggcccagcaagccctgagaaggtcttggaggaaagtagcattgaaaatcaggatgtatcccaggagaggccacatagcaatggagaactgcaggactcaggtccacttgcccagcagctggcagggaagggccatgaggcagtagagtccctacaggccaagaaactgagcagaacccaagcctccagctcaccagctgcattgaagcccccagctggcagggagactgctgtgaatggacagggtgagctcatccccttgaagaacattgagggagaattgtcaagtgctattcacatgaccaaggatgccaccaaggaggctctacatgccaccatggacctcaccaaggaagctgtgtccctgactaaggatgccttcagtttgggcagagatcgaatgacctccaccatgcacaagatgttgtccctgcccccagccaaggagcccatggccaagacagatgagggggtggcagccccagtgagtggaggtgctgcacgactccgatttttctccatgaagaggacggtatctcaacagtcatttgatggtgtctcattggatagcagtggccctgaagaccggatttcagtggacagtgatggcagtgatagctttgtgatgctcttggagtctgagtctggtccagaatctgttccaccaggatctctttcaaatgtctcagataatgctggtgttcaagggagccctcttgtgaataattatggccaggggtcaccagcagccaacagttcagtttcacccagtggagaagacctcatctttcacccggtctcagttctggtcctgaaggtgaatgaggtgtcttttgggattgaggtacgtggtgaggacctgactgtggccctgcaagcagaggaactgaccctccagcagctgggcaccgtgggactctggcagttcctgcatggacagtgcccaggtacatgctttcaggaatcctcaactttgaagactggccacatcaggccagctgtgggccttcgctttgaggtggggcctggagcagctgttcattcccccctggcctcacaaaatggcttcctacatttattgcttcatggctgtgacctcgagctgctcacttcagtgctcagtggcctggggcccttcttggaggatgaggagatcccggtggtagtccccatgcagattgagcttctgaactccagcatcaccctaaaggatgatatcccccccatctatccaacatctccaggccccatccccatcactctggccatggaacatgttgtgctgaagaggagtgatgatggtgtgttccacataggcgctgctgctcaggacaaaccatcagctgaagtacttaaaagtgagaagagacagcccccaaaagaacaggtgtttttggtgcccacaggagaggtttttgaacagcagacatagcaataacaacattctgagacacagaggtgccagtgatggactggatcagcttgaaagaagcacaaagactccgtgatcacaatagtcaaagactggctttggaacacagtaccaagtaattcacagaaaaagttttttggctgcaggattaagtaatgatgagtcttccctttcaactgttgttaaatctgagacatcctgactctcgagctgggaagatgaaagaaactctattatatatttggcctactttccaggcttgggcaaa

SEQ ID NO: 194854 - protein, 767 aa, Artificial Sequence
  derived and/or modified sequence
MGRRSRGRRLQQQQRPEDAEDGAEGGGKRGEAGWEGGYPEIVKENKLFEHYYQELKIVPEGEWGQFMDALREPLPATLRITGYKSHAKEILHCLKNKYFKELEDLEVDGQKVEVPQPLSWYPEELAWHTNLSRKILRKSPHLEKFHQFLVSETESGNISRQEAVSMIPPLLLNVRPHHKILDMCAAPGSKTTQLIEMLHADMNVPFPEGFVIANDVDNKRCYLLVHQAKRLSSPCIMVVNHDASSIPRLQIDVDGRKEILFYDRILCDVPCSGDGTMRKNIDVWKKWTTLNSLQLHGLQLRIATRGAEQLAEGGRMVYSTCSLNPIEDEAVIASLLEKSEGALELADVSNELPGLKWMPGITQWKVMTKDGQWFTDWDAVPHSRHTQIRPTMFPPKDPEKLQAMHLERCLRILPHHQNTGGFFVAVLVKKSSMPWNKRQPKLQGKSAETRESTQLSPADLTEGKPTDPSKLESPSFTGTGDTEIAHATEDLENNGSKKDGVCGPPPSKKMKLFGFKEDPFVFIPEDDPLFPPIEKFYALDPSFPRMNLLTRTTEGKKRQLYMVSKELRNVLLNNSEKMKVINTGIKVWCRNNSGEEFDCAFRLAQEGIYTLYPFINSRIITVSMEDVKILLTQENPFFRKLSSETYSQAKDLAKGSIVLKYEPDSANPDALQCPIVLCGWRGKASIRTFVPKNERLHYLRMMGLEVLGEKKKEGVILTNESAASTGQPDNDVTEGQRAGEPNSPDAEEANSPDVTAGCDPAGVHPPR

SEQ ID NO: 194855 - DNA, 2304 bp, Artificial Sequence
  derived and/or modified sequence
atgggacggcgtagccgtgggaggcgcctgcaacagcagcagagacctgaggacgcggaagacggtgccgaaggcggcggaaagaggggggaggcaggctgggagggtgggtacccagagatcgtaaaggagaacaaactatttgaacattattatcaggagctgaagattgtccccgaaggcgagtgggggcagtttatggacgcccttcgcgagccactacctgcaacccttcgcattacgggatacaagagtcacgccaaagaaatccttcactgtctgaagaataagtatttcaaggagctcgaggacctggaggtggatgggcagaaggtcgaggtgccacagcctctctcttggtacccggaagagctggcctggcatacaaatctctcgcggaaaatcttgcgcaaatccccccacctcgagaagttccaccagttcctggtcagtgaaacggagtctggaaatatttcccggcaggaggccgtttccatgattcctcctcttttgctcaatgtaagaccacaccataagatcctagacatgtgcgccgctccagggagtaaaaccacgcaattaatcgaaatgttgcacgcagacatgaatgtcccatttcctgaaggtttcgtaatcgccaacgacgtggacaacaaaaggtgttacctcctggtccatcaagccaagcgcctcagttctccctgcatcatggtggtgaatcacgacgcctcctccattcccagacttcagattgatgtggatggccgcaaagagatcctgttctatgatcgcatcctgtgcgacgtcccatgtagcggcgatggcactatgcgtaaaaacatcgacgtgtggaagaagtggactacactgaacagcctgcagttacacgggcttcagctgaggattgccactcggggggcagagcagcttgcggaaggcggaagaatggtctattctacctgctctctcaatccaatcgaggacgaggccgtgattgcctccctgctagagaagtcagaaggtgcgctcgaactagctgacgtgagtaacgagctaccaggactcaaatggatgccaggcattacacaatggaaggtgatgaccaaagacggccagtggttcaccgattgggacgctgtgcctcactcccgccacacccagatacggccgacaatgttccctcctaaggatcccgaaaagctccaggctatgcacttggagcgttgcctgaggatcctgccacaccatcagaacaccggtggcttcttcgtcgctgttctggtgaagaagagctcaatgccctggaataagaggcaaccaaaactgcaaggtaaatccgcggagactcgcgagagtactcagctgtcgccagctgatctgaccgagggaaaacctacagatccctcaaagctggaatcaccctcctttactggaacgggcgataccgaaattgcacatgcaaccgaggacctagaaaacaacggttccaaaaaagacggcgtatgcggtccccccccttcaaaaaagatgaagctttttggctttaaagaagatccgttcgtctttatccccgaagatgaccccctttttccacccattgagaagttttatgccctcgacccatcattccctcggatgaacttgttgactagaaccactgaggggaaaaagagacaactgtatatggtgtcaaaagaattaaggaacgttctcctcaataatagcgagaaaatgaaggttatcaacacagggattaaggtctggtgtcgtaacaacagcggcgaagaatttgactgcgcttttagactggcccaggagggaatatatactttatacccgtttatcaactcacgtattatcaccgtgtcaatggaagacgtgaagatcttgctgacccaggagaaccctttctttagaaaattgagctcagagacttattcgcaggcaaaagatctggccaaagggagcattgttcttaagtacgagcctgactccgctaaccccgatgcgctgcaatgccccattgttctgtgtgggtggcgaggcaaggcttccatccggacctttgtgccaaaaaatgaacggcttcattatttgagaatgatgggcctcgaggtgcttggcgagaaaaagaaggaaggagttattctgactaatgaatcagccgccagtaccggccaacctgacaatgatgtcaccgaaggtcagcgcgccggcgagccaaatagcccagacgctgaagaggctaacagcccagacgtgaccgccggctgcgatccagccggagttcacccccccaggtag

SEQ ID NO: 194856 - DNA, 2304 bp, Artificial Sequence
  derived and/or modified sequence
atgggcagaagaagccggggccggcggctgcagcagcagcagaggccagaagatgctgaagatggagctgagggcggcggcaagagaggagaggccggctgggagggcggctacccagaaattgtgaaggagaacaagctgtttgagcactactaccaggagctgaagatcgtgcctgagggggagtggggccagttcatggatgccctgcgggagcccctgcctgccaccctgcgcatcaccggctacaagagccacgccaaggagatcctgcactgcctgaagaacaagtacttcaaggagctggaggacctggaggtggatggccagaaggtggaggtgccccagcccctgtcctggtacccagaggagctggcctggcacaccaacctgagcaggaagatcctgaggaagagcccccacctggagaagttccaccagttcctggtgtctgaaacagaaagtggcaacatcagccggcaggaggccgtgtccatgatcccccccctgctgctgaatgtgcggccccaccacaagatcctggacatgtgtgccgcccctggcagcaagaccacccagctgattgagatgctgcacgccgacatgaatgtgcccttccctgagggcttcgtcatcgccaatgatgtggacaacaagcgctgctacctgctggtgcaccaggccaagaggctgagcagcccctgcatcatggtggtgaaccatgatgccagcagcatcccccggctgcagattgatgtggatggcaggaaggagatcctcttctatgaccgcatcctgtgtgatgtgccctgcagcggagatggcaccatgaggaagaacattgatgtgtggaagaagtggaccaccctgaacagcctgcagctgcacggcctgcagctgcgcatcgccaccagaggagctgagcagctggccgagggcggccgcatggtgtacagcacctgcagcctgaaccccattgaagatgaggccgtcatcgccagcctgctggagaagtctgagggcgccctggagctggctgatgtgtccaatgagctgcccggcctgaagtggatgcctggcatcacccagtggaaggtgatgaccaaggatggccagtggttcacagactgggatgctgtgccccacagccgccacacccagatccggcccaccatgttcccccccaaggaccctgagaagctgcaggccatgcacctggagcgctgcctgcgcatcctgccccaccaccagaacacaggaggcttctttgtggccgtgctggtgaagaagagctccatgccctggaacaagaggcagcccaagctgcagggcaagtctgctgagacccgggagagcacccagctgagccctgctgacctgacagagggcaagcccacagaccccagcaagctggagagccccagcttcaccggcactggagacacagagatcgcccacgccacagaggacctggagaacaacggcagcaagaaggatggagtgtgtggccccccacccagcaagaagatgaagctgtttggcttcaaggaggacccctttgtgttcatcccagaagatgaccccctcttcccccccatcgagaagttctacgccctggaccccagcttccccaggatgaacctgctgaccaggaccacagagggcaagaagaggcagctgtacatggtgtccaaggagctgagaaatgtgctgctgaacaacagcgagaagatgaaggtgatcaacacaggcatcaaggtgtggtgcaggaacaacagcggggaggagtttgactgtgccttccggctggcccaggagggcatctacaccctgtaccccttcatcaacagccgcatcatcaccgtgtccatggaggatgtgaagatcctgctgacccaggagaaccccttcttcaggaagctgagcagcgagacctacagccaggccaaggacctggccaagggcagcatcgtgctgaagtatgagccagattctgccaacccagatgccctgcagtgccccatcgtgctgtgtggctggaggggcaaggccagcatccgcacctttgtgcccaagaatgaaaggctgcactacctgaggatgatgggcctggaggtgctgggggagaagaagaaggagggcgtcatcctgaccaatgaatctgctgccagcacaggccagcctgacaatgatgtgacagagggccagagagctggggagcccaacagcccagatgctgaggaggccaacagcccagatgtgacagctggctgtgaccctgctggggtgcaccccccaagatag

SEQ ID NO: 194857 - DNA, 2304 bp, Artificial Sequence
  derived and/or modified sequence
atgggccggcggagccggggccggcggctgcagcagcagcagcggccagaagacgcagaagacggagcagaggggggcgggaaacgcggggaagccggttgggagggagggtacccagagatagtaaaggagaataagttgttcgagcactattaccaagagctgaaaatcgtacctgagggtgagtggggtcagttcatggatgcgctccgcgagccactgccagcaactttgcgcataactggctataaatctcatgctaaagaaatattacactgcctaaagaacaaatacttcaaggagctcgaagatctcgaggtagacgggcagaaagtggaagtccctcagccactatcatggtatccagaagaactcgcctggcacactaatctctcccggaaaatccttcggaaaagcccccatctcgagaagtttcaccagtttttggtgtccgagactgagtcgggcaacatttcccgacaggaagccgtgtccatgattccgccgttgctgctgaacgtccgcccccatcataaaatcctggatatgtgcgccgcaccaggcagcaagaccacccagctgattgagatgctccatgccgatatgaacgttcctttccccgaagggtttgtgatcgccaatgacgtagacaataagcggtgttatctgctggtgcaccaggccaaaaggctttcttctccatgtataatggtagtgaaccatgacgcctccagtattccccggctccagatcgatgtggatgggagaaaagagatccttttctacgacagaattctgtgcgacgtcccttgcagcggggatgggacgatgcgcaagaatatcgacgtctggaaaaagtggactacattgaactcgctgcagttgcatggactgcaactccgcatcgctacccggggggccgagcaactggccgaaggaggcagaatggtctatagcacttgcagcctgaacccaatcgaagatgaggccgtaatagcttcacttctcgagaaatctgagggggcactggagctcgccgacgtgagtaatgagttgcctggtctgaaatggatgcccggtataacccagtggaaggtgatgaccaaagatggccagtggtttacggactgggatgccgtgccgcactcccggcatacccagattcgccctaccatgttcccgcctaaagatccggagaagctgcaagcaatgcatttggagcgctgccttaggatcctgccccaccatcaaaacaccggcgggtttttcgtagccgtcctggtcaagaaatcctctatgccatggaacaagcgtcagcccaagctccagggaaagtctgccgagactcgcgaaagcactcagttatcacccgccgaccttacagaaggaaagcctactgatccctcgaaattagagtccccttctttcaccggaactggggataccgagatcgcacatgccacggaagaccttgagaacaacggtagcaaaaaagacggagtatgcggacctccaccttcaaagaagatgaagctctttggattcaaggaagaccctttcgtttttatcccagaggacgacccactgttcccccccatcgagaaattttacgcattagatccctcatttcctcgcatgaatcttctaaccaggacgactgagggcaagaaacgacagctttacatggtcagcaaggaactcaggaatgtgctgctgaacaattcagaaaagatgaaggtgatcaacacaggcatcaaggtgtggtgtcgtaacaatagcggggaagaatttgactgcgccttccggctggcccaggaaggcatctataccctctaccccttcattaactccagaattatcactgtttccatggaggacgtgaagattctcctcacgcaggagaacccattttttagaaaattgagctcagaaacctattcacaggcgaaggacttggcgaaagggtcaatcgtgcttaagtacgaacccgactcggctaatccggatgcactgcagtgtcccattgttctgtgcggatggcgcgggaaggcatcaataaggactttcgtgccgaagaacgagcggcttcattaccttcgcatgatgggacttgaggtgctcggcgaaaagaagaaggaaggggtgatcctgacgaacgagagtgctgcttcaactggccaaccggacaacgatgtcaccgaggggcagcgtgccggcgagccaaattcacctgatgccgaggaggcaaatagtcccgatgtcactgctgggtgtgacccggcaggggtgcacccgccaagatag

SEQ ID NO: 194858 - DNA, 3303 bp, Artificial Sequence
  derived and/or modified sequence
aggctgtccgcggagctccttgagcccgcgtgggaaacctgggcgcttcgcgcggagacgcctttgtggctgcttcctggagcatttttttccccttagagctgttcgctgttttccctgtcacgccgcttttctgaaagacgggttgtgcgctttgggcttattcctggacggtccccaaaggtccccgaaaggaccaggcccggacacgtggggccttggtttccggccggaagtcccgggaggtgtagggctagagttctggccgtggcgggccggtttctgcgtgctgcgtgcgcggccgcgtgggctatggggcggcggtcgcggggtcggcggctccagcaacagcagcggccggaggacgcggaggatggcgccgagggtggtggaaagcgcggcgaggcgggctgggaaggaggctaccccgagatcgtcaaggagaacaagctgttcgagcactactaccaggagctcaagatcgtgcccgagggcgagtggggccagttcatggacgctctcagggagccgctcccggccactttaagaattactggttacaaaagccacgcaaaagagattctccattgcttaaagaacaaatattttaaggaattggaggacctggaggtggacggtcagaaagttgaagttccacagccactgagttggtatcctgaagaacttgcctggcacacaaatttaagtcgaaaaatcttgagaaaatcgccacacttggaaaagtttcatcagtttctagttagtgaaacagaatctggaaatattagtcgtcaagaagctgttagcatgatcccaccactgctcctcaacgtgcggcctcatcataagatcttagatatgtgtgcagcacctggctcaaagaccacacagttaattgaaatgctacatgccgacatgaatgtcccctttccagagggatttgttattgcgaatgatgtggacaacaagcgctgctacctgctcgtccatcaagccaagaggctgagcagcccctgcatcatggtggtcaaccatgatgcctccagcatacccaggctccagatagatgtggacggcaggaaagagatcctcttctatgatcgaattttatgtgatgtcccttgcagtggagacggcactatgagaaaaaacattgatgtttggaaaaagtggaccaccttaaatagcttgcagctacatggcttacagctgcggattgcaacacgcggggctgaacagctggctgaaggtggaaggatggtgtattccacgtgttcactaaaccctattgaggatgaagcagtcatagcatctttactggaaaaaagtgaaggtgctttggagcttgctgatgtgtctaatgaactgccagggctgaagtggatgcctggaatcacacagtggaaggtaatgacgaaagatgggcagtggtttacagactgggacgctgttcctcacagcagacacacccagatccgacctaccatgttccctccgaaggacccagaaaagctgcaggccatgcacctggagcgatgccttaggatattaccccatcatcagaatactggagggttttttgtggcagtattggtgaaaaaatcttcaatgccgtggaataaacgtcagccaaagcttcagggtaaatctgcagagaccagagaaagcacacagctgagccctgcagatctcacagaagggaaacccacagatccctctaagctggaaagtccgtcattcacaggaactggtgacacagaaatagctcatgcaactgaggatttagagaataatggcagtaagaaagatggcgtgtgtggtcctcctccatcaaagaaaatgaagttatttggatttaaagaagatccatttgtatttattcctgaagatgacccattatttccacctattgagaaattttatgctttggatccttcattcccaaggatgaatttgttaactcggactacagaagggaagaaaaggcagctctacatggtttctaaggagttgcggaatgtgctgctgaataacagtgagaagatgaaggttattaacacggggatcaaagtctggtgtagaaataacagcggtgaagagtttgactgtgctttccggctggcacaggagggaatatatacattgtatccatttattaactcaagaattattactgtatcaatggaagatgttaagatactgttgacccaggaaaatcccttttttagaaaactcagcagtgagacctacagtcaagcaaaggacctggcaaagggaagcatcgtgctgaagtatgaaccagattctgcgaatccagacgctctgcagtgtcccatcgtcttatgcggatggcggggaaaggcctccattcgaacttttgtgcccaagaatgaacggcttcattatctcaggatgatggggctggaggtattgggagaaaagaagaaggaaggggttatcctcacaaatgagagtgcagccagcaccggacagccagacaatgacgtgactgagggacagagagcaggagagcccaacagcccagatgcagaagaggccaacagtccagacgtgacagcaggctgtgacccggcgggggtccatccaccccggtgagcaggcccaaggcagcgggggcccacacccctcacacgcaaaactggcttcttctggtcactggtgtctgaaaccaaatccagagcagcctgtggcctgtaaagcatatatttctaatgactgcagactggtgggatcataggagccttctgaatgaccaggactgctttctttggagctgatgaaaatgtactcttttagcgtgttagaaatcacttgttttattttgtttctttggccaagctgggtctagtgtttcttttgctgggaatagactttcaaaagttgtacttctatcaagaaacaaaactgcccttgcagaaatttcaggtcttttgttaagcctgtattggtcttaaggtgcagtattttttaaattattatttatagaaagaatctataaattcttggggaagtgtgttataagctttaataattacattgagctgcacctcagtggtgtgtcattaacatgcagtggggttaatatctgaggcctcagatgactttgtgccttttggaataaagggtaaaataaactctcccagagtaagagctgtatcgtgaattgtcatactaattattgagggggacttatgtgcttttattgaatggagtgctttacaatttttatttttaaatggggttgggatccttggaatatttcaataaaattgataaaatata

SEQ ID NO: 194859 - DNA, 2304 bp, Artificial Sequence
  derived and/or modified sequence
atgggtagacggtctcggggacgcagactgcagcagcagcagcggccagaggacgctgaggatggcgctgaaggcggagggaagagaggtgaggctggctgggagggtggctatcccgagatcgtgaaagagaataaactgtttgaacactattaccaggaactgaaaatcgtgcctgagggcgaatggggacagtttatggatgccttacgagagccgctccctgcgactctgcgaataaccggctacaaatcgcacgcgaaagaaatcttgcattgtcttaaaaataaatattttaaggaattggaggacttggaggtggacgggcagaaggtagaggtacctcaaccgctgagttggtatcccgaggagctggcttggcataccaatctgtctaggaagatattaagaaagtctccgcatcttgagaaattccaccagttcctcgtttctgagacagaatcaggcaacatctccagacaggaggccgtttccatgattccaccgcttctcctaaatgttcgtccgcatcacaagatcctggatatgtgtgccgctccagggagtaagaccacccagcttattgaaatgctgcacgctgatatgaatgtgcctttcccagagggcttcgtcatcgccaacgatgtggataacaaacgctgctatctgcttgttcaccaggccaagagactcagctctccatgtatcatggtcgtcaaccacgacgcaagcagcattcctcggctgcagattgacgtagatggaagaaaagaaatccttttttatgatagaatcctatgcgatgtaccctgtagcggagacggcacgatgcggaaaaacattgatgtgtggaaaaagtggaccacattaaactccctgcagctgcacggtttgcaactgcgcattgctacaagaggcgctgagcagctggccgagggcggacggatggtgtattccacatgcagcctgaatccaatagaagacgaggcagtcattgcatcactgctggagaaaagtgaaggtgcactggaactggccgacgtcagcaatgaactgcccggattgaagtggatgcccggtattacacagtggaaggtcatgaccaaagatgggcaatggtttaccgactgggacgccgtgccccattctagacacactcaaatcaggccaactatgtttccgcctaaggacccggagaaactgcaagccatgcatctggaacgctgtctccgcatcttgccccatcatcagaataccgggggttttttcgttgccgtgctcgtgaagaagtcttcgatgccctggaacaagaggcagccaaagctacaaggaaagtctgcagaaacacgtgagtccacccaacttagccctgccgatttaaccgagggcaagcctaccgatccttcaaaactcgaaagcccgtcgttcactgggaccggcgacacagaaattgcccatgccactgaggatttggaaaataacggttccaaaaaggatggcgtgtgcgggccacccccttcaaagaaaatgaagttgttcggcttcaaggaggaccccttcgtgtttatacccgaggatgatcccttgtttccgccaattgagaaattttacgccctggacccaagtttccccaggatgaacctcctgacacgaacaacggaggggaagaaacggcagctctacatggtgagcaaagaacttaggaacgtgctcttaaacaactctgagaagatgaaagtaattaatacagggataaaggtttggtgccggaataattctggagaagagtttgattgcgcctttaggctcgcccaagaaggaatctacacactatacccgttcattaattccagaattatcacggtctcaatggaggatgttaagattctgctgactcaggagaatcctttttttcgaaaactgtccagcgagacgtacagccaggccaaagatttagctaaaggttccatcgtcctgaaatacgaacctgattccgcaaaccccgatgcattgcagtgccccatcgttctctgcggctggcgcggaaaggcatcaattcgcaccttcgttcccaaaaacgaacgccttcattacctccgtatgatgggactggaggtcctcggcgagaaaaagaaagagggcgtgatcttgacaaacgaaagtgcggcttcaacaggacagccggacaacgacgtgaccgaaggacagcgagccggagaaccaaactctcctgatgcagaggaagcaaactctccagacgtgactgctggatgcgaccccgcaggggtgcaccccccacgttag

SEQ ID NO: 194860 - DNA, 2304 bp, Artificial Sequence
  derived and/or modified sequence
atgggcagaagaagcagaggcagaagactgcagcagcagcagagacccgaggacgccgaggacggcgccgagggcggcggcaagagaggcgaggccggctgggagggcggctaccccgagatcgtgaaggagaacaagctgttcgagcactactaccaggagctgaagatcgtgcccgagggcgagtggggccagttcatggacgccctgagagagcccctgcccgccaccctgagaatcaccggctacaagagccacgccaaggagatcctgcactgcctgaagaacaagtacttcaaggagctggaggacctggaggtggacggccagaaggtggaggtgccccagcccctgagctggtaccccgaggagctggcctggcacaccaacctgagcagaaagatcctgagaaagagcccccacctggagaagttccaccagttcctggtgagcgagaccgagagcggcaacatcagcagacaggaggccgtgagcatgatcccccccctgctgctgaacgtgagaccccaccacaagatcctggacatgtgcgccgcccccggcagcaagaccacccagctgatcgagatgctgcacgccgacatgaacgtgcccttccccgagggcttcgtgatcgccaacgacgtggacaacaagagatgctacctgctggtgcaccaggccaagagactgagcagcccctgcatcatggtggtgaaccacgacgccagcagcatccccagactgcagatcgacgtggacggcagaaaggagatcctgttctacgacagaatcctgtgcgacgtgccctgcagcggcgacggcaccatgagaaagaacatcgacgtgtggaagaagtggaccaccctgaacagcctgcagctgcacggcctgcagctgagaatcgccaccagaggcgccgagcagctggccgagggcggcagaatggtgtacagcacctgcagcctgaaccccatcgaggacgaggccgtgatcgccagcctgctggagaagagcgagggcgccctggagctggccgacgtgagcaacgagctgcccggcctgaagtggatgcccggcatcacccagtggaaggtgatgaccaaggacggccagtggttcaccgactgggacgccgtgccccacagcagacacacccagatcagacccaccatgttcccccccaaggaccccgagaagctgcaggccatgcacctggagagatgcctgagaatcctgccccaccaccagaacaccggcggcttcttcgtggccgtgctggtgaagaagagcagcatgccctggaacaagagacagcccaagctgcagggcaagagcgccgagaccagagagagcacccagctgagccccgccgacctgaccgagggcaagcccaccgaccccagcaagctggagagccccagcttcaccggcaccggcgacaccgagatcgcccacgccaccgaggacctggagaacaacggcagcaagaaggacggcgtgtgcggccccccccccagcaagaagatgaagctgttcggcttcaaggaggaccccttcgtgttcatccccgaggacgaccccctgttcccccccatcgagaagttctacgccctggaccccagcttccccagaatgaacctgctgaccagaaccaccgagggcaagaagagacagctgtacatggtgagcaaggagctgagaaacgtgctgctgaacaacagcgagaagatgaaggtgatcaacaccggcatcaaggtgtggtgcagaaacaacagcggcgaggagttcgactgcgccttcagactggcccaggagggcatctacaccctgtaccccttcatcaacagcagaatcatcaccgtgagcatggaggacgtgaagatcctgctgacccaggagaaccccttcttcagaaagctgagcagcgagacctacagccaggccaaggacctggccaagggcagcatcgtgctgaagtacgagcccgacagcgccaaccccgacgccctgcagtgccccatcgtgctgtgcggctggagaggcaaggccagcatcagaaccttcgtgcccaagaacgagagactgcactacctgagaatgatgggcctggaggtgctgggcgagaagaagaaggagggcgtgatcctgaccaacgagagcgccgccagcaccggccagcccgacaacgacgtgaccgagggccagagagccggcgagcccaacagccccgacgccgaggaggccaacagccccgacgtgaccgccggctgcgaccccgccggcgtgcacccccccagatag

SEQ ID NO: 194861 - protein, 2248 aa, Artificial Sequence
  derived and/or modified sequence
MMDSENKPENDEDEKINKEAQDLTKLSSHNEDGGPVSDVIASFPENSMGKRGFSESSNSDSVVIGEDRNKHASKRRKLDEAEPLKSGKQGICRLETSESSVTEGGIALDETGKETFLSDCTVGGTCLPNALSPSCNFSTIDVVSLKTDTEKTSAQEMVSLDLERESPFPPKEISVSCTIGNVDTVLKCSICGHLFSSCSDLEKHAESHMQQPKEHTCCHCSHKAESSSALHMHIKQAHGPQKVFSCDLCGFQCSEENLLNAHYLGKTHLRRQNLAARGGFVQILTKQPFPKKSRTMATKNVHSKPRTSKSIAKNSDSKGLRNVGSTFKDFRGSISKQSGSSSELLVEMMPSRNTLSQEVEIVEEHVTSLGLAQNPENQSRKLDTLVTSEGLLEKLESTKNTLQAAHGNSVTSRPRPERNILVLGNSFRRRSSTFTLKGQAKKRFNLLGIKRGTSETQRMYMKHLRTQMKTHDAESVLKHLEACSSVQRVCVTTSETQEAEQGQGSARPPDSGLHSLTVKPASGSQTLCACTDCGQVATNRTDLEIHVKRCHAREMKFYCRTCDFSSMSRRDLDEHLHSNQHQQTASVLSCQCCSFISLDEINLRDHMKEKHNMHFLCTPCNLFFLSEKDVEEHKATEKHINSLVQPKTLQSSNSDLVLQTLPLSTLESENAKESMDDSGKASQEEPLKSRVSHGNEVRHSSKPQFQCKKCFYKTRSSTVLTRHIKLRHGQDYHFLCKACNLYSLSKEGMEKHIKRSKHLENAKKNNIGLSFEECIERVCIGANDKKEEFDVSGNGRIEGHIGVQLQEHSYLEKGMLASEELSQSGGSTKDDELASTTTPKRGRPKGNISRTCSHCGLLASSITNLTVHIRRKHSHQYSYLCKVCKYYTVTKGDMERHCATKKHKGRVEIEASGKHSSDIIVGPEGGSLEAGKKNAGSAVTMSDEHANKPAESPTSVLEKPDRGNSIEAEVENVFHSLDGEVNSHLLDKKEQISSEPEDFAQPGDVYSQRDVTGTGENKCLHCEFSAHSSASLELHVKRKHTKEFEFYCMACDYYAVTRREMTRHAATEKHKMKRQSYLNSANVEAGSADMSKNIIMPEEEHQQNSEEFQIISGQPSDTLKSRNAADCSILNENTNLDMSKVLCAADSVEVETEEESNFNEDHSFCETFQQAPVKDKVRKPEEMMSLTMSSNYGSPSRFQNENSGSSALNCETAKKNHEISNDAGELRVHCEGEGGNAGDGGGVVPHRHLCPVTLDGERSAESPVLVVTRITREQGNLESGGQNRVARGHGLEDLKGVQEDPVLGNKEILMNSQHETEFILEEDGPASDSTVESSDVYETIISIDDKGQAMYSFGRFDSSIIRIKNPEDGELIDQSEEGLIATGVRISELPLKDCAQGVKKKKSEGSSIGESTRIRCDDCGFLADGLSGLNVHIAMKHPTKEKHFHCLLCGKSFYTESNLHQHLASAGHMRNEQASVEELPEGGATFKCVKCTEPFDSEQNLFLHIKGQHEELLREVNKYIVEDTEQINREREENQGNVCKYCGKMCRSSNSMAFLAHIRTHTGSKPFKCKICHFATAQLGDARNHVKRHLGMREYKCHVCGVAFVMKKHLNTHLLGKHGVGTPKERKFTCHLCDRSFTEKWALNNHMKLHTGEKPFKCTWPTCHYSFLTASAMKDHYRTHTGEKSFLCDLCGFAGGTRHALTKHRRQHTGEKPFKCDECNFASTTQSHLTRHKRVHTGEKPYRCPWCDYRSNCAENIRKHILHTGKHEGVKMYNCPKCDYGTNVPVEFRNHLKEQHPDIENPDLAYLHAGIVSKSYECRLKGQGATFVETDSPFTAAALAEEPLVKEKPLRSSRRPAPPPEQVQQVIIFQGYDGEFALDPSVEETAAATLQTLAMAGQVARVVHITEDGQVIATSQSGAHVGSVVPGPILPEQLADGATQVVVVGGSMEGHGMDESLSPGGAVIQQVTKQEILNLSEAGVAPPEASSALDALLCAVTELGEVEGRAGLEEQGRPGAKDVLIQLPGQEVSHVAADPEAPEIQMFPQAQESPAAVEVLTQVVHPSAAMASQERAQVAFKKMVQGVLQFAVCDTAAAGQLVKDGVTQVVVSEEGAVHMVAGEGAQIIMQEAQGEHMDLVESDGEISQIIVTEELVQAMVQESSGGFSEGTTHYILTELPPGVQDEPGLYSHTVLETADSQELLQAGATLGTEAGAPSRAEQLASVVIYTQEGSSAAAAIQSQRESSELQEA

SEQ ID NO: 194862 - protein, 1815 aa, Artificial Sequence
  derived and/or modified sequence
MMDSENKPENDEDEKINKEAQDLTKLSSHNEDGGPVSDVIASFPENSMGKRGFSESSNSDSVVIGEDRNKHASKRRKLDEAEPLKSGKQGICRLETSESSVTEGGIALDETGKETFLSDCTVGGTCLPNALSPSCNFSTIDVVSLKTDTEKTSAQEMVSLDLERESPFPPKEISVSCTIGNVDTVLKCSICGHLFSSCSDLEKHAESHMQQPKEHTCCHCSHKAESSSALHMHIKQAHGPQKVFSCDLCGFQCSEENLLNAHYLGKTHLRRQNLAARGGFVQILTKQPFPKKSRTMATKNVHSKPRTSKSIAKNSDSKGLRNVGSTFKDFRGSISKQSGSSSELLVEMMPSRNTLSQEVEIVEEHVTSLGLAQNPENQSRKLDTLVTSEGLLEKLESTKNTLQAAHGNSVTSRPRPERNILVLGNSFRRRSSTFTLKGQAKKRFNLLGIKRGTSETQRMYMKHLRTQMKTHDAESVLKHLEACSSVQRVCVTTSETQEAEQGQGSARPPDSGLHSLTVKPASGSQTLCACTDCGQVATNRTDLEIHVKRCHAREMKFYCRTCDFSSMSRRDLDEHLHSNQHQQTASVLSCQCCSFISLDEINLRDHMKEKHNMHFLCTPCNLFFLSEKDVEEHKATEKHINSLVQPKTLQSSNSDLVLQTLPLSTLESENAKESMDDSGKASQEEPLKSRVSHGNEVRHSSKPQFQCKKCFYKTRSSTVLTRHIKLRHGQDYHFLCKACNLYSLSKEGMEKHIKRSKHLENAKKNNIGLSFEECIERVCIGANDKKEEFDVSGNGRIEGHIGVQLQEHSYLEKGMLASEELSQSGGSTKDDELASTTTPKRGRPKGNISRTCSHCGLLASSITNLTVHIRRKHSHQYSYLCKVCKYYTVTKGDMERHCATKKHKGRVEIEASGKHSSDIIVGPEGGSLEAGKKNAGSAVTMSDEHANKPAESPTSVLEKPDRGNSIEAEVENVFHSLDGEVNSHLLDKKEQISSEPEDFAQPGDVYSQRDVTGTGENKCLHCEFSAHSSASLELHVKRKHTKEFEFYCMACDYYAVTRREMTRHAATEKHKMKRQSYLNSANVEAGSADMSKNIIMPEEEHQQNSEEFQIISGQPSDTLKSRNAADCSILNENTNLDMSKVLCAADSVEVETEEESNFNEDHSFCETFQQAPVKDKVRKPEEMMSLTMSSNYGSPSRFQNENSGSSALNCETAKKNHEISNDAGELRVHCEGEGGNAGDGGGVVPHRHLCPVTLDGERSAESPVLVVTRITREQGNLESGGQNRVARGHGLEDLKGVQEDPVLGNKEILMNSQHETEFILEEDGPASDSTVESSDVYETIISIDDKGQAMYSFGRFDSSIIRIKNPEDGELIDQSEEGLIATGVRISELPLKDCAQGVKKKKSEGSSIGESTRIRCDDCGFLADGLSGLNVHIAMKHPTKEKHFHCLLCGKSFYTESNLHQHLASAGHMRNEQASVEELPEGGATFKCVKCTEPFDSEQNLFLHIKGQHEELLREVNKYIVEDTEQINREREENQGNVCKYCGKMCRSSNSMAFLAHIRTHTGSKPFKCKICHFATAQLGDARNHVKRHLGMREYKCHVCGVAFVMKKHLNTHLLGKHGVGTPKERKFTCHLCDRSFTEKWALNNHMKLHTGEKPFKCTWPTCHYSFLTASAMKDHYRTHTGEKSFLCDLCGFAGGTRHALTKHRRQHTGEKPFKCDECNFASTTQSHLTRHKRVHTGEKPYRCPWCDYRSNCAENIRKHILHTGKHEGVKMYNCPKCDYGTNVPVEFRNHLKEQHPDIENPDLAYLHAGKGQKL

SEQ ID NO: 194863 - DNA, 8008 bp, Artificial Sequence
  derived and/or modified sequence
acaggttatgagtgccagtgagccgccttagatagaagcatcgtcagcactttattaatgatggatagtgagaataaacccgaaaatgatgaggatgaaaagataaacaaagaagcacaagacttgacaaagctttcatcccataatgaagacggtgggcctgtatctgatgtgatagcaagtttccctgagaattctatgggcaaaagaggtttttcagaatcatcgaactctgatagtgttgttataggagaagacagaaataaacatgcttccaaacgcaggaaattagatgaggcagagccccttaaatctggaaagcaaggtatttgtagattagaaacttctgagagctcagtcacagaagggggtattgcattagatgaaacagggaaggagacctttctgagtgactgcacagttggaggcacatgtctcccaaatgccctctccccttcttgcaattttagcactattgatgttgtttctctgaaaacagacactgaaaaaacatctgctcaggaaatggtttcccttgatctggaaagagaatctcctttccccccgaaagaaattagtgttagttgtaccattgggaatgtagatacagttctcaaatgcagcatctgtgggcatttgttttcttcttgctctgacttggaaaaacatgctgagtctcacatgcagcagcctaaggaacatacctgttgtcactgcagccacaaagcagagagcagctcagcactacatatgcatatcaaacaagcacatgggccacagaaggtcttttcctgtgatctttgtggttttcagtgttcagaagaaaacttgttgaatgcacattatcttggcaaaacacatctccgtcgtcagaatctggctgctcgtggaggatttgtacagatcttaacaaaacaaccttttcctaaaaaatcacgtacaatggcaacaaaaaatgttcactcaaaaccaagaacttctaaatcaatagcaaagaatagtgattcaaaaggattacgaaatgtgggaagcacgtttaaagatttcagaggaagtatttctaaacaaagtggtagtagcagtgagcttcttgttgaaatgatgccttccagaaatactttgtcacaggaagtagagattgttgaagaacatgttacttcccttggtctagctcagaatcctgaaaaccagagtagaaagctagacaccttagtaacctcagagggtctcttagagaaattggaatctacaaaaaatacccttcaggcagcacacggtaacagtgtaacctcgaggccaagacctgagcgaaatattctcgtgttgggtaatagctttcgtcgacgaagcagcactttcaccttgaagggccaggcaaagaaaaggtttaatcttttaggaattaaaagaggtacaagtgaaactcagaggatgtatatgaaacacttgagaacacagatgaaaacacacgatgcagaatcagtgctgaaacacctggaagcgtgcagcagtgtgcagagagtgtgtgtgactacctcagaaacccaggaggcagagcagggccaggggagtgcccgtcctccggactccgggctgcattccctgacagtgaagccagcttctggctctcagacgttgtgtgcttgtacagactgtgggcaagtagctacaaataggacagatttggaaatccatgtgaaaaggtgccatgccagagagatgaaattttactgccgtacttgtgacttctctagtatgtcaagaagggacttagatgaacatttgcacagtaaccagcatcagcaaactgcttctgtcctgagttgtcagtgttgttcatttatatccttggatgaaataaatcttagagaccacatgaaggaaaagcacaatatgcattttctttgcaccccttgtaatctgttctttttgtctgaaaaagatgtggaagaacacaaagccaccgagaagcatattaattcattggttcaaccaaagactttgcaatcatctaacagtgatttggttttacagactttacctttgagtactttagaatcagaaaacgcaaaagagtctatggatgactcaggaaaagcatctcaggaagaacctctgaagtccagggtaagccatggtaatgaagtgaggcattccagtaagcctcagtttcagtgtaagaagtgtttttataaaacaagatcttctactgttctcacgagacatataaagcttcggcatggtcaagactatcattttctttgtaaagcttgtaatctttattcattgagcaaagaaggaatggagaaacacattaaaagaagcaagcatcttgaaaatgctaagaaaaataatattggcttaagctttgaagaatgtattgaaagggtatgtataggtgcaaatgataaaaaagaagagtttgatgtttccggaaatggaaggattgaaggccatataggtgtgcaattacaagagcattcctatcttgagaagggcatgctggcgtctgaggaactgtcacagtctggtggtagcaccaaagatgatgaattagcttcaaccactactccaaagagagggagacctaaaggtaacatctcacggacgtgttcacactgtggccttttggcctctagtattacaaacttgactgttcacattagacgaaaacacagtcaccagtatagttatttatgcaaagtgtgtaagtattacactgtaactaagggagatatggaacgtcattgtgccaccaagaaacataaaggacgggtagaaatagaagcaagtggaaaacacagttcagatatcattgttggccctgaagggggtagccttgaagctggtaaaaagaatgctggctcagcagtgaccatgtcagatgaacatgctaacaaaccagctgagtcacccacctccgttttagagaagccagatcgtggaaactcaattgaagctgaagttgaaaatgtatttcattctctagatggagaagttaacagccatcttcttgataaaaaggagcaaatatcttcagagccagaggacttcgcccagccgggggatgtgtactcccagagagatgttacaggcacaggtgagaataagtgtttgcactgtgagtttagtgctcactcctctgcttctctagagctgcatgtaaaacggaaacatacaaaagagtttgagttttattgcatggcatgcgattactacgcggtgactcgtcgcgagatgaccaggcatgcagcaacagagaagcacaaaatgaaaaggcagtcttatctcaactctgctaatgtagaagctggttctgcagacatgtccaaaaacatcattatgcctgaagaagagcatcaacaaaattctgaggaatttcaaataatttcaggtcaaccatctgatactcttaaatctagaaatgctgcagattgctctattttaaatgagaatactaatttagatatgtctaaagtgctctgcgctgctgactctgtagaagttgagactgaagaagaatctaatttcaatgaagaccattccttttgtgagactttccaacaggctcctgtcaaggataaagttaggaaacctgaggagatgatgtcacttactatgtcctcaaactatggctccccaagcagatttcaaaatgaaaattcaggaagctctgccttaaattgtgagacagcaaagaaaaaccatgagatatcgaatgatgcaggtgagctgcgtgtccattgtgagggtgaaggaggaaacgcaggagacggtggaggtgttgtcccccacagacacctgtgccctgtgacgctcgatggggagcgctcggctgaaagccctgtgctcgttgtgacaagaataaccagagaacagggaaatctggagagcgggggtcagaacagagttgcacgtgggcatggtttggaagacttgaaaggtgtccaagaagatcccgttctggggaataaggaaattctgatgaattcacaacatgaaacagaatttattttggaggaggatggcccagcttctgatagcacagttgaaagtagtgatgtctatgaaactataattagtattgatgataaagggcaggccatgtacagttttggtcgatttgactcctccataataagaataaagaaccctgaagatggtgagttgatagaccagtctgaagagggcttgatagcaacgggagtgagaattagtgagctgcccttgaaagactgtgctcaaggtgtgaaaaagaagaaatctgagggcagttccattggtgagtctacacgaattcgctgtgatgattgtggcttcttagcagatggactgagtggactgaatgttcacatagccatgaagcatcctacaaaagagaagcacttccattgtttactctgtggaaagtcgttctataccgaaagcaaccttcaccagcatctggctagtgccggccacatgagaaatgagcaggccagtgtggaggagcttccggagggaggggccacctttaaatgtgtcaagtgcacagagccctttgattctgaacagaatttatttttacatattaaaggacagcatgaggaattgctgcgggaggtgaataagtatatagtggaagacactgagcaaatcaaccgcgagagggaggaaaaccagggaaacgtctgcaagtattgtgggaagatgtgtcgaagcagcaactcgatggccttcctggcacacattcgcactcacacaggatcaaaaccattcaagtgcaagatatgccattttgcaacagctcagcttggagatgccagaaaccatgtgaaaaggcaccttgggatgagggaatacaagtgtcatgtctgtggggttgcttttgtaatgaagaagcacttaaatactcatctactaggcaagcatggagttggcaccccaaaagaaaggaaatttacatgccacttatgtgatagaagtttcacagagaagtgggccctgaacaaccacatgaaactccacacgggagaaaagccgtttaaatgtacctggcccacgtgccattactcattcctcacagcctccgcaatgaaagaccactacaggacgcacacaggcgagaagtcgtttctgtgtgacctctgcggctttgccggcgggacccgccacgccctcaccaagcatcgcagacagcacacaggagaaaaacctttcaagtgcgatgagtgtaactttgcctccacaactcagtcccatttgactcggcataaacgtgtccacactggagaaaagccctacagatgcccctggtgtgactacaggtcaaactgtgctgaaaatatccgcaaacacattctgcatactggcaaacatgaaggagtcaagatgtacaactgtcccaagtgtgactacgggaccaacgtcccggtggagttccggaaccatttgaaggaacagcatcctgacatcgaaaacccggacctcgcttacctgcatgctggcattgtttccaagtcgtacgagtgccgtctaaagggacaaggagccaccttcgtggagacagacagccccttcaccgcggcggccttggcagaagagcccctcgtcaaggagaagcccctcagaagcagcaggaggccagcgccgccccctgagcaggtgcagcaggtcatcatcttccagggctacgacggggagtttgccctggacccctcggtggaggagacggccgccgccacgctgcagacgctggccatggccggccaggtggcccgggtggtgcatatcacggaggatggccaggtcatcgccacgagtcagagcggggcacatgtaggcagcgtggtgcccggacccatcctccccgagcagctggctgatggagccacccaggtggtcgtcgtggggggctccatggaaggccacggcatggatgagtccctcagtccaggtggcgctgtgatacaacaggtgaccaagcaggagattttaaacctctcggaggctggagtcgctccccccgaggcatcctcagccctggatgcattgctctgtgcggtcactgaattaggggaggtggagggcagggctgggctcgaggagcaaggcaggcccggcgccaaagacgtgctgatccagctgcccgggcaggaggtctcccatgtggctgccgaccccgaggcccccgagatccagatgttcccacaggcccaggagagcccggccgccgtggaggtgctcacccaggtggtccatccctcagcagccatggcctctcaggagcgggcacaggtggccttcaagaagatggtccagggcgtcctccagtttgctgtgtgtgacacggccgcggccggccagttggtcaaggacggtgtcacccaggtggtggtgagcgaagagggtgccgtccacatggtcgccggggagggtgcccagatcatcatgcaggaggcgcagggcgagcacatggatctggtggagtccgacggggagatctcgcagatcatcgtgacggaggagctggtccaggccatggtgcaggagtccagtggcggcttctccgagggcaccacgcactacatcctgacagagctgcccccaggggtgcaggacgagccgggcctgtactcccacaccgtgctggagactgcggactcgcaggaactcctgcaggccggggccacgctaggcacagaggccggggccccaagcagggcagagcagctggccagcgtggtcatctacacccaggagggctcctcggccgcggcggcaattcagagccaaagagaaagcagcgaactccaggaagcatgagacgcgcggcacctttactcagcacagggcaggtgtgggaaggtccagcttcggtgggggaccgtgttccctgagcttcatctgaaaccttcaaaaccatgaggacaaggctcccgtgagctctgagcatgccctcccagcgagagtcacactggccaccagccaggcgcccacagagggtaccgtgggctgggcctcggggagcaggctgccaagtgcaggggagggccgggcgcaggccgcacagggagctccggtccactgggggcccttcgatcagtggcctcccgcttcgtcctggccgctgtgctgaagagaagccaagtgttgttggtgtttttctctcccaagtgttttcccatttcagttatcagaaggtcatggccgtggggaaagtggtgaagatacccctcctggcttggggtgcacctgcttgtgcagtcagcatgtagctgcctttccatttcattctctactgggctaaaaattgcagctacaagtgttaccatcttgaagcagtccacttccattcaattttttttttttaattttagaataacagtgtccccataccaaaggaagcctgctagctcatttcatgtataaatttcccatcttcaaacagtttaggtgtatttgttgctctggtcacattctgcataaaagaaatcctcttaagcctatggttaagaaaagccttgaagtttatattcagttaaaatatatgtcggtggagatagccagtgcttctaattttgacttagtttcatacagtaaagcctaaatgtgaaacgcacacgctggaagatattgttcctatcaatattttgctttttataacaagggtttgttcatattgatgccatttttgcaggatttcttcgtgatttctgtccatatgaaaatgctgacattaaacattaacacatggagaccgtgccctgtggccctgccgtggctgccagcatggtctgtgtttccttgtggattcacctgtggccctgctgtggccaccagcatggtctgtgtcctcgtggattcactgcagctgtcggatgcgagtttctgtcataatcatttgtttcctgatacaattgttcttattcttttccaaaactgtaaaataatctcctccctcaaatgcaaaggttgtttttgttctgtttctgttttctttgaaataaaattataacgttaaaagatc

SEQ ID NO: 194864 - DNA, 6747 bp, Artificial Sequence
  derived and/or modified sequence
atgatggacagcgagaacaagcccgagaacgacgaggacgagaagatcaacaaggaggcccaggacctgaccaagctgagcagccacaacgaggacggcggccccgtgagcgacgtgatcgccagcttccccgagaacagcatgggcaagagaggcttcagcgagagcagcaacagcgacagcgtggtgatcggcgaggacagaaacaagcacgccagcaagagaagaaagctggacgaggccgagcccctgaagagcggcaagcagggcatctgcagactggagaccagcgagagcagcgtgaccgagggcggcatcgccctggacgagaccggcaaggagaccttcctgagcgactgcaccgtgggcggcacctgcctgcccaacgccctgagccccagctgcaacttcagcaccatcgacgtggtgagcctgaagaccgacaccgagaagaccagcgcccaggagatggtgagcctggacctggagagagagagccccttcccccccaaggagatcagcgtgagctgcaccatcggcaacgtggacaccgtgctgaagtgcagcatctgcggccacctgttcagcagctgcagcgacctggagaagcacgccgagagccacatgcagcagcccaaggagcacacctgctgccactgcagccacaaggccgagagcagcagcgccctgcacatgcacatcaagcaggcccacggcccccagaaggtgttcagctgcgacctgtgcggcttccagtgcagcgaggagaacctgctgaacgcccactacctgggcaagacccacctgagaagacagaacctggccgccagaggcggcttcgtgcagatcctgaccaagcagcccttccccaagaagagcagaaccatggccaccaagaacgtgcacagcaagcccagaaccagcaagagcatcgccaagaacagcgacagcaagggcctgagaaacgtgggcagcaccttcaaggacttcagaggcagcatcagcaagcagagcggcagcagcagcgagctgctggtggagatgatgcccagcagaaacaccctgagccaggaggtggagatcgtggaggagcacgtgaccagcctgggcctggcccagaaccccgagaaccagagcagaaagctggacaccctggtgaccagcgagggcctgctggagaagctggagagcaccaagaacaccctgcaggccgcccacggcaacagcgtgaccagcagacccagacccgagagaaacatcctggtgctgggcaacagcttcagaagaagaagcagcaccttcaccctgaagggccaggccaagaagagattcaacctgctgggcatcaagagaggcaccagcgagacccagagaatgtacatgaagcacctgagaacccagatgaagacccacgacgccgagagcgtgctgaagcacctggaggcctgcagcagcgtgcagagagtgtgcgtgaccaccagcgagacccaggaggccgagcagggccagggcagcgccagaccccccgacagcggcctgcacagcctgaccgtgaagcccgccagcggcagccagaccctgtgcgcctgcaccgactgcggccaggtggccaccaacagaaccgacctggagatccacgtgaagagatgccacgccagagagatgaagttctactgcagaacctgcgacttcagcagcatgagcagaagagacctggacgagcacctgcacagcaaccagcaccagcagaccgccagcgtgctgagctgccagtgctgcagcttcatcagcctggacgagatcaacctgagagaccacatgaaggagaagcacaacatgcacttcctgtgcaccccctgcaacctgttcttcctgagcgagaaggacgtggaggagcacaaggccaccgagaagcacatcaacagcctggtgcagcccaagaccctgcagagcagcaacagcgacctggtgctgcagaccctgcccctgagcaccctggagagcgagaacgccaaggagagcatggacgacagcggcaaggccagccaggaggagcccctgaagagcagagtgagccacggcaacgaggtgagacacagcagcaagccccagttccagtgcaagaagtgcttctacaagaccagaagcagcaccgtgctgaccagacacatcaagctgagacacggccaggactaccacttcctgtgcaaggcctgcaacctgtacagcctgagcaaggagggcatggagaagcacatcaagagaagcaagcacctggagaacgccaagaagaacaacatcggcctgagcttcgaggagtgcatcgagagagtgtgcatcggcgccaacgacaagaaggaggagttcgacgtgagcggcaacggcagaatcgagggccacatcggcgtgcagctgcaggagcacagctacctggagaagggcatgctggccagcgaggagctgagccagagcggcggcagcaccaaggacgacgagctggccagcaccaccacccccaagagaggcagacccaagggcaacatcagcagaacctgcagccactgcggcctgctggccagcagcatcaccaacctgaccgtgcacatcagaagaaagcacagccaccagtacagctacctgtgcaaggtgtgcaagtactacaccgtgaccaagggcgacatggagagacactgcgccaccaagaagcacaagggcagagtggagatcgaggccagcggcaagcacagcagcgacatcatcgtgggccccgagggcggcagcctggaggccggcaagaagaacgccggcagcgccgtgaccatgagcgacgagcacgccaacaagcccgccgagagccccaccagcgtgctggagaagcccgacagaggcaacagcatcgaggccgaggtggagaacgtgttccacagcctggacggcgaggtgaacagccacctgctggacaagaaggagcagatcagcagcgagcccgaggacttcgcccagcccggcgacgtgtacagccagagagacgtgaccggcaccggcgagaacaagtgcctgcactgcgagttcagcgcccacagcagcgccagcctggagctgcacgtgaagagaaagcacaccaaggagttcgagttctactgcatggcctgcgactactacgccgtgaccagaagagagatgaccagacacgccgccaccgagaagcacaagatgaagagacagagctacctgaacagcgccaacgtggaggccggcagcgccgacatgagcaagaacatcatcatgcccgaggaggagcaccagcagaacagcgaggagttccagatcatcagcggccagcccagcgacaccctgaagagcagaaacgccgccgactgcagcatcctgaacgagaacaccaacctggacatgagcaaggtgctgtgcgccgccgacagcgtggaggtggagaccgaggaggagagcaacttcaacgaggaccacagcttctgcgagaccttccagcaggcccccgtgaaggacaaggtgagaaagcccgaggagatgatgagcctgaccatgagcagcaactacggcagccccagcagattccagaacgagaacagcggcagcagcgccctgaactgcgagaccgccaagaagaaccacgagatcagcaacgacgccggcgagctgagagtgcactgcgagggcgagggcggcaacgccggcgacggcggcggcgtggtgccccacagacacctgtgccccgtgaccctggacggcgagagaagcgccgagagccccgtgctggtggtgaccagaatcaccagagagcagggcaacctggagagcggcggccagaacagagtggccagaggccacggcctggaggacctgaagggcgtgcaggaggaccccgtgctgggcaacaaggagatcctgatgaacagccagcacgagaccgagttcatcctggaggaggacggccccgccagcgacagcaccgtggagagcagcgacgtgtacgagaccatcatcagcatcgacgacaagggccaggccatgtacagcttcggcagattcgacagcagcatcatcagaatcaagaaccccgaggacggcgagctgatcgaccagagcgaggagggcctgatcgccaccggcgtgagaatcagcgagctgcccctgaaggactgcgcccagggcgtgaagaagaagaagagcgagggcagcagcatcggcgagagcaccagaatcagatgcgacgactgcggcttcctggccgacggcctgagcggcctgaacgtgcacatcgccatgaagcaccccaccaaggagaagcacttccactgcctgctgtgcggcaagagcttctacaccgagagcaacctgcaccagcacctggccagcgccggccacatgagaaacgagcaggccagcgtggaggagctgcccgagggcggcgccaccttcaagtgcgtgaagtgcaccgagcccttcgacagcgagcagaacctgttcctgcacatcaagggccagcacgaggagctgctgagagaggtgaacaagtacatcgtggaggacaccgagcagatcaacagagagagagaggagaaccagggcaacgtgtgcaagtactgcggcaagatgtgcagaagcagcaacagcatggccttcctggcccacatcagaacccacaccggcagcaagcccttcaagtgcaagatctgccacttcgccaccgcccagctgggcgacgccagaaaccacgtgaagagacacctgggcatgagagagtacaagtgccacgtgtgcggcgtggccttcgtgatgaagaagcacctgaacacccacctgctgggcaagcacggcgtgggcacccccaaggagagaaagttcacctgccacctgtgcgacagaagcttcaccgagaagtgggccctgaacaaccacatgaagctgcacaccggcgagaagcccttcaagtgcacctggcccacctgccactacagcttcctgaccgccagcgccatgaaggaccactacagaacccacaccggcgagaagagcttcctgtgcgacctgtgcggcttcgccggcggcaccagacacgccctgaccaagcacagaagacagcacaccggcgagaagcccttcaagtgcgacgagtgcaacttcgccagcaccacccagagccacctgaccagacacaagagagtgcacaccggcgagaagccctacagatgcccctggtgcgactacagaagcaactgcgccgagaacatcagaaagcacatcctgcacaccggcaagcacgagggcgtgaagatgtacaactgccccaagtgcgactacggcaccaacgtgcccgtggagttcagaaaccacctgaaggagcagcaccccgacatcgagaaccccgacctggcctacctgcacgccggcatcgtgagcaagagctacgagtgcagactgaagggccagggcgccaccttcgtggagaccgacagccccttcaccgccgccgccctggccgaggagcccctggtgaaggagaagcccctgagaagcagcagaagacccgcccccccccccgagcaggtgcagcaggtgatcatcttccagggctacgacggcgagttcgccctggaccccagcgtggaggagaccgccgccgccaccctgcagaccctggccatggccggccaggtggccagagtggtgcacatcaccgaggacggccaggtgatcgccaccagccagagcggcgcccacgtgggcagcgtggtgcccggccccatcctgcccgagcagctggccgacggcgccacccaggtggtggtggtgggcggcagcatggagggccacggcatggacgagagcctgagccccggcggcgccgtgatccagcaggtgaccaagcaggagatcctgaacctgagcgaggccggcgtggccccccccgaggccagcagcgccctggacgccctgctgtgcgccgtgaccgagctgggcgaggtggagggcagagccggcctggaggagcagggcagacccggcgccaaggacgtgctgatccagctgcccggccaggaggtgagccacgtggccgccgaccccgaggcccccgagatccagatgttcccccaggcccaggagagccccgccgccgtggaggtgctgacccaggtggtgcaccccagcgccgccatggccagccaggagagagcccaggtggccttcaagaagatggtgcagggcgtgctgcagttcgccgtgtgcgacaccgccgccgccggccagctggtgaaggacggcgtgacccaggtggtggtgagcgaggagggcgccgtgcacatggtggccggcgagggcgcccagatcatcatgcaggaggcccagggcgagcacatggacctggtggagagcgacggcgagatcagccagatcatcgtgaccgaggagctggtgcaggccatggtgcaggagagcagcggcggcttcagcgagggcaccacccactacatcctgaccgagctgccccccggcgtgcaggacgagcccggcctgtacagccacaccgtgctggagaccgccgacagccaggagctgctgcaggccggcgccaccctgggcaccgaggccggcgcccccagcagagccgagcagctggccagcgtggtgatctacacccaggagggcagcagcgccgccgccgccatccagagccagagagagagcagcgagctgcaggaggcctag

SEQ ID NO: 194865 - DNA, 6747 bp, Artificial Sequence
  derived and/or modified sequence
atgatggatagcgagaacaagccagagaacgatgaagatgagaaaataaacaaggaagcccaggatctgaccaaactcagcagtcataatgaagatggagggcctgtgagcgacgtgatcgcaagtttccctgagaatagcatgggcaaacgaggtttcagcgaaagctcaaattccgactcagtggttattggtgaggatcgcaacaagcatgccagtaagcgtcggaaactagacgaagccgagcccctaaagtcaggcaaacagggcatttgtcgcctggagacatcagagtcttcggtcactgaaggtggaattgccctcgatgagactggaaaagagacgttcctgagtgattgtactgtaggaggcacgtgtttacccaacgccctgagcccatcctgcaacttcagtacgatagacgttgtttcactaaaaacagatactgaaaaaactagtgctcaagagatggtaagtctagatttggagagagagagcccattcccgcctaaggagatctctgtgtcatgcactattgggaacgtggatacagtgcttaagtgtagcatctgcggacacctgttcagctcttgttctgacctggaaaaacacgctgaatctcatatgcaacaacccaaggaacacacgtgctgccactgttctcacaaggccgaatcctcttcagcgctgcacatgcatatcaaacaggctcacgggccacaaaaggtcttctcctgtgacctgtgcggttttcagtgttccgaagaaaacctgctgaatgcccattatctggggaagacacacttgagaagacagaacttagcagccaggggaggatttgtgcaaatcctgacaaaacagccatttccgaagaaatcccgcaccatggcgaccaagaacgtgcactctaaacctcgcacaagcaaatcaattgcaaagaattcagatagcaaggggctgcgaaatgtgggcagcacctttaaagacttcaggggcagtatcagcaagcagtccggttcgtcgagtgagttgctggtagagatgatgccttcgcgcaatactctctctcaggaggtggagattgtcgaggagcatgtaacaagtttaggtctggctcaaaatcctgagaatcaatcaagaaaactggacaccttagtgacttccgagggactattggagaagctggaatcgaccaaaaatacactgcaggctgctcatggaaactctgtcacaagcagacctcgaccagaacgcaatatcctggtgctagggaactcctttagacggcgatcaagcaccttcacactcaagggtcaagcgaaaaagaggttcaacctcctcggcatcaaacgaggcactagtgagactcaaagaatgtatatgaagcaccttcgcacgcagatgaagacgcacgatgccgagtcagtcctgaagcacctggaggcatgtagctccgtgcagcgcgtttgtgtaaccacgagtgagacacaggaagctgagcagggacaaggtagtgcgaggccaccggactcaggactccactccctgactgtcaagccagcatctggatctcagactttgtgcgcgtgtactgactgcggccaggttgccactaatcgtactgatctcgagatccacgtcaagcgctgtcacgcaagggagatgaaattttactgccgaacctgcgatttttcatcaatgagccgacgggatctagacgagcaccttcactcaaatcagcaccagcagactgccagcgtcctgtcctgtcagtgctgtagctttatcagtctagatgagattaacctgcgtgatcacatgaaggagaagcacaatatgcactttctgtgcactccctgtaatctcttttttcttagcgagaaggatgttgaagagcataaggcaacagaaaaacatattaattctctcgtccagccaaaaacgctgcagagcagcaactcggatttagtactgcagacactgcctctcagcaccctcgaatccgaaaatgctaaagagtccatggatgattccggaaaggccagtcaagaggagccgcttaaatctagagtctctcatggcaatgaagtaaggcacagtagcaaaccccaattccaatgtaagaagtgcttttacaaaacgcggtcttccaccgttctcactagacatataaaattaagacacggccaagactaccattttctctgcaaggcttgcaatctttactcacttagcaaggaaggcatggaaaaacacatcaaacggagcaaacatctggagaatgcaaaaaagaataacatcgggctctcctttgaggagtgcattgaacgcgtctgcataggagctaacgacaagaaggaagagtttgatgtgagcggaaacggtcgtattgagggacacattggagtgcagttgcaggagcactcttacctggagaagggaatgctggcatcggaagagctgtctcaaagtgggggtagcacgaaggacgacgaactggcttctactacaacacccaaacgaggacgcccaaagggcaacatctcgcgcacttgcagccattgcggtcttctagcatcttctataaccaatctcactgtccatatacgcaggaagcacagtcaccagtactcgtatctgtgcaaggtctgcaagtactacacagtgacgaaaggcgacatggaacgccactgcgccacaaagaagcataaaggccgtgtggaaatagaagcctctgggaaacactccagcgatataatcgtgggtcctgagggtggctctcttgaggcgggcaaaaagaacgctggatcagccgttacgatgtctgatgaacacgcaaataagcctgcagagagccctacatctgtgctggagaagcccgaccgcggaaactcaatagaagctgaggtggagaacgtgttccatagcctcgacggcgaagtgaactcccatctcctcgataagaaggagcagataagtagcgagcctgaggatttcgcacagcccggggatgtatattcacaacgcgacgtcacaggcaccggggagaacaagtgtctccactgcgagttctctgcccactctagcgcttcactcgagctgcacgtgaagaggaaacacaccaaagaatttgaattctactgtatggcttgcgactattacgctgtcacacgacgggagatgacccggcatgcagcaaccgaaaagcataagatgaagcgacagagctacctgaatagcgccaatgtcgaggccgggtccgccgacatgtccaagaacatcattatgccagaagaggaacatcagcagaacagcgaagaattccaaattataagtggtcagccatctgatacactgaaaagcagaaacgcagccgactgcagcatactgaatgagaataccaacctggacatgtcaaaagtcctctgtgcggctgacagcgtcgaagtggaaactgaagaggaaagtaactttaacgaagatcacagtttctgcgagacttttcagcaggctccagtaaaggacaaggtacgaaagccagaggagatgatgtcccttacgatgtcttctaactacggctcgccgagccgctttcagaacgagaactctggctcctccgcactgaattgtgagactgccaagaaaaaccacgagatttcaaacgatgccggggaactgagggttcattgcgaaggtgaagggggcaatgccggagacggaggtggagttgtgcctcatcgccacctgtgtcctgtcacattggatggggagcgttccgcagagagccccgtgttggtggtgacccgaattactcgtgaacagggcaacctggagtccggggggcagaatagagtggcccgcggccatggcttggaggatctgaaaggcgtgcaggaagacccagtgctcggaaataaagaaattcttatgaactcccagcatgaaaccgagtttattctggaagaggatggacctgcttcagacagcactgtcgagtcttcagacgtgtatgagaccatcattagcattgatgataaagggcaggccatgtactcatttggaaggttcgatagcagcataatccggatcaaaaacccagaggatggagaattgattgaccagagtgaggaaggacttattgccaccggggtgaggatttccgaactccccctgaaggactgcgcacagggcgtgaaaaaaaaaaagtctgaggggtcttctatcggagagagcacgcggatacggtgtgatgactgcggatttttggcagacggcctgtcaggtctgaatgtgcacatcgccatgaaacaccctacaaaggagaaacacttccactgcctcctatgtggcaagtcgttctatactgagagcaacttgcaccaacatctggctagtgcagggcatatgcgcaacgaacaagcttctgtggaggagttgcccgaagggggcgccaccttcaaatgtgtcaaatgcacggaaccattcgactccgagcaaaacctgtttttgcacattaagggacagcacgaagagttgctgcgcgaagtgaataaatacattgtagaagatacagagcaaattaatcgggagcgggaagaaaaccagggaaacgtatgcaaatattgtgggaagatgtgccgcagctccaacagtatggcgttcctcgcccatatccggacccatacgggctctaaaccctttaagtgtaaaatctgtcacttcgcgactgcccaactgggcgatgccaggaaccatgtgaaacgacacctgggcatgcgggaatataaatgccatgtctgtggcgtagccttcgttatgaaaaagcatttgaacacacacttgctgggaaaacacggtgtgggcacccctaaagagagaaagttcacttgccacctctgcgataggtcctttacagaaaagtgggcattaaataatcatatgaagcttcataccggcgaaaaaccttttaaatgcacatggccaacctgccactactcgtttttgactgcaagcgccatgaaagaccactatagaacccacacaggcgagaagtcctttctctgtgacttatgtggattcgccggtggcacacggcatgctcttacaaagcacagacggcagcacacaggcgagaaacccttcaagtgtgacgagtgcaatttcgcttctaccacacagtcccacttaaccagacataaacgagttcatactggagaaaagccttatagatgcccatggtgcgactataggtcaaactgcgcagaaaatatccgaaagcatatactgcacactgggaagcatgaaggcgtcaagatgtataactgccccaaatgcgattacggcacgaatgttcccgtcgaattccgcaaccacctgaaagaacagcatcccgacatcgagaatccagatttggcatacctgcacgcaggcatagtgtctaaatcatacgagtgccggttaaaggggcaaggggccacattcgtggagactgatagcccttttactgctgctgctctcgccgaagagccacttgttaaggagaaacctctgcgctcgtccaggaggcctgcacctccgccggagcaggtgcagcaagttatcatattccagggatatgatggtgagtttgccctggatccatccgttgaggagactgccgctgcaaccctgcagactcttgccatggctggccaagtagctagggttgtccacatcacggaagatgggcaagtgatagcaacctcccaatccggagcccatgtggggagcgtcgtcccgggcccaatcctgcccgagcagctggcagacggcgccactcaagtggtagtcgtgggaggaagcatggaaggccacgggatggacgagtctctgtctcctggcggcgccgtcatacagcaggtaactaaacaggaaatcctgaatctatctgaggcaggggttgctccacccgaggcatcctccgctttggacgctctcctgtgcgcagtaacagagttgggtgaagtcgagggacgagcaggcttggaggaacagggtcgtcctggggccaaagatgtgctgattcaactgcctggtcaagaggtctctcatgttgctgcagaccccgaggctcccgaaatccagatgtttcctcaggcccaggagtcccctgcggctgtggaggtactaacgcaggtggtgcatccctcggctgccatggcatctcaggaaagagcccaggtggcatttaaaaaaatggtacaaggcgtattgcagtttgccgtgtgtgacaccgccgctgccggacagcttgtcaaagatggggtgacacaggtcgtggtttctgaagagggtgctgtgcatatggtggccggagagggcgctcagataattatgcaggaagcacagggcgaacatatggacctcgtcgagtctgacggggagattagtcaaatcatagtaactgaggaactggtgcaagccatggtgcaggaatcctctggaggttttagcgaaggaacaactcattatattctgactgaactacctccgggagtgcaggacgagcctggattatactcacacacagtgttagagacagccgattctcaggaattactgcaggccggcgcaaccctgggaaccgaagccggtgcccccagtagagcagagcagctggcatctgtagtcatctacacccaggagggttcgtcagccgccgcagcaatccagtcccaaagggaatcttccgaattgcaggaggcatag

SEQ ID NO: 194866 - DNA, 6747 bp, Artificial Sequence
  derived and/or modified sequence
atgatggacagcgagaacaagccagaaaatgatgaagatgagaagatcaacaaggaggcccaggacctgaccaagctgagcagccacaatgaagatggcggccctgtgtctgatgtgattgccagcttcccagaaaattccatgggcaagaggggcttcagcgagagcagcaacagcgacagcgtggtgattggagaggacaggaacaagcacgccagcaagaggaggaagctggatgaagctgagcccctgaagagcggcaagcagggcatctgccgcctggagaccagcgagagctctgtgacagagggcggcatcgccctggatgaaacaggcaaggagaccttcctgagtgactgcaccgtgggcggcacctgcctgcccaatgccctgagccccagctgcaacttcagcaccattgatgtggtgtccctgaagacagacacagagaagaccagcgcccaggagatggtgtccctggacctggagcgggagagccccttcccccccaaggagatctctgtgtcctgcaccatcggaaatgtggacacagtgctgaagtgcagcatctgtggccacctgttcagcagctgcagcgacctggagaagcatgctgagagccacatgcagcagcccaaggagcacacctgctgccactgcagccacaaggccgagagcagcagcgccctgcacatgcacatcaagcaggcccacggcccccagaaggtgttcagctgtgacctgtgtggcttccagtgcagcgaggagaacctgctgaatgcccactacctgggcaagacccacctgcggcggcagaacctggccgcccggggcggctttgtgcagatcctgaccaagcagcccttccccaagaagagcaggaccatggccaccaagaatgtgcacagcaagcccaggaccagcaagagcatcgccaagaacagcgacagcaagggcctgagaaatgtgggcagcaccttcaaggacttccggggcagcatcagcaagcagagcggcagcagcagcgagctgctggtggagatgatgcccagcaggaacaccctgagccaggaggtggagatcgtggaggagcacgtgaccagcctgggcctggcccagaaccctgagaaccagagcaggaagctggacaccctggtgaccagcgagggcctgctggagaagctggagagcaccaagaacaccctgcaggccgcccacggcaacagcgtgaccagccggcccaggcctgagaggaacatcctggtgctgggcaacagcttcagaagaagaagcagcaccttcaccctgaagggccaggccaagaagcgcttcaacctgctgggcatcaagaggggcaccagcgagacccagaggatgtacatgaagcacctgcggacccagatgaagacccatgatgctgagagcgtgctgaagcacctggaggcctgcagctctgtgcagagggtgtgtgtgaccaccagcgagacccaggaggccgagcagggccagggcagcgcccggcccccagattctggcctgcacagcctgactgtgaagccagccagcggcagccagaccctgtgtgcctgcacagactgtggccaggtggccaccaacagaacagacctggagatccacgtgaagcgctgccacgcccgggagatgaagttctactgcaggacctgtgacttcagctccatgagcagaagagacctggatgagcacctgcacagcaaccagcaccagcagacagcctctgtgctgagctgccagtgctgcagcttcatcagcctggatgagatcaacctgcgggaccacatgaaggagaagcacaacatgcacttcctgtgcaccccctgcaacctcttcttcctgtctgagaaggatgtggaggagcacaaggccacagagaagcacatcaacagcctggtgcagcccaagaccctgcagagcagcaacagcgacctggtgctgcagaccctgcccctgagcaccctggagagtgaaaatgccaaggagagcatggatgacagcggcaaggccagccaggaggagcccctgaagagccgggtgtcccatggaaatgaggtgcgccacagcagcaagccccagttccagtgcaagaagtgcttctacaagaccaggagcagcacagtgctgaccaggcacatcaagctgcggcacggccaggactaccacttcctgtgcaaggcctgcaacctgtacagcctgagcaaggagggcatggagaagcacatcaagaggagcaagcacctggagaatgccaagaagaacaacatcggcctgagctttgaagaatgtattgagcgggtgtgcatcggggccaatgacaagaaggaggagtttgatgtgtctggaaatggaagaattgagggccacatcggcgtgcagctgcaggagcacagctacctggagaagggcatgctggccagcgaggagctgagccagagcggcggcagcaccaaggatgatgagctggccagcaccaccacccccaagaggggccggcccaagggcaacatcagcaggacctgcagccactgcggcctgctggccagcagcatcaccaacctgactgtgcacatccggaggaagcacagccaccagtacagctacctgtgcaaggtgtgcaagtactacacagtgaccaagggggacatggagcggcactgtgccaccaagaagcacaagggccgggtggagattgaggccagcggcaagcacagcagtgacatcatcgtgggccctgagggcggcagcctggaggccggcaagaagaatgccggcagcgctgtgaccatgtctgatgaacatgccaacaagccagctgagagccccacctctgtgctggagaagccagaccggggcaacagcattgaggccgaggtggagaatgtgttccacagcctggatggagaggtgaacagccacctgctggacaagaaggagcagatcagcagcgagccagaagattttgcccagcctggagatgtgtacagccagagagatgtgacaggcaccggggagaacaagtgcctgcactgtgagttcagcgcccacagcagcgccagcctggagctgcacgtgaagaggaagcacaccaaggagtttgagttctactgcatggcctgtgactactatgctgtgacccggcgggagatgaccaggcatgctgccacagagaagcacaagatgaagaggcagagctacctgaacagcgccaacgtggaggccggcagcgctgacatgagcaagaacatcatcatgcctgaggaggagcaccagcagaacagcgaggagttccagatcatcagcggccagcccagcgacaccctgaagagcagaaatgctgctgactgcagcatcctgaatgaaaacaccaacctggacatgagcaaggtgctgtgtgccgctgacagcgtggaggtggagacagaggaggagagcaacttcaatgaagaccacagcttctgtgagaccttccagcaggcccctgtgaaggacaaggtgaggaagccagaggagatgatgagcctgaccatgagcagcaactacggcagccccagccgcttccagaatgaaaattctggcagcagcgccctgaactgtgaaacagccaagaagaaccacgagatcagcaatgatgctggggagctgcgggtgcactgtgagggggagggcggcaatgctggagatggcggcggcgtggtgccccaccgccacctgtgccctgtgaccctggatggagagaggtctgctgagagccctgtgctggtggtgacccgcatcacccgggagcagggcaacctggagagcggcggccagaacagagtggcccggggccacggcctggaggacctgaagggcgtgcaggaggaccctgtgctgggcaacaaggagatcctgatgaacagccagcacgagacagagttcatcctggaggaggatggccctgccagtgacagcacagtggagagcagtgatgtgtatgagaccatcatcagcattgatgacaagggccaggccatgtacagctttggccgctttgacagcagcatcatccgcatcaagaacccagaagatggagagctgattgaccagagcgaggagggcctcatcgccaccggggtgcgcatcagcgagctgcccctgaaggactgtgcccagggcgtgaagaagaagaagtctgagggcagcagcatcggggagagcacccgcatccgctgtgatgactgtggcttcctggctgatggcctgagcggcctgaatgtgcacatcgccatgaagcaccccaccaaggagaagcacttccactgcctgctgtgtgggaagagcttctacacagagagcaacctgcaccagcacctggccagcgctggccacatgagaaatgagcaggcctctgtggaggagctgcctgagggcggggccaccttcaagtgtgtgaagtgcacagagccctttgattctgagcagaacctcttcctgcacatcaagggccagcacgaggagctgctgcgggaggtgaacaagtacatcgtggaggacacagagcagatcaaccgggagcgggaggagaaccagggcaatgtgtgcaagtactgtgggaagatgtgccgcagcagcaacagcatggccttcctggcccacatccgcacccacacaggcagcaagcccttcaagtgcaagatctgccactttgccacagcccagctgggagatgccagaaatcatgtgaagaggcacctgggcatgagggagtacaagtgccacgtgtgtggggtggcctttgtgatgaagaagcacctgaacacccacctgctgggcaagcacggcgtgggcacccccaaggagaggaagttcacctgccacctgtgtgacaggagcttcacagagaagtgggccctgaacaaccacatgaagctgcacactggagagaagcccttcaagtgcacctggcccacctgccactacagcttcctgacagccagcgccatgaaggaccactaccgcacccacactggagagaagagcttcctgtgtgacctgtgtggctttgctgggggcaccaggcatgccctgaccaagcaccggcggcagcacactggagagaagcccttcaagtgtgatgagtgcaactttgccagcaccacccagagccacctgaccaggcacaagagggtgcacactggagagaagccctaccgctgcccctggtgtgactaccgcagcaactgtgccgagaacatcaggaagcacatcctgcacacaggcaagcatgaaggagtgaagatgtacaactgccccaagtgtgactatggcaccaacgtgcctgtggagttcaggaaccacctgaaggagcagcacccagacatcgagaacccagacctggcctacctgcatgctggcatcgtgtccaagagctatgaatgtcggctgaagggccagggcgccacctttgtggagacagacagccccttcaccgctgctgccctggccgaggagcccctggtgaaggagaagcccctgcggagcagccggcggcctgcccctcctcctgagcaggtgcagcaggtgatcatcttccagggctatgatggagaatttgccctggaccccagcgtggaggagacagctgctgccaccctgcagaccctggccatggccggccaggtggcccgggtggtgcacatcacagaagatggccaggtgattgccaccagccagagcggggcccacgtgggctctgtggtgcccggccccatcctgcctgagcagctggctgatggagccacccaggtggtggtggtgggcggctccatggagggccacggcatggatgagagcctgagccctggaggagctgtgatccagcaggtgaccaagcaggagatcctgaacctgtctgaggccggcgtggcccctcctgaggccagcagcgccctggatgccctgctgtgtgctgtgacagagctgggggaggtggagggccgggccggcctggaggagcagggccggcctggggccaaggatgtgctgatccagctgcccggccaggaggtgagccacgtggccgctgaccctgaggcccctgagatccagatgttcccccaggcccaggagagccctgctgctgtggaggtgctgacccaggtggtgcaccccagcgctgccatggccagccaggagcgggcccaggtggccttcaagaagatggtgcagggcgtgctgcagtttgctgtgtgtgacacagctgctgctggccagctggtgaaggatggagtgacccaggtggtggtgtctgaggagggcgctgtgcacatggtggccggggagggcgcccagatcatcatgcaggaggcccagggcgagcacatggacctggtggagagtgatggagagatcagccagatcatcgtgacagaggagctggtgcaggccatggtgcaggagagcagcggcggcttcagcgagggcaccacccactacatcctgacagagctgcccccaggagtgcaggatgagcccggcctgtacagccacacagtgctggagacagctgacagccaggagctgctgcaggccggggccaccctgggcacagaggccggggcccccagcagagctgagcagctggcctctgtggtgatctacacccaggagggcagcagcgctgctgctgccatccagagccagcgggagagcagcgagctgcaggaggcctag

SEQ ID NO: 194867 - DNA, 6747 bp, Artificial Sequence
  derived and/or modified sequence
atgatggacagcgagaacaagcccgagaacgacgaggacgagaagatcaacaaggaagcacaggacctgactaagttatccagccataacgaagatggtgggccagtttccgacgtcatcgcatcattccccgagaacagtatgggaaaaagaggcttttcagagagctccaattccgattctgttgtgataggggaagataggaacaagcacgcaagcaagagacggaaactggacgaagcggagccacttaagtctggtaagcagggtatttgtcgtctcgaaacctcggaatctagtgtgacggagggtggaatcgcgctggacgaaactggcaaagagacttttctgtcggattgcactgtcggtggcacctgcctcccgaacgccttgagcccatcatgtaacttttccactatcgatgttgtgtctctgaaaaccgacaccgagaaaaccagcgcgcaggagatggtcagcctggatttagagcgagagagcccctttcctcctaaggagatctctgtgagttgcaccatcggtaacgtggacaccgtcctgaaatgcagtatttgcgggcacctcttttcttcttgctctgatctcgagaaacatgctgagtcacacatgcagcagcccaaagagcacacatgctgccattgtagtcacaaagccgaatcgtcttccgcgctccacatgcatatcaaacaggctcatggcccgcagaaagtcttcagctgcgacctgtgtggcttccagtgcagcgaggaaaacttgctaaatgctcactacctgggcaaaactcatctccgcagacagaacctggccgctcgggggggatttgtgcaaatactgactaagcaaccattcccaaagaagagccgcactatggccactaagaatgtccactctaaacctcgcaccagcaagtcaatagccaaaaactccgatagtaagggcctgcgtaacgtggggagcactttcaaggacttccggggctctatcagcaaacagagtggtagctcatcagagctgctggtggagatgatgccctccagaaataccctcagtcaggaggtggagatcgttgaggaacatgttaccagcctcggactcgctcagaacccagaaaaccagtcaaggaaactggataccctcgtcaccagcgagggcctgctggagaaattagagtccaccaagaataccttgcaagcagcacacgggaactctgtgacatcgcggcccaggcctgagcggaacatactcgtgctgggaaacagttttagacgcaggtcctcaaccttcactctgaagggccaggcgaagaagcgttttaatctgctgggaatcaagcgtggaactagtgagactcagcggatgtatatgaagcatctgagaacccagatgaagacgcacgacgcagaatccgtgctgaagcacctggaggcttgctctagcgtgcagagagtttgcgtaaccacatccgagacgcaggaggccgaacaggggcaggggagcgcccgcccgccagattctggcctacactcacttacagtcaagccagccagcggttcacagacgttatgtgcttgcaccgactgcggacaagtggccaccaacaggacagacttggagattcatgtgaagaggtgccacgccagagaaatgaagttctattgtcgcacctgtgatttctcgtctatgagcaggcgagacctcgacgaacatctgcacagcaatcaacaccagcagacagcgtccgtactgtcctgccaatgttgctcatttatttctcttgacgaaatcaacctgcgggaccatatgaaagagaagcacaatatgcacttcctttgtaccccctgtaatctattctttttatctgagaaggatgtcgaggagcataaggctacagagaagcacattaattcactggtgcaacctaagaccttacaatcgagcaattcagacctcgttctccagacacttccactctcaaccctggaaagcgagaatgcaaaggagagcatggatgattcagggaaggcgtctcaggaagagccactgaagtcccgggtgtcacatggcaacgaggtgagacatagctcaaagcctcagtttcagtgtaagaagtgtttttataaaaccagaagcagcacggtgttaacgcgacacatcaaacttcggcacggacaagattaccattttttgtgcaaagcgtgtaatctctactccttaagcaaggagggtatggagaaacatataaagagaagcaaacacctggagaacgccaagaagaacaatatagggctgtccttcgaggagtgcatcgagcgggtttgcataggggccaatgataagaaggaggaattcgacgtatctggcaacgggagaatcgaggggcacattggtgttcagttacaggaacactcctacttagaaaaaggaatgttggcatcagaagagctgtcccagtcgggcgggtctaccaaagatgatgaactggctagtacaacaacgcctaaacgtggcagacccaaggggaatatttcacggacctgctctcattgtggccttttggctagcagtattaccaatttgacagtgcacatcagaaggaagcactcgcaccagtacagctacctgtgcaaggtctgcaaatactatactgtcacaaaaggtgacatggagagacattgtgcaaccaaaaaacataagggtagagtagagatcgaggcgtccgggaagcactctagcgatatcatagttgggcccgaggggggtagcctggaggccggtaaaaagaatgctgggagcgccgttacgatgagtgatgagcacgcgaataagccagccgaatcccctacatctgtgcttgagaagcctgaccgcggaaatagcattgaagcagaggtcgagaacgtgttccattctcttgacggcgaggtgaatagtcacctgctcgacaagaaggaacaaatcagctctgagcccgaagattttgcccagcctggcgacgtctacagccagcgtgacgtcaccggcaccggggagaacaagtgtctccactgcgagttttctgcccattcttctgcatccctggagctgcacgtaaagcgcaaacatacaaaggagtttgagttctattgcatggcttgcgattactacgccgtcacacgccgggagatgacccgtcacgcagcgacagagaaacacaagatgaagcggcagagttatctcaattccgcaaatgtcgaggcaggctccgccgatatgtcaaaaaacatcattatgcccgaggaagagcaccagcagaattctgaagaattccagatcatttctggccagccttccgataccctaaagagtcggaacgcagccgactgctctatcctcaacgaaaatacgaacctggacatgtcaaaagtcttgtgtgccgctgactctgtcgaggtcgagacagaagaagagtctaacttcaatgaagatcattcattttgcgagacctttcagcaggcacccgtgaaggataaagtccgtaaacccgaagagatgatgtcgcttacaatgtctagtaactacggatctccatcccggttccaaaacgaaaacagcggctcttctgccttaaactgtgagaccgccaagaagaaccacgaaataagtaatgacgctggcgagctaagggtgcattgtgagggcgagggaggcaacgcgggtgatggaggtggtgtcgtgccacacagacacttgtgtccagtgaccttggatggtgaacgaagtgccgagagccccgttttggtcgtaactagaattacccgggaacagggaaacctggagtcgggggggcagaaccgtgtggcacggggacatggattggaggacctaaagggagttcaggaggatcctgtgctcgggaataaggagatcctgatgaactcccagcacgaaaccgagtttatcttggaggaggatggccctgcctcagactctacagtggaaagttcagatgtgtacgaaactataatcagtatagacgacaaaggtcaggccatgtactcattcgggagatttgattcctctataatccggataaagaacccagaggacggcgagctgatcgatcagagtgaagagggactgatagcgactggcgtgaggatttctgagttgcctctcaaggattgcgcccagggagtcaagaaaaagaaaagcgaaggcagctccatcggggagtccacgaggatcaggtgcgacgactgtgggtttttagctgatggtctgtctgggctgaatgtgcatatcgctatgaaacacccaactaaggaaaagcactttcactgtctgttgtgcggtaagagcttctacaccgagtctaatctccatcagcatctagccagtgctggacatatgcgcaatgagcaggcatccgtggaggagctcccggagggtggcgccaccttcaagtgtgtgaaatgtactgagccctttgattccgaacagaatctgtttttgcacatcaagggccagcatgaagagctccttcgggaagtcaataagtacatcgttgaggatacggaacagatcaatagagagagggaagaaaaccaaggaaatgtctgtaaatattgtggaaagatgtgtagatccagcaatagcatggctttcctcgcacatattagaacgcacaccgggagcaaacccttcaagtgcaaaatttgtcattttgccacggcccagctgggggatgctcggaatcacgttaaacgccacttgggcatgagagaatataaatgccacgtgtgcggggtggcctttgtcatgaaaaaacacttgaatacccacttactcggcaaacacggagtgggaacccccaaggaacggaagttcacatgccatctttgtgaccgatccttcacagaaaaatgggcactcaacaaccacatgaagctccacacaggagagaagccctttaaatgcacgtggcccacttgtcattattcctttctcacggcctctgctatgaaagatcactaccgcacacatactggggagaagtccttcctgtgtgacctgtgcgggtttgccggaggaacgaggcacgcgctcaccaagcaccgaagacagcacactggcgagaaaccttttaagtgtgatgagtgcaacttcgccagtacgactcaaagccaccttaccaggcataagcgggttcacaccggagagaaaccctatcgttgcccctggtgcgattatcgatccaactgcgcagagaatataagaaaacacattctccacacaggcaagcatgagggcgttaaaatgtacaattgtcccaaatgcgattacggcaccaacgtccccgtggagtttcggaaccacctcaaggagcagcatccagacattgaaaatcctgatttggcttacctgcacgcaggcattgtttcaaaatcctacgagtgtcggctgaaaggccagggggcgacttttgtggaaacggatagcccattcaccgcagctgccctcgcagaggaacccctcgttaaggaaaagccactgcggtcttcacgcaggccagcccctcccccagagcaggttcagcaggtcataattttccagggttacgatggcgagtttgccctggatccctccgttgaggaaactgccgctgcaaccttgcagacactggcaatggccggccaggtggcccgagtggttcacatcacagaggacggacaagtaattgctacatcacagagcggcgcccatgtgggcagcgttgtgccaggccctatcctgcctgaacagcttgctgatggggccactcaggtggtggttgtgggaggcagcatggaagggcacggtatggatgaatccctgtcccccggcggtgctgtgattcagcaagtaactaagcaagagattcttaacctgagcgaggctggcgttgcccctcctgaagccagcagtgctttggatgcactactctgcgccgtaacggagctgggtgaggtcgagggtagagctgggctggaagagcaggggaggccaggagctaaggacgttctcattcaactacctggacaggaggtaagccacgtggccgcagacccggaggctcctgaaatccagatgtttccgcaggctcaggaaagccctgccgctgtggaggtcctcactcaggtggtccatccttccgccgccatggcttcacaggagcgagcccaagtggcttttaagaaaatggtacagggcgtgctccagtttgccgtttgcgataccgccgctgccgggcagctggtgaaggacggagtgactcaggtggtggtctcagaagaaggggctgtgcacatggtagccggggaaggggcccaaattatcatgcaggaggcccaaggagagcacatggacctcgtggagagcgatggggaaatttcccagatcatcgtcaccgaggaactcgtccaggcgatggttcaagaatcctcagggggcttcagtgagggcactactcattatatccttactgagctacccccaggagtgcaggacgagccaggcctgtactctcatacagtgctagaaacggcggatagtcaggaactgttacaggcgggggccactctggggaccgaagccggggctccaagtcgtgccgagcagctggccagcgtcgtcatttacacccaagaaggtagctcagccgctgccgccatccaatcacagagagagagcagcgagttgcaggaggcgtag

SEQ ID NO: 194868 - DNA, 6746 bp, Artificial Sequence
  derived and/or modified sequence
atgatggactctgaaaacaaacctgagaacgacgaagacgagaagatcaacaaagaagcacaggatctgaccaagctgagcagtcacaatgaagatggtgggcctgtgtctgacgtaatcgcatcctttccggagaattccatgggaaagagggggtttagtgaatcctccaactctgactctgtggtgatcggagaagatcggaacaaacatgctagcaagcgcaggaagctggatgaagccgaacccctcaagtccggaaagcaagggatttgtagactggaaacctccgagagctccgtgacagagggcggtattgccctggacgaaaccgggaaagagacgtttttgtcagactgtacagttggaggaacctgcctccccaatgccctctctccaagttgcaatttctctactatagacgttgtcagtctcaagacagatacagagaagacctccgcccaggaaatggtgagtctggacctggaacgggagagccccttcccccctaaggagattagcgtatcctgtaccatagggaacgtggacaccgtgctgaagtgcagcatttgcggacatttattctctagttgttcggatctggagaagcatgcagagagtcatatgcagcagcctaaagagcacacatgctgccactgctctcacaaagccgagagctcttctgccctccatatgcacatcaagcaggcccatggccctcaaaaagtattttcatgcgatctttgtgggtttcagtgttcagaagagaatctactaaatgctcactacctgggaaaaacccaccttcgaaggcagaacctggctgcaaggggtggattcgtgcaaatcttaactaagcagccatttcccaagaaatcccgcactatggcaaccaagaatgtgcacagtaagccaagaacttcaaagtcaatagctaagaactcggatagcaagggcctccgcaatgtcggctcaacctttaaagactttcgaggcagtatttcaaaacaatccggctccagttccgagctgctggtcgagatgatgccatcaagaaatacactcagccaggaggttgaaattgttgaagagcatgtcacgagcctggggcttgcccagaatccggagaatcaatcccgaaagctggacaccctggtgactagtgaagggctgctcgagaagctcgaatctacaaagaacactttgcaggcggcacatgggaatagcgtcacttctcgtccgaggcctgaacgcaacatcttagtccttgggaacagcttccggcgaagaagctcaacgtttactctcaaggggcaagcaaagaagcggtttaacctcctaggaattaagagggggaccagtgaaactcagagaatgtatatgaaacacctccggacccaaatgaagacgcacgatgcagagtccgtgcttaaacacttggaggcatgttcttctgttcagagagtttgtgttaccacgagcgaaacacaggaagccgagcagggtcagggctctgcgcgtcctccagactccgggctgcactcactgacggtgaagcccgcaagcggttctcagactctgtgtgcctgtactgactgtggccaggtggcaactaatcggaccgacctcgagatccacgtgaaaagatgccacgcgagggagatgaaattttactgtaggacctgtgacttttcctccatgtcccgtcgcgatctcgacgaacacttgcactccaaccaacatcagcagaccgctagcgttctaagctgtcagtgttgctctttcataagcctggatgagattaacctccgagatcatatgaaagagaaacacaatatgcacttcctatgcacaccttgtaaccttttttttctcagtgagaaggacgtggaggaacataaggcaaccgagaaacatatcaactcactggtgcaacccaaaacccttcagtcatcgaatagtgacctggtcctgcaaacactgcctttgagcactctagagtcagaaaatgccaaggagagcatggatgactcaggaaaagcttctcaggaagaacccctgaagtcacgtgtgtcccatgggaatgaggttcgccactcgtccaaaccccagtttcagtgtaaaaagtgtttctataaaacaagaagcagtacagtgctcacgaggcatatcaagctgcgccatggccaggactaccattttctgtgtaaagcctgcaatctgtacagcctatctaaagagggtatggaaaagcatatcaagcgaagcaagcatctggagaacgctaagaaaaataacattgggctgtcattcgaggagtgcatagagagagtctgtattggcgcaaatgataaaaaagaggagttcgatgtgagcggcaatgggaggatcgagggccatattggggtacagctacaagagcactcttacctcgaaaaggggatgttggcatctgaagagctgagccagtccgggggttccaccaaagacgacgaactcgctagcactaccactccgaagcggggacggccaaaggggaacatatcccgcacctgctcccattgtgggctactggcctccagcatcaccaatctgaccgtgcatattcgcagaaaacactctcaccagtactcttacttgtgtaaagtctgtaaatactacaccgtgaccaaaggcgatatggagagacactgcgccactaagaaacacaaaggtcgggtagagattgaagcgtcaggtaaacattcaagcgacattatagtcggaccggaaggcggtagccttgaggcaggaaaaaagaacgccggtagcgccgttacaatgtcagacgagcatgccaataagcctgctgagtctcctacatctgtgttggaaaagccggatcggggtaattcaattgaggccgaggtggagaatgtgtttcactcactagatggggaagtaaatagccaccttctggacaagaaagagcaaatcagctccgaacccgaagacttcgctcagcctggcgacgtctattcacaaagagacgtgactggcacaggtgaaaacaagtgtctacactgtgaattttccgctcattcttccgcatctctggaactgcatgtcaaacgaaagcacaccaaggaatttgaattttactgtatggcttgcgactattatgccgtgactcgacgcgaaatgaccaggcacgcagccactgaaaagcacaaaatgaaaaggcagtcatacttaaactcagctaacgtagaggcaggctcagctgacatgtcaaagaatatcatcatgcctgaggaggaacatcaacagaacagcgaggaattccagattatctcaggccaaccgagcgacacgctaaagagccgcaatgctgctgattgctctatactcaatgagaacaccaatcttgacatgtccaaagtgttgtgtgccgctgactctgtggaagtcgagactgaagaggaatctaacttcaacgaggatcatagcttctgcgaaacatttcagcaagcacctgtgaaggataaagtaagaaaaccggaggagatgatgtccctgacaatgtcctctaattatggaagtccctctagatttcagaatgagaactcaggaagctccgcccttaactgcgaaaccgctaaaaagaaccatgaaatctctaatgatgctggcgagttacgggttcattgcgagggcgaaggtggtaacgctggagacgggggaggagttgtcccccacaggcacctgtgtcctgtgactctggatggcgaaaggagcgctgagtcacccgttctggtggtgactcgcattaccagagagcagggcaacctggagagtggaggacagaatagagtggcacgagggcacgggttggaagatctgaagggcgttcaggaggatcccgtccttggcaacaaggaaatcctcatgaatagtcagcatgagaccgagtttattctggaggaggatgggccagctagcgactcaactgtcgagtcctctgatgtttacgagacaatcatttccatcgacgataagggtcaggcgatgtactcattcggcaggtttgattcgagtattatcaggatcaaaaatcctgaagacggcgagcttatcgaccaatcggaggagggattgatcgcaaccggagtccggattagcgaactccctctgaaagactgtgctcagggggtgaaaaaaaaaaaatcagaaggctcttcaatcggggaatctacgcggattcggtgtgatgattgtgggtttctagcagacggtttgtccggcttaaatgtgcacatagccatgaaacaccctacgaaggagaagcactttcactgcttgctctgtggaaagagtttctacacagagagcaatctccatcaacacctcgcctcggctggccatatgagaaacgaacaggcatctgtggaggagctccccgagggaggtgccacatttaagtgcgtcaaatgcaccgagccattcgatagcgaacagaatttgttcttacatataaaaggccagcatgaagaactgctgcgggaggttaacaaatatattgtggaagatacagaacagattaatagggaaagggaagagaatcaaggaaacgtctgcaagtactgcggcaagatgtgcagatccagtaatagtatggccttcctggcccatatcaggacacatacgggtagcaaacccttcaaatgtaagatttgtcacttcgcaacagcccagctgggggacgctcgtaaccacgtgaaaaggcacctggggatgcgtgagtataagtgtcacgtgtgcggggtagcattcgtgatgaaaaagcacttgaacacacatctcttgggcaaacatggagtcggcacccctaaggaacggaagtttacatgccatctctgtgataggagcttcacggaaaaatgggcacttaataaccatatgaaactacacacgggcgagaagccatttaaatgtacctggcccacctgccattactcctttctgactgcatccgccatgaaggatcactaccgaacccatacaggcgaaaagtcgttcttatgcgacctgtgtggattcgccggtgggacccgtcacgccctgactaaacaccgccgtcaacatacaggagagaagccatttaagtgtgacgagtgcaacttcgcaagcacgacacagagtcatcttactaggcataagcgtgtgcatactggtgagaaaccatatcgttgcccctggtgtgactacaggtccaactgtgccgagaacattaggaagcatatactccacaccggaaagcatgaaggtgttaagatgtacaattgtccaaaatgtgattatggcaccaacgtccctgttgagtttagaaatcacctgaaggagcaacatcccgatattgaaaatccggacctggcctatttgcatgcaggaatcgtctctaaatcatatgagtgcagactgaaggggcagggagccacctttgttgaaaccgatagtccatttacggccgcagccctagctgaagaaccactggttaaggagaaaccactccggtctagtcgcaggcctgcccctcccccagagcaggtgcagcaagtaatcatatttcaaggctacgacggggagtttgccctggatccttccgtggaggagactgcagccgcaactctccaaactctggcaatggcagggcaagtggctagagtagtgcacatcactgaagacgggcaggtcatcgctacatctcaatcgggggcacacgtcgggtccgtggtgccgggtcctatactgcccgaacagctggcagatggagccactcaggtggttgtggtgggcggtagtatggaggggcacggtatggatgagagtctgtcacctggtggtgccgttattcagcaggtgacaaagcaggaaatcctaaatctgagcgaggccggtgtggcccctcccgaagctagcagtgctcttgacgcccttctgtgtgctgtcacggagctaggggaagtcgaaggacgcgcaggtttagaagaacaggggcgtccaggagcaaaggatgtgctcattcaactcccgggacaggaagtgtcacatgtggcagccgaccccgaagctcctgagatccagatgtttccccaggctcaggaatcccccgcagctgtagaggtgctgacacaggtggtgcatccgagtgctgcaatggcctcccaggagagagcgcaggtcgccttcaaaaagatggtgcaaggggtgctgcagttcgccgtgtgcgataccgccgcagcgggtcaactagtgaaggacggcgtgacccaggttgtggtctcggaagaaggggcagtacatatggtggcgggtgagggggctcagattatcatgcaggaagcccagggggaacacatggatctcgtcgaatcagacggcgagataagtcagatcatcgtgactgaggaactcgtccaggcaatggtccaggagtctagtggcggattttccgagggaacaactcattacatcctaactgaactgcctcccggagtccaggacgagcccggactgtactcacacactgttttggaaacagctgattcccaggagttacttcaggccggtgcaaccctgggtaccgaggccggagcaccaagccgagctgagcagctggcctccgttgtgatttatacacaggagggctccagtgctgctgcagcaatccagagtcagagggagtcttctgagctgcaggaagccta

SEQ ID NO: 194869 - protein, 878 aa, Artificial Sequence
  derived and/or modified sequence
MYEGKHIHFSEVDNKPLCSYSPKLCKQRRLNGYAFCIRHVLEDKTAPFKQCEYVAKYNSQRCTNPIPKSEDRRYCNSHLQVLGFIPKKERKKKNDPIDEVKVRHQMDTMAFSLTVPTLALKMPNGLDGMSLSPPGARVPLHYLETELEDPFAFNEEDDDLKKGATVRKKLQSKLAQNRQRQRETEILKVRQEHFSPPPAPSQQQPPQQHSHLSPLSTSLKPPAPPQGSVCKSPQPQNTSLPMQGVAPTTHTIAQARQLSHKRPLPLLPSSRAPTVDPPRTDRILMKATAFSPHFSCISRLQRLVKLCTQKHQLDTDLFPHLGLDWSEESGEEPEDSEQASPYQVAWSIRETLRYQRHASDDDDAESRSSRVTQLCTYFQQKYKHLCRLERAESRQKKCRHTFRKALLQAASKEPECTGQLIQELRRAACSRTSISRTKLREVEPAACSGTVKGEQCANKALPFTRHCFQHILLNHSQQLFSSCTAKFADGQQCSVPVFDITHQTPLCEEHAKKMDNFLRGDNSRKVQHQQQRKPRKKTKPPALTKKHKKKRRRGPRRPQKPIPPAVPQGNLSMPASVSLPVEASHIRSPSTPELSADELPDDIANEITDIPHDLELNQEDFSDVLPRLPDDLQDFDFFEGKNGDLLPTTEEAEELERALQAVTSLECLSTIGVLAQSDGVPVQELSDRGIGVFSTGTGASGIQSLSREVNTDLGELLNGRIVHDNFSSLELDENLLRSATLSNPPTPLAGQIQGQFSAPANVGLTSATLISQSALGERAFPGQFHGLHDGSHASQRPHPAQLLSKADDLITSRQQYSSDHSHSSPHGSHYDSEHVPSPYSDHITSPHTTSYSGDNMAAPVCFRGYHRPASVAWGLLLN

SEQ ID NO: 194870 - protein, 1027 aa, Artificial Sequence
  derived and/or modified sequence
MYEGKHIHFSEVDNKPLCSYSPKLCKQRRLNGYAFCIRHVLEDKTAPFKQCEYVAKYNSQRCTNPIPKSEDRRYCNSHLQVLGFIPKKERKKKNDPIDEVKVRHQMDTMAFSLTVPTLALKMPNGLDGMSLSPPGARVPLHYLETELEDPFAFNEEDDDLKKGATVRKKLQSKLAQNRQRQRETEILKVRQEHFSPPPAPSQQQPPQQHSHLSPLSTSLKPPAPPQGSVCKSPQPQNTSLPMQGVAPTTHTIAQARQLSHKRPLPLLPSSRAPTVDPPRTDRILMKATAFSPHFSCISRLQRLVKLCTQKHQLDTDLFPHLGLDWSEESGEEPEDSEQASPYQVAWSIRETLRYQRHASDDDDAESRSSRVTQLCTYFQQKYKHLCRLERAESRQKKCRHTFRKALLQAASKEPECTGQLIQELRRAACSRTSISRTKLREVEPAACSGTVKGEQCANKALPFTRHCFQHILLNHSQQLFSSCTAKFADGQQCSVPVFDITHQTPLCEEHAKKMDNFLRGDNSRKVQHQQQRKPRKKTKPPALTKKHKKKRRRGPRRPQKPIPPAVPQGNLSMPASVSLPVEASHIRSPSTPELSADELPDDIANEITDIPHDLELNQEDFSDVLPRLPDDLQDFDFFEGKNGDLLPTTEEAEELERALQAVTSLECLSTIGVLAQSDGVPVQELSDRGIGVFSTGTGASGIQSLSREVNTDLGELLNGRIVHDNFSSLELDENLLRSATLSNPPTPLAGQIQGQFSAPANVGLTSATLISQSALGERAFPGQFHGLHDGSHASQRPHPAQLLSKADDLITSRQQYSSDHSHSSPHGSHYDSEHVPSPYSDHITSPHTTSYSGDNMAATFSAEMPIMAQHLLPTQLEVPLGGVVNPRTHWGNLPVNLGDPSPFSNLLGADGHLLSTSLSTPPTTSNSETTQPAFATVTPSSSSVLPGLPQTSFSGMGPSAELMASTSPKQQLPQFSAAFGHQLSSHSGIPKDLQPSHSSIAPPTGFTVTGATATSTNNASSPFPSPN

SEQ ID NO: 194871 - protein, 37 aa, Artificial Sequence
  derived and/or modified sequence
MYEGKHIHFSEVDNKPLCSYSPKLCKQRRLNGYAFCI

SEQ ID NO: 194872 - DNA, 3042 bp, Artificial Sequence
  derived and/or modified sequence
ctcttcttgtacagccccggcagccctgccttcttggctggagagtatattcagggatttccccttaataatcaccgaccctgggagcactttttagtttccaaaataaaaatatgatcctcacccctcttgcttgacagggaaaggctctcgccggagcccaggggggagcagtagcagcggcagccgagcttcctagtccattgccagcgcctctcactctgatctgtcagcccagccgagggaacaggggggaaggagaaaaaaaaaagcagctgaaagacaatctgcttcatcctgattctgcggcattccaaactgtggtatccttgggggttctcttaacattgctatggtgcagaagatttaaaatcagctgatgttcacaaggaatagagtcacgtgatgtatgaagggaaacatatacacttctctgaggttgacaataagcccttgtgctcatatagccccaaactgtgcaagcagaggcgactcaacggctacgccttctgtatcagacacgttctggaggacaagactgcccccttcaagcaatgtgaatatgtggccaagtataacagccaacgctgcaccaaccccatccccaaatcagaggatcgtaggtactgcaacagccacttgcaggtacttggctttatcccgaaaaaagagaggaagaaaaagaatgatcctatagatgaggtgaaggtcaggcaccagatggataccatggcctttagcctgacagtgcccacgttggccttgaagatgcccaacggactggatggaatgtccctctctccacctggggcaagggtccctctccactacctggaaaccgaattggaagacccatttgctttcaatgaggaagatgatgacctaaagaaaggggcaactgtgagaaagaagttgcagagcaagttggcccagaatcggcagcgccagagagagacagagattttaaaagttcgacaagagcactttagtccccctcctgcaccttcacagcagcagcctccgcagcagcactcccacctgtcacctttatctacttctttaaaacctccagcgccaccgcagggttcagtctgcaagtcacctcaacctcagaacaccagcctaccaatgcagggagtggcacccaccacacacactatagcacaagcacggcagttgtctcacaagaggcctctgcccctcctgccatccagtagggctcccactgtggacccacccaggactgaccggatcctcatgaaagccacagccttctctccacacttctcatgtataagccgactgcagagactggtgaaactgtgcacccagaaacatcagttggacactgatctgtttccccatttaggtttggactggtctgaagagagcggagaggaaccagaggactcagagcaggcctcgccctaccaggttgcatggtccatccgggaaaccctcagatatcaaagacatgcgtcagatgatgatgatgcggagagtaggagctccagggtgactcaactttgcacttactttcagcagaaatataagcacctctgccgcctggagcgggcagaatctcgtcaaaagaaatgccggcatacgtttaggaaagctttgctgcaggcggccagtaaagaaccagaatgcactggtcagttaatacaagaactgcggagagctgcatgcagtcgaaccagcataagccggaccaagctgagggaggtggaaccagcagcatgcagtggaaccgtgaagggtgaacagtgcgctaacaaagcccttccattcaccagacattgtttccaacatatcctcttgaaccactctcagcagctcttctcaagttgcacagccaagtttgcagatggacagcagtgctctgtgccagtttttgacattacacatcagacacctctgtgtgaagaacatgccaaaaaaatggataatttcttgagaggagataactcccgtaaagttcagcaccagcagcagaggaaacccaggaaaaaaaccaagcctcctgcactaaccaaaaaacacaagaagaagagaaggcgtggacctcgtcgaccccaaaaacccattccacctgcagtcccccaagggaacctcagcatgcccgccagcgtctcactgccagtggaggcctctcacatccggagcccatccacgccagagctgagtgctgatgagttgccggatgacattgccaatgagatcactgacattccacatgacttggaattgaaccaggaggacttttcagatgtcctgccacggctacctgatgacttacaagattttgatttttttgaagggaagaatggagacctcctcccaactaccgaagaggctgaggagcttgaacgggccttgcaggctgtaacttctctcgagtgcctgagtaccattggggtccttgcccagtcagatggtgtgccagtccaggagttgtcagatagaggaataggggtgttctccacaggtactggagcttcaggaatacaatccttgagccgagaggtgaacacagacctaggggagctattgaatgggcgtatagtacatgataatttttctagtctagagctggatgagaacctgctccgttctgctaccttgtcaaacccacctacacccctggcagggcagatccaggggcagttctctgccccagccaacgttggccttacttctgccactctgatcagccagagtgcacttggggagagagccttcccaggacagtttcatggacttcatgacggcagccatgcctcccagaggccacatcctgcccagctgctgagcaaggcagatgacctaatcacctcacgacagcaatacagcagtgatcactcacactcctcaccccatggaagccattatgatagtgagcatgtgccgtctccctacagtgaccatatcacctctccccacacaacatcgtactctggtgataatatggcagctccagtgtgcttccggggttaccacagaccagcttcagtggcatggggccttctgctgaactaa

SEQ ID NO: 194873 - DNA, 14136 bp, Artificial Sequence
  derived and/or modified sequence
ctcttcttgtacagccccggcagccctgccttcttggctggagagtatattcagggatttccccttaataatcaccgaccctgggagcactttttagtttccaaaataaaaatatgatcctcacccctcttgcttgacagggaaaggctctcgccggagcccaggggggagcagtagcagcggcagccgagcttcctagtccattgccagcgcctctcactctgatctgtcagcccagccgagggaacaggggggaaggagaaaaaaaaaagcagctgaaagacaatctgcttcatcctgattctgcggcattccaaactgtggtatccttgggggttctcttaacattgctatggtgcagaagatttaaaatcagctgatgttcacaaggaatagagtcacgtgatgtatgaagggaaacatatacacttctctgaggttgacaataagcccttgtgctcatatagccccaaactgtgcaagcagaggcgactcaacggctacgccttctgtatcagacacgttctggaggacaagactgcccccttcaagcaatgtgaatatgtggccaagtataacagccaacgctgcaccaaccccatccccaaatcagaggatcgtaggtactgcaacagccacttgcaggtacttggctttatcccgaaaaaagagaggaagaaaaagaatgatcctatagatgaggtgaaggtcaggcaccagatggataccatggcctttagcctgacagtgcccacgttggccttgaagatgcccaacggactggatggaatgtccctctctccacctggggcaagggtccctctccactacctggaaaccgaattggaagacccatttgctttcaatgaggaagatgatgacctaaagaaaggggcaactgtgagaaagaagttgcagagcaagttggcccagaatcggcagcgccagagagagacagagattttaaaagttcgacaagagcactttagtccccctcctgcaccttcacagcagcagcctccgcagcagcactcccacctgtcacctttatctacttctttaaaacctccagcgccaccgcagggttcagtctgcaagtcacctcaacctcagaacaccagcctaccaatgcagggagtggcacccaccacacacactatagcacaagcacggcagttgtctcacaagaggcctctgcccctcctgccatccagtagggctcccactgtggacccacccaggactgaccggatcctcatgaaagccacagccttctctccacacttctcatgtataagccgactgcagagactggtgaaactgtgcacccagaaacatcagttggacactgatctgtttccccatttaggtttggactggtctgaagagagcggagaggaaccagaggactcagagcaggcctcgccctaccaggttgcatggtccatccgggaaaccctcagatatcaaagacatgcgtcagatgatgatgatgcggagagtaggagctccagggtgactcaactttgcacttactttcagcagaaatataagcacctctgccgcctggagcgggcagaatctcgtcaaaagaaatgccggcatacgtttaggaaagctttgctgcaggcggccagtaaagaaccagaatgcactggtcagttaatacaagaactgcggagagctgcatgcagtcgaaccagcataagccggaccaagctgagggaggtggaaccagcagcatgcagtggaaccgtgaagggtgaacagtgcgctaacaaagcccttccattcaccagacattgtttccaacatatcctcttgaaccactctcagcagctcttctcaagttgcacagccaagtttgcagatggacagcagtgctctgtgccagtttttgacattacacatcagacacctctgtgtgaagaacatgccaaaaaaatggataatttcttgagaggagataactcccgtaaagttcagcaccagcagcagaggaaacccaggaaaaaaaccaagcctcctgcactaaccaaaaaacacaagaagaagagaaggcgtggacctcgtcgaccccaaaaacccattccacctgcagtcccccaagggaacctcagcatgcccgccagcgtctcactgccagtggaggcctctcacatccggagcccatccacgccagagctgagtgctgatgagttgccggatgacattgccaatgagatcactgacattccacatgacttggaattgaaccaggaggacttttcagatgtcctgccacggctacctgatgacttacaagattttgatttttttgaagggaagaatggagacctcctcccaactaccgaagaggctgaggagcttgaacgggccttgcaggctgtaacttctctcgagtgcctgagtaccattggggtccttgcccagtcagatggtgtgccagtccaggagttgtcagatagaggaataggggtgttctccacaggtactggagcttcaggaatacaatccttgagccgagaggtgaacacagacctaggggagctattgaatgggcgtatagtacatgataatttttctagtctagagctggatgagaacctgctccgttctgctaccttgtcaaacccacctacacccctggcagggcagatccaggggcagttctctgccccagccaacgttggccttacttctgccactctgatcagccagagtgcacttggggagagagccttcccaggacagtttcatggacttcatgacggcagccatgcctcccagaggccacatcctgcccagctgctgagcaaggcagatgacctaatcacctcacgacagcaatacagcagtgatcactcacactcctcaccccatggaagccattatgatagtgagcatgtgccgtctccctacagtgaccatatcacctctccccacacaacatcgtactctggtgataatatggcagctaccttttcagcagagatgcccatcatggcgcagcacttgctcccaacccaacttgaggtgccacttggaggcgtggtaaaccccagaactcactggggcaatctccctgtcaaccttggagacccctctccatttagcaaccttctcggcgcagatggacatcttctttccacttccctatccacgccacccaccacttcgaactcagagaccacacagcctgccttcgccaccgtgacccccagcagctccagtgtgcttccggggttaccacagaccagcttcagtggcatggggccttctgctgaactaatggcctccacctctcccaagcagcaactccctcagttcagcgcagcctttggccaccagctgagttctcacagtggcattcctaaggacctgcagcccagccacagctctatagcccctcctacaggcttcacagtaacaggtgccacagctacaagtaccaataatgcatcttctccctttccctcccctaactgagggtgtctgtgtgtttgcaggcaggtggggaacccagtgttttctatctttgtttcctctttagcacccctctccccttttcctaaagaagatataacagatggggatcagaggggcaccccccttcccagttcaatgagtggccctgcagtggacctcgctacagtgttcacatgtgctccttagcactggtgctcattccctcctggcaggcccactccgccccagtggtttccttagtggttcagcacagtgactggataggattgatttttagcagcaagtcctagaagtggaagatacctcagaataccagtgccctttactatttcctagtattcagatcagtgctttccattctgttgccaggtttttacataggtggttctagatagaatgatcttattaattgagttcctgtataagagacagcaaatggtgtgtggcaggtcaagattctgacctagcaccaactgctaaacaccacagtgaggccaggattccattcgtaattgtgatcatgtttaactaaaagaaaaaaatgtgtcttttgactgcctgtgagtatgcgtgtgcccacgcgtgtgtttttgtgcagtgcaggaagcagctgtcccattagtttgatttttttttgttctccccttccccctacttaatgagtataaaactcttacttttctcctgtcctacatctcacagtcctaataaggttggtccttcttttcctcaagtttcctgaatagggagggtggtggactggtcgtgtgagtagcacaacctttttctgctaaaagttagcccaagaagaaacagaacatagaaagcttggattcccgtcagtgaggtagggatgtcctaaaaagcttgcctgggatgactgcaggctgccggggttctggggcctgatggtcactttgtcttttcagacatttgtttgtttctaaatccctctctcatggaatacatttgcaagatgtaattaaagaaaatattttgatgtgaaaaagcaggataggtcagatagatttgaaaagatgggatctgtcaactccttgatccatcttttgcttttgaatttttcatgtttacagtagtgattctttggtaagatttgtaaaatgttaagacacttgtagaatcagtgtaccagttgtgaagtgatgtgtaatatctgaaggatacacattttaaagtttctttcaaagcagaatatggaaattagatataaattttattcgccctttggtccttttaaaataattcaagtacttgggtttaagtaaatttgaaaatagctttgggaaatgtttttaaaatgccaggattttaggggttaaagatcatatggggtagtttaggaagtttgtgactatgagatgaatttgtgaggtttcttgcctaccttttttcccccccagagaagggtggaactagattttaaaggcatctctactctgcttttgctgagtagtttcactgtcccttgagataccattggctatttatacctgagtctagtctaattcacatatatatatattttaaaagttgagagaacatacctattgatgtggttcaataattcatttgtcagggaatatttgatcttaattcctttctaataggtagtgattggatgtattttcctacttcctgtatgtaatctctttatgccatgctagttctaaccagtcccttcttttgaaagcttttctttctctgctttttaaaggaatgatggtgatcagcaggcattatgcagataccacgtgcctgaggttatggaggggaaatgtcacatgactgtatgaaatcattatatgccctattttgtatttattgatgtttctttttgtgggccaaaaatatgtttgtaatatatttagtttttttaaaatcatggtaattgattggaagatttatttttaatagctttgccttttttgcagagtgcaaaatttctaaattataacttatgtcataaagcaaaattatatttggtatcaccataaatttctattctgaatggtgagaacagataatttgaatatttctcacctgtgagtctatattagtaagcttttttattttaatgtactgtaatgaagtggtcacgagtagttacctcggctcaaaaatgtcatttagtttgttaaactattttcacaaccatcataagcataactagataactgtccattcccagcagttcagtttagtctccattgtgtatttaaaggttgtcgcagagcagcacattgacttcctcatcagccctttgacaaggaagggaaagtcgtgggtagtcgatttgaactttttctgtctacttgtcccctcatgttagctgcttgaaattcttcagttatgatacaaagctgagtttgcagtaagttgcacattttattgtttgcaattttctgttttatgtgcatttaaaagcccttctctgctttctagtaaggaggcatgaaattatcaggaatgttgctagttacagcttcacaccaaaaactttgagtaaatacattttcgtttggatgcccatgatgaaagctgaggaaagtggttgaggaattatcaacaacaaacttttcctcttattttatctagttcaaaacagatatcaaagtttgcaatttgctttgctcttgctgtttcttatgagtccctttttggaagagaggagaacatctataagcccagagagatctgtgtttttcttttacttaatagagccattctcgtctattagtaggaactttgctattaatatgtatagaaaggaatgaagtggcttttactccagaaatatgaaaattagtatcttttaaaatagcacttatgctatcacaaggcaatactggaatgaaaaacaaatcttatataaggtcctaaataggtagaaactagcttttattctagtgttgaacccaggagaaatagtggcaaagaagtttcactctgtttctgcagttctttgggactatttataaaggccagttagattgtgttactgtgatttaatttacaaagttgctgcagttaatggatacattctgtgctctgagaatctgaattccattctaatgtgtgatattcactggctatgatcagtagtatctgaagaaaagatgggctttttctcctttactctctctacataattattaatattattttaattaaagtacttaagacattgttttttcttctgtaaaaatggcttagcaatttgcacatctgggtaggttatgtagctagtaaacaactcaatagtaagtagcaattatacttaacccaccaagtgacagactatgcaatggaaaaattttctaattatcgtcacatagcttagacagcaaaggattattttctctggtgacctaccatgtgtgatataactgctttataaatgacttcctgagcaatttcatgttggcaggcagtgtggtgtgtctagtgcccctctatgagaagactataatttaatcagaaacaaatagtaggcatggggagcaagttggaaagtgaggttattattttttttccttaaaattggtgttactgtctttagtggcttgaggctaaagaaagctgatactttatctttgccaaataattatttataagatttatttttaaataagcccaatctctcacctgcagttaagaatcatcattttctgtgactgacactaaagctcttccttatcagagcttgttctcaatctgtgatcacagtccacagtggcaaagacaactctttgattaggaaggaaaccatgtttgggatgcacagaggtgccctgtccatacggttttcttcttacatgaaagaattgacctttctgttgacctataccattctgtttttataaagtgggattagaatttgagcatatctagtaaatgccgtgtggtcagtccgctgatgcttgcccgccgtctttgccgtgccttggcatcctaggggtgctggtgatggtcagtgggcatcatcggtcagcagtgcacgtgtaaggcaatctcctctcctccaggttagttcagaaggtcgctatgggttggtattgcaaaaagatgagtatatgaacactaaacttattaagaggtttgaaattcattaaaaattagttttcagtttcttcatctttcttttcagacttctttaaaaatactgttcttaatctggtatatatagaaatctaatattatggtcttctaaatggtcaacagaactctccagtttaatgaggcaatttagaggattccttgaaagaaaatttcatcatactgaacagtcctcatttgtatctcttttgttaccagtatttacattgttccaaggatttttttcctgacaaaaaatatatttctcgggagtggagagttttttatatatatatatgaaagaacatagatgtttccccccgcccaatacattaactgaatcttcactggcattctgtagaaaagttaaaacagtttaataatgtcttaacatctttatacattttcctatattctggaggaaaccagaatcatgtttagtagattaaagtaacattttaaatactacctttccaataatttgtaataaaataccagtgaaggacatgtttggatatctgttaagcatttttccctgactaatgaattaggaaagaaaacataaaacataaatgaatagttatgtctcttctaataaacagtgtcattaatgctgcagttgtgggtcaaacttagggagccttatttctaaatagcaaaaattctgttttcacttcagcccttatttttttttgttagtttttctctgcactgtgatacagagctaataagaggaaatgtgacgtttcagagagagagcaagcaaattgggtatgacttttttaccctatgttccccaatactggggatgtttggctactttgaacagcagtttttagtgatctaaagtttagatcaatactcgtataagagaaaaatctaactctcagtgagctccatagggcagcacagctttccatcttctctttcgccttcttgcgtctgcccaccacagtcccgaagaatgcacacgcacatatgatctgtacccatcccgcccgaagagtcatagaatcctcttctttcacttgtttcttttttcttcgtttgtttgtttttgtttgtttgttttttaagctggggaccactgaagtaagctctgtatgcacccaaagttccccttggaaaaattttcaacacgcagtgcagaaggctccagtgcagctaaatgccacaccattggttctacctgggggaatagactgatttgccctaaaatgactccaacctgcatcattaaggtacagttggctccagtggattagtgctgaaatgatgggaagtctgacacttgttgacattgtcttcatctgtttggaagggttgaatctgttcctctcaacagtgatagttcttttcactgtatagtattgagtatgtctcagggattccttgtggaaattagggcagtttttaaaataagaaaatagttttaaaagaaactaaaggtgactcatcattgaagagagcggaagaaagaggaaacatttggttttgtagcccacagtgtcttgcataggactttttcctttctcctccaggctctcatctcagcttcagaatacagaatcctttcccatcacgcacagctttaaaacttttatttaaaaatttccttccccaatgagctttcagaatacttattgtagattttaagagaaaaggtatattaatttatgctattaacatcacctcataaattataagttttatactaaagctgtatcgagtgtaatgaattatgttgcctatgtgtttaatagctaaatatatatgagcttttttttttttttttttttttgacaaaacaaactagtgaagcacctttttacactggatctctgccgtgtcaaggtgtatagctatcctttgctaccttgcagatatataaaataaaaggatatcctggggcctcaaaatgtagaacacctttagaccatttataactgttcctagaactgttgagaatcatgttctttagtaaatgatctgtggtttacacttaagatggctagaagcttagttacagggtacatagaaatacatagatcaagtaaaactccaactactgtagctggaatttgtaaactaagtttgtaagacctcttttatttcctatggagttattctttaatttacagtttattctgtaagttgggaagtaaaatagagaaaataataaatctagatgttctcagtgtcttattcaggaactttttatccctcctcactaaggaattcccactgtgactttaaaatagaactaaattacttgtgtgcatgtatatgtctgtattttttacacacatgcaaaaatatacattgggggcacgtgtgtgagagatatgaatgtgtgcttatataaaaatagataaaggtaaccgaatgtattgtagaaacatgatttatttagttgagggtattggagttactttctcattgtctctgttgtataaatacaccaaattaatcattatgttatcttatgttaaaaggctagctctgatatcatgtgcattttatgttaacctttggattaacttatattatgctatgttcataaaatgacatgagaaacaggaggttctaagatcagcctctcactttcgagcataaaaataagagagggagacagacagccccagacatgagctgtgtttatctattgtggtgatgggaccacagatctattgaatcttttttatgttaattatagatttctttatattcgagtaagaaaatattgttgatcatcttttcttggtgaagttaagaaaaagtataggcctttcataaacaatttttggaaggggctgctttgtttaaggagttggtgggatcatttcaccgtgcatatttcaaagctggggtgatttcatttatttccaaaatttttcaaaaaacttttactcagttctgctgttatttattaacttaagagtgctcccatccccatatttcagctataggaaaattgtgctacccctgattcatatggaattaaaaaaaaatacatccctttattttgagttttaagttgttattttgctatacatttattactggagtatctggtggtctgaaatagtcaaaagtagagttggtattaaatgttccaatgacatttatttttaatacttaaaaaatcatgtactttgaaatatgtcaaagcaacttctgataatatacctgaatttgtagttgtctcttgagcatcatttacttcatcttagatatagtgaagatctaggaaagctctatatgctgttcttttctacagttgtatttttgcagcatctcctggtttcattcactcttgttttgggatttttttttagatctgcatatttcttgtacatatgcatgcaaatgaaagaagggagtttgtactggtgccatttctcccttcagttgctggttaatgggatttgctagaaaaaattctcccggttgaagggtgaaaacagacccttatgtgtatatctgtacagagatgtgtatatgggatgtggtggcactttgctgaatgtgaacttgccttgtcaatggaaagattgaaaagtattatgtttatttatacatttgtataaatctatatatacacgtatgtatatgtgtgtgtatagataaagctatatacatatatttcccttaaaaatgtgtgtgtataataggtaaacagcctttgttaagcaagattaatgtctatggaaagttctggattattctgtaagccagaggaggtgacagtctagagtacatcatcagaacatactaaaatggaagtcctttggattatagttttgtttatggatattacacaatgaatgcttgtctgaacagttcttacttgccagttccactattcttcatcttcaccaccttctactggtcagtctttcatcacttaaaaaaaaaaaaaaaatcacacatcattgtggtttttttcccccttaattctgtctcttctagccagaagcatctggcttaagcatatttcatcaacttctctgttatttcttttaaagatctttatctctgaaattttcccagaagatacaagttttggtaatattatcaataggaattttgagacttgggcattcatctttgtctcaaaaacaaacagaaagccaaccttcaaataaaacaaatttgaaagttttagctcaataatttggggacattttacttaaattacaaaagaacataattatgattttatgatcgatattagtgttaggtttatttccacacttactgtcattaatttgtcatttacatatttttatttgctttgtagtttaatcataacttcaccatttacattttaatggaaagcatacaaggtcacatgttagcctcttgaattctgtaactaactcatttttctcatgatgaaactgctttgatgaattcctgtgtgatgaattctgctatatttccttttgacttttctcagtttgtgacattctgtattaactttgctgcagctctctagaaaacttgcatccctatatattgtgcctttaaagctcttatgcacacacagacaaaagtgtatatatacatgtcagagcatgtgtacatatgctttcgtatgtactcacacagtatgtctctagtatatattgtgggagtagatatatagatattcaaaggcaatgaaatattgctctccagatatatatgtatataaatagtgttgatataactgtatatacacatgtatatgtatgagttttaaatggcaatcttttacatttagcaaaatgctgcccctactggaatattgtcactgcagtggcagttgtatgtaatgatttaaaatacattatcaaaagttatttaaagaacatttaaagtctcatctaaagacatccacacactatttatttatcttccttttccttttattgttgtgtttttcttaactgaaagggagactgtcattttaaaaatgccatctgtcccatgagagtaagaaagagctggagattcacttgaggagctttgtgcatttttcctctctctgaagtggagatgttccacagaccagactgtttatttcacttataaagcaatcctaatatttccgttagtgtatgtcagccaccatctcctagatcaacttaattcaccaatttgcctcctcctttcattaataaataatgattattgagatcattttgcctgggggaagttaactactcccatgctgcagggaaatatatcacctaattgttattttgccttgttcaaaattcaaatttgaaagaaggcagctctctcatgaagctgtcttaagcacattttagttaagggccctcccaaactcttttttctttctttctttctttcttttttttttttttttgcgagttccaagttgcatgtgcttgaaatagatttaattcttattccccacagtttaggtatttttcattagtacatcaatttgacacactgaatgcaagactattaaggaagaacgattaaatattattttattttgtgaagagttggcagcagattacatctcaagaacttgcagagagaggaaggtagatggacaatcctaaattgtaagatgttacaaaaaacagtgaagtaagagtactcctgaagactaaaatagagaggctggggtttgagccattttactgagtagcttagctggaacctgatatcagaagtagcctttaacaaaaagcctcttggcaattgtatggtactaacaactagagtactgaagtgtaagttgaaaccaagttgcagtgggaaatcaaaggtgaggtagcttatttgaaaccagcaaatgagacaggttggacagttttaaaatctcttctaacaaagaaactgcacggtagcaaggactagcggttctcaaagcccttctttttcagtgttctcattcaccttggcacccaagtatgtttaacaggccatgcattaaaaataaatacaaaaatataaaagccgcttaaagggaacttacaaactgacaatctctcctctgtatttgtgttcatagtggctgggagtttaattatatgcacaaaagttaggagccacttgtttctgcacagactgtaggagcaagatgaggagatgggcaggttttggtaagagcccccagttctggtggacaggcatacttgtggcattgggtgcggcattgctgggaggaccacgtcttgggaggcgattgacttttggtttgtaatttccctttaaacaagaagagatggctcacattttccatatatatctcaatgaatgtactgtattactgttttaaaaatttgatgaaataataatgaattggtctccttttgttatctggtccttgtttaatttgtttaagggtttttgtatacaaaagtttacatttttatgtatatttttcttgtgtaaaaactgatgtaatatgtgtatgaaacactgtatgtattatctgtatatagtgtgacaaaatcatttttctttctttcttttggatgtattaataaatcttgctgtgaagta

SEQ ID NO: 194874 - DNA, 753 bp, Artificial Sequence
  derived and/or modified sequence
ctggcccccctttgctctgcctccaagatggtaggaaagttgtcgtttcggagggcagaggagcagctctctggtgttatgtcctcgcagtgcctgtagtggtgctgtaggaggctgctgcctcttcttgtacagccccggcagccctgccttcttggctggagagtatattcagggatttccccttaataatcaccgaccctgggagcactttttagtttccaaaataaaaatatgatcctcacccctcttgcttgacagggaaaggctctcgccggagcccaggggggagcagtagcagcggcagccgagcttcctagtccattgccagcgcctctcactctgatctgtcagcccagccgagggaacaggggggaaggagaaaaaaaaaagcagctgaaagatcttcactctcacccaggctggagtccagaggtgtgatctcggctcactgcaacctctgtcttccgggttcaagtgattctcctgcctcagcctcccaagtggctgggattacagacaatctgcttcatcctgattctgcggcattccaaactgtggtatccttgggggttctcttaacattgctatggtgcagaagatttaaaatcagctgatgttcacaaggaatagagtcacgtgatgtatgaagggaaacatatacacttctctgaggttgacaataagcccttgtgctcatatagccccaaactgtgcaagcagaggcgactcaacggctacgccttctgtatc

SEQ ID NO: 194875 - DNA, 3084 bp, Artificial Sequence
  derived and/or modified sequence
atgtacgaagggaagcatattcatttctccgaagtggacaacaagccattatgctcgtattcacctaaactatgcaaacaaaggagactaaatggttacgcattctgtattcggcatgttttagaagacaagactgcccccttcaaacagtgcgagtatgtggccaaatacaactcacagcgctgtacaaatcccatccctaaatcagaagacaggaggtattgcaattcgcacttgcaggtgctgggctttattcccaaaaaggaacgcaaaaaaaagaatgacccaatcgatgaagtgaaagtgagacaccagatggacacgatggccttttctctgaccgtacctacgttggcactgaagatgccgaacggccttgatggcatgtcattgtctcctcctggggctagagttcctcttcactacctcgaaacagagctggaagaccccttcgccttcaacgaagaggacgatgacctgaaaaaaggcgcaaccgtcaggaagaaactgcaatcaaaactcgcacagaaccgacagcgtcagcgcgagaccgagatcctcaaggtgaggcaggagcacttcagccctccacccgcaccgtcccagcagcagccccctcagcagcattcacatctgagtccattatctacctctctgaaaccaccggctcccccccagggcagtgtttgtaaaagccctcaacctcagaacactagcttgccaatgcaaggtgtggctcccacgacccacacaatcgcacaagcccgtcaactgtctcacaagaggccactcccgttgctaccgtctagcagggcccccaccgtagaccctccacgaacagataggattttgatgaaggccacagctttctctccgcatttcagttgcatttcccggctgcaacgccttgtcaaattatgcacccaaaagcaccaacttgacactgatctcttcccacatcttggtttggactggtccgaagagtctggggaagaaccagaagattctgagcaggccagcccttatcaagtggcctggtcaatacgggagaccctgagataccagagacacgctagcgatgatgacgatgctgaatcccggtcatccagggtcacccagctttgcacatattttcagcagaagtacaagcacctgtgcaggctggagagggctgagtcaagacagaagaaatgtcgccacacatttagaaaagccctgctgcaggcagccagcaaagagcctgagtgcaccggacagctcatccaagaactgcgccgcgcggcgtgttcaagaacgtccataagtaggaccaagttgagagaagtagagcctgcagcctgtagcggcacggttaaaggggagcagtgcgcgaacaaagctttgccctttacgcgacactgcttccagcatattttactgaatcattcacagcagctattctcaagttgcaccgctaagttcgccgatggtcagcaatgtagtgtgcccgtgtttgacattactcatcagacccctctctgtgaagagcatgctaaaaagatggataacttccttagaggtgacaactccaggaaggtgcagcaccagcagcaacggaagcctcggaagaaaaccaaacctcccgcactgactaagaaacataaaaaaaaacgtagaaggggaccccgtcgaccccaaaaaccaattcccccagccgtgccacagggcaatttgtcaatgccagcatcagtgagcttacccgtcgaggcgtctcatattagatcaccttctactcctgagctttcagccgacgagttacccgatgacatcgccaacgaaattacggatatccctcacgatctggagcttaaccaagaagacttctccgatgttttaccccggctgcccgatgacctgcaggactttgattttttcgaaggaaagaatggtgacctactaccaacgactgaggaggccgaagagctggagcgagccttgcaggccgtcactagcctggagtgcctctccaccatcggggttctggcccaatcggatggtgtacctgtccaagagctgtctgatcgcgggattggcgttttcagcacagggaccggtgcgagcggtatccaatccctatctagggaggtgaacaccgatttgggggaactcctcaacggaaggatagtccatgataacttcagctcgctagagctggatgaaaacctgcttagatccgccacactctcaaacccacctacccccctcgccgggcaaattcagggacagttttccgcacctgcgaacgtcgggctcacctccgctactctcatttcgcagagcgcccttggcgaacgcgcattccctggccagttccacgggctccacgatggcagccatgccagtcagcgcccccacccagctcagctcctctccaaggccgacgacctgataacctcgaggcagcagtacagctccgatcattcacactcctcaccccacggctcccattacgactcagaacatgtacccagcccttattccgatcacataacatctccacacaccacttcctactcaggggataatatggcggctacttttagcgctgaaatgcccattatggcacagcatctcttgcctacacagctggaagtgccccttggcggcgtggtgaaccccagaactcactggggcaatctgcccgtcaatctgggagatccatcacccttttcaaacctcctcggagctgatggccatttgctgagcacctccctgtccacaccacccacaactagcaactctgagactacgcagcccgcgtttgccaccgtgacaccctcctccagctccgtgctgcctgggcttccacagactagcttctccggcatgggaccttcggcagagctgatggcctccacatcccctaagcagcagctcccccagtttagcgccgctttcggccaccaactgtcatcacactcaggtataccaaaggatctgcaaccttcccacagtagcattgctcctccaacagggttcactgtcaccggagctacggctaccagcaccaacaatgcttcgtccccatttccaagccccaactag

SEQ ID NO: 194876 - DNA, 114 bp, Artificial Sequence
  derived and/or modified sequence
atgtacgagggtaagcacatacattttagcgaagtagacaataagcccctgtgttcttacagccccaagttgtgcaagcagcggcggctgaacggatatgcattttgcatctag

SEQ ID NO: 194877 - DNA, 3084 bp, Artificial Sequence
  derived and/or modified sequence
atgtatgagggcaagcacatccacttcagcgaggtggacaacaagcccctgtgcagctacagccccaagctgtgcaagcagaggcggctgaatggctacgccttctgcatcagacatgtgctggaggacaagacagcccccttcaagcagtgtgaatatgtggccaagtacaacagccagcgctgcaccaaccccatccccaagtctgaggaccggcgctactgcaacagccacctgcaggtgctgggcttcatccccaagaaggagaggaagaagaagaatgaccccattgatgaggtgaaggtgcgccaccagatggacaccatggccttcagcctgactgtgcccaccctggccctgaagatgcccaacggcctggatggcatgagcctgagccccccaggggcccgggtgcccctgcactacctggagacagagctggaggacccctttgccttcaatgaggaggatgatgacctgaagaagggggccaccgtgaggaagaagctgcagagcaagctggcccagaaccggcagaggcagcgggagacagagatcctgaaggtgcggcaggagcacttcagccccccaccagcccccagccagcagcagcccccccagcagcacagccacctgagccccctgagcaccagcctgaagcccccagccccaccccagggctctgtgtgcaagagcccccagccccagaacaccagcctgcccatgcagggcgtggcccccaccacccacaccatcgcccaggcccggcagctgagccacaagaggcccctgcccctgctgcccagcagccgggcccccaccgtggacccccccaggacagaccgcatcctgatgaaggccacagccttcagcccccacttcagctgcatcagccggctgcagaggctggtgaagctgtgcacccagaagcaccagctggacacagacctcttcccccacctgggcctggactggagcgaggagagcggggaggagcctgaggacagcgagcaggccagcccctaccaggtggcctggagcatccgggagaccctgcgctaccagagacatgccagtgatgatgatgatgctgagagccgcagcagccgggtgacccagctgtgcacctacttccagcagaagtacaagcacctgtgccgcctggagagagctgagagccggcagaagaagtgccgccacaccttcaggaaggccctgctgcaggccgccagcaaggagccagaatgtacaggccagctgatccaggagctgcggcgggccgcctgcagcaggaccagcatcagcaggaccaagctgcgggaggtggagcctgctgcctgcagcggcaccgtgaagggggagcagtgtgccaacaaggccctgcccttcaccaggcactgcttccagcacatcctgctgaaccacagccagcagctgttcagcagctgcacagccaagtttgctgatggccagcagtgcagcgtgcctgtgtttgacatcacccaccagacccccctgtgtgaggagcacgccaagaagatggacaacttcctgcggggggacaacagcaggaaggtgcagcaccagcagcagaggaagcccaggaagaagaccaagcccccagccctgaccaagaagcacaagaagaagagaagaagaggcccccggcggccccagaagcccatccccccagctgtgccccagggcaacctgtccatgcctgcctctgtgtccctgcctgtggaggccagccacatccgcagccccagcaccccagagctgtctgcagatgagctgcctgatgacatcgccaatgagatcacagacatcccccatgacctggagctgaaccaggaggacttcagtgatgtgctgccccggctgcctgatgacctgcaggactttgacttctttgagggcaagaatggagacctgctgcccaccacagaggaggccgaggagctggagcgggccctgcaggccgtgaccagcctggagtgcctgagcaccatcggcgtgctggcccagagtgatggagtgcctgtgcaggagctgagtgaccggggcatcggggtcttcagcactggaactggagccagcggcatccagagcctgagccgggaggtgaacacagacctgggggagctgctgaatggaagaattgtgcatgacaacttcagcagcctggagctggatgagaacctgctgcggagcgccaccctgagcaacccccccacccccctggccggccagatccagggccagttcagcgccccagccaacgtgggcctgaccagcgccaccctcatcagccagagcgccctgggggagcgggccttccctggccagttccacggcctgcatgatggcagccacgccagccagaggccccacccagcccagctgctgagcaaggcagatgacctgatcaccagccggcagcagtacagcagtgaccacagccacagcagcccccacggcagccactatgacagcgagcacgtgcccagcccctacagcgaccacatcaccagcccccacaccaccagctacagcggggacaacatggccgccaccttctctgctgagatgcccatcatggcccagcacctgctgcccacccagctggaggtgcccctgggcggcgtggtgaaccccaggacccactggggcaacctgcctgtgaacctgggggaccccagccccttcagcaacctgctgggcgcagatggccacctgctgagcaccagcctgagcaccccacccaccaccagcaacagcgagaccacccagcctgcctttgccaccgtgacccccagcagcagctctgtgctgcccggcctgccccagaccagcttcagcggcatgggccccagcgctgagctgatggccagcaccagccccaagcagcagctgccccagttctctgctgccttcggccaccagctgagcagccacagcggcatccccaaggacctgcagcccagccacagcagcatcgccccacccaccggcttcaccgtgactggagccacagccaccagcaccaacaatgccagcagccccttccccagccccaactag

SEQ ID NO: 194878 - DNA, 114 bp, Artificial Sequence
  derived and/or modified sequence
atgtatgagggcaagcacatccacttcagcgaggtggacaacaagcccctgtgcagctacagccccaagctgtgcaagcagaggcggctgaatggctacgccttctgcatctag

SEQ ID NO: 194879 - DNA, 3084 bp, Artificial Sequence
  derived and/or modified sequence
atgtacgagggcaagcacatccacttcagcgaggtggacaacaagccattgtgctcatactcacccaaactgtgtaaacagcgcagactgaacggttacgcgttctgtatcaggcacgttctggaggataaaacggcacccttcaaacagtgtgaatacgttgctaagtacaactctcaacgatgtaccaacccaataccaaaaagtgaggaccggaggtactgcaactcgcacctacaagtgctgggctttatccctaagaaggagaggaagaagaagaatgatcccatagacgaagtgaaagtacgacaccagatggacacaatggcgttttcgttgactgttccaactctggccctgaagatgcctaatggcctggacgggatgagtctctctcctcctggcgctagggtgcccctacattatctggagaccgaactcgaggacccattcgcctttaatgaggaggacgatgatctcaagaagggtgctaccgttcgtaaaaaactgcaaagcaagttagcccagaataggcagaggcaacgagaaaccgagatacttaaagtgaggcaggagcacttcagcccccctccggctccaagtcaacagcaacctccacaacagcactcacatctgtcccccctctctacctccctgaagccacctgcgcctccacagggaagcgtgtgcaagtcaccacagccccagaacacatcccttcctatgcagggcgttgcgcctacaacccatacaatcgcccaggcccggcagctttcacacaagagaccccttccgctgcttccctcatcacgggcacccactgtggatcctccccgaacggatcggattctcatgaaggcgaccgccttcagcccccatttctcatgtatatccagacttcagcggctcgtgaagctgtgtactcagaaacaccagcttgataccgatctgttcccgcacttgggtctggactggagcgaggaatccggagaggagcccgaagacagcgaacaggcaagtccctatcaggttgcttggagtatccgcgagacactgcgttaccagagacatgcaagcgatgacgatgatgcggagagtaggtcttcacgcgtaacccagctgtgtacatatttccagcagaaatacaagcacctatgccggctcgaacgggccgagtcccggcagaagaagtgcagacacacattcagaaaggctctgctacaggccgctagcaaagaacccgaatgcaccgggcagctgattcaggagcttaggagggccgcgtgctctagaacatccatttctcgtacgaaactgcgagaggtggagccggctgcctgctccggtacagtgaagggcgagcagtgcgctaataaggccctgcccttcacccggcattgctttcagcacatcctcttgaaccattctcaacagctgttttcttcgtgtaccgctaagtttgctgacggccagcagtgtagcgtgccagtgtttgatattacccatcaaactccgctatgcgaagagcacgcaaaaaagatggacaacttcctacgcggagataacagcaggaaagttcaacaccagcagcagagaaagccacggaagaagaccaaaccaccagctctcactaagaagcataagaagaagcggcgaagaggcccaaggagacctcagaagcccatccccccagctgtgccacagggtaacctctcaatgcccgcctcagtttccctgccagtcgaggcttcccatatccggtctccttccaccccggagctctctgctgacgaactcccggacgacattgccaacgaaataactgatatcccccatgatctggagcttaaccaggaggatttttccgacgtgttaccccgtctaccggacgatctgcaagacttcgattttttcgaaggcaaaaatggggacttacttccgactaccgaggaggccgaagagctagagcgtgccctgcaggccgtaacgtctctggaatgcctgtccaccattggcgttttagcacagtctgatggggtacccgtccaagagctgagcgacagagggatcggggtattctcaaccgggaccggcgcctcaggcatccaatctctgagcagggaggtcaacactgatttgggcgaactattgaacggaaggattgtgcacgacaattttagctctttggaactcgacgagaatctcctgcggtcagccaccctctccaatccccctacccctctggcgggacagatacaaggacaattttcagcaccggcgaacgtgggtctgacaagtgccaccctcatttcccagtcagccctgggtgagagggccttccccgggcagttccatggactgcacgatggatcccacgctagtcagaggcctcatcccgcccagctcctgtccaaagcagatgatctgatcacaagtaggcagcaatatagttctgaccatagccattcctctcctcatggttcccactacgattccgagcatgtgccctctccatacagcgatcacatcacctccccccataccacatcatattcgggtgacaacatggctgctaccttctctgcagaaatgcccattatggcacagcatcttcttcctacgcagctcgaggttccgttaggtggggtggtcaatccacggacacattggggtaacttgcctgttaacctaggcgatccatcgccatttagtaacctgctgggggcagatggccatctgttaagtacctccttgtctactccccctacaacgtccaactcggagactacccagcctgctttcgccaccgtgactccaagctcttcaagcgtgttgccaggactcccacagacgtcattctcgggtatggggcctagcgctgagctgatggcttcaacatcaccaaagcaacagttgccacagttttccgctgccttcggacaccagctctcctcacattccggcatccctaaggatctgcagccgtcgcacagttcaattgcgccccctactggtttcacggttacaggggctaccgctactagcaccaataacgctagttcaccgtttccgtcaccgaattag

SEQ ID NO: 194880 - DNA, 114 bp, Artificial Sequence
  derived and/or modified sequence
atgtacgagggcaagcacatccacttcagcgaggtggacaacaagcctctgtgcagctacagcccaaaactgtgcaagcaaagacgtctgaacgggtacgccttctgtatctag

SEQ ID NO: 194881 - DNA, 3084 bp, Artificial Sequence
  derived and/or modified sequence
atgtatgagggcaaacacattcacttctccgaggtcgataataagccattgtgcagttattcacctaagctgtgcaagcagcggcgtttgaatgggtacgccttttgcatcagacacgtgctggaggacaagacggccccttttaagcaatgcgaatatgttgcaaaatacaattcgcagaggtgcactaaccccatcccaaagagcgaagaccgcagatattgcaactcccacctccaggtgcttggctttataccaaagaaggagaggaaaaaaaagaatgatcccatcgacgaggtcaaagtgcggcaccagatggatacaatggctttctccttgactgtgcctaccctggccctgaagatgccaaacggtctcgacggtatgtccctgagccctccaggcgcacgcgtccccctacactacttggaaaccgagctggaggaccccttcgcatttaacgaggaagacgatgatctgaaaaaaggagcgacagttcgtaagaaacttcagtctaaactggcccagaatcgccaacggcagcgagaaaccgagatactaaaggtcaggcaggaacacttttcccctcctccagcgcctagtcaacagcagcctcctcagcaacattcgcatttaagccctttatccacctccctaaagccacccgcaccccctcaaggcagtgtttgtaagtcaccacagccacagaacacttccctccccatgcagggcgtggctccaacaacgcatacgattgcacaagccagacaactgtcacataagcggccactgcctttattaccctccagcagagctcccacagttgatcccccaaggacagatagaatcctgatgaaggcaactgcctttagtccgcacttctcctgcatcagccgccttcaaaggttggtaaagttgtgcactcaaaagcaccaattagacactgaccttttcccacacctcggattggattggagtgaggagtctggagaagagcccgaggacagcgagcaggccagcccttaccaagtagcctggtcaattagggaaacccttcgctatcagcgccacgcgagcgatgacgacgacgccgaatccaggtcgtcacgggtgacacaactgtgtacgtactttcaacagaagtacaagcacctgtgcaggctcgagcgggctgagtcaaggcagaagaaatgtcgtcatacatttcggaaggccctgctccaggcagcatctaaggagccagagtgtaccggtcagctcatacaggaactgcgtagggccgcatgcagccggacatcaataagcagaactaagctgcgtgaggtagagccagccgcttgcagcggaaccgtcaagggggaacagtgcgcaaacaaggcattacctttcacccgccattgtttccagcacatcttgcttaaccactcacaacagttattttcctcctgtactgcaaaattcgccgatggacagcagtgttcagttccagtgtttgatattacccaccagacccccctgtgtgaggagcatgcaaagaagatggacaactttcttaggggagacaactcccgtaaagtgcagcatcaacagcaaagaaagcccaggaaaaagacgaaaccacctgccctgacaaaaaagcacaagaaaaaacgtcgtcgtgggccacgaagaccccagaaacctattccacctgcagtgcctcaagggaatctttcaatgcccgcaagtgtttctctgccggtggaggcatcacatatcagaagtcccagcacacctgagctgagtgccgacgaactcccagacgacatcgctaacgaaattaccgacatccctcatgatctagaattgaaccaggaggactttagtgatgtcctccccagactgcccgatgacctgcaggactttgatttcttcgaagggaagaatggcgacctgctccctaccacagaggaggctgaagaactggaacgggcactgcaggccgtcactagccttgagtgtctaagcaccatcggggtcctggcacagtccgacggcgtccccgtgcaggaactgtcggacagaggcatcggggtcttcagtaccgggactggtgcctcgggaattcagtcattatccagggaggtcaacactgacctaggcgaactcctgaatgggcgaattgtccacgacaattttagtagcctggaactggatgagaatctactcaggtccgctacattgagcaacccgccaacacccctggccggacaaatccaggggcagttctcagcccctgctaacgtcgggctaactagtgcaacattgatttctcagtctgccctaggtgagagggccttccccggacagtttcatggcctgcatgatggctcccacgcatcgcagcgaccccaccctgcacagttactctccaaggccgacgacctcataacgtccagacagcagtacagttccgatcactctcattcgtcaccacatggatcacactacgatagtgagcacgttccaagcccctacagtgaccatataaccagccctcacaccactagttactccggggacaatatggccgctacctttagcgcggagatgccaattatggcacagcatctgttgcccacccagcttgaggtgccactggggggagtcgtgaatccacgtacccattggggcaatcttcctgtgaatttaggcgacccaagccccttctctaatctgctcggggctgatggccatttgctatctaccagcctgtctacacctccaaccacaagcaacagtgagacaacacagcccgcattcgctacagtcacccctagtagctcaagtgtcctgcccggactcccccagacttccttctccggcatgggaccatccgccgagctgatggcctccacctcccccaaacagcagctccctcagttttccgccgcattcgggcaccagctttcatctcatagcggcatcccaaaggacctccagcccagccactcttccattgcaccccctaccggattcaccgtgacaggtgcaaccgccacgtcaacaaataacgcctcttctcctttcccctcccccaactag

SEQ ID NO: 194882 - DNA, 114 bp, Artificial Sequence
  derived and/or modified sequence
atgtacgaaggcaagcacattcacttctccgaggttgataacaagccactctgcagctactcacccaaactgtgtaaacagaggcgtttgaacggctatgcattctgcatctag

SEQ ID NO: 194883 - DNA, 3084 bp, Artificial Sequence
  derived and/or modified sequence
atgtacgagggcaagcacatccacttcagcgaggtggacaacaagcccctgtgcagctacagccccaagctgtgcaagcagagaagactgaacggctacgccttctgcatcagacacgtgctggaggacaagaccgcccccttcaagcagtgcgagtacgtggccaagtacaacagccagagatgcaccaaccccatccccaagagcgaggacagaagatactgcaacagccacctgcaggtgctgggcttcatccccaagaaggagagaaagaagaagaacgaccccatcgacgaggtgaaggtgagacaccagatggacaccatggccttcagcctgaccgtgcccaccctggccctgaagatgcccaacggcctggacggcatgagcctgagcccccccggcgccagagtgcccctgcactacctggagaccgagctggaggaccccttcgccttcaacgaggaggacgacgacctgaagaagggcgccaccgtgagaaagaagctgcagagcaagctggcccagaacagacagagacagagagagaccgagatcctgaaggtgagacaggagcacttcagccccccccccgcccccagccagcagcagcccccccagcagcacagccacctgagccccctgagcaccagcctgaagccccccgcccccccccagggcagcgtgtgcaagagcccccagccccagaacaccagcctgcccatgcagggcgtggcccccaccacccacaccatcgcccaggccagacagctgagccacaagagacccctgcccctgctgcccagcagcagagcccccaccgtggacccccccagaaccgacagaatcctgatgaaggccaccgccttcagcccccacttcagctgcatcagcagactgcagagactggtgaagctgtgcacccagaagcaccagctggacaccgacctgttcccccacctgggcctggactggagcgaggagagcggcgaggagcccgaggacagcgagcaggccagcccctaccaggtggcctggagcatcagagagaccctgagataccagagacacgccagcgacgacgacgacgccgagagcagaagcagcagagtgacccagctgtgcacctacttccagcagaagtacaagcacctgtgcagactggagagagccgagagcagacagaagaagtgcagacacaccttcagaaaggccctgctgcaggccgccagcaaggagcccgagtgcaccggccagctgatccaggagctgagaagagccgcctgcagcagaaccagcatcagcagaaccaagctgagagaggtggagcccgccgcctgcagcggcaccgtgaagggcgagcagtgcgccaacaaggccctgcccttcaccagacactgcttccagcacatcctgctgaaccacagccagcagctgttcagcagctgcaccgccaagttcgccgacggccagcagtgcagcgtgcccgtgttcgacatcacccaccagacccccctgtgcgaggagcacgccaagaagatggacaacttcctgagaggcgacaacagcagaaaggtgcagcaccagcagcagagaaagcccagaaagaagaccaagccccccgccctgaccaagaagcacaagaagaagagaagaagaggccccagaagaccccagaagcccatcccccccgccgtgccccagggcaacctgagcatgcccgccagcgtgagcctgcccgtggaggccagccacatcagaagccccagcacccccgagctgagcgccgacgagctgcccgacgacatcgccaacgagatcaccgacatcccccacgacctggagctgaaccaggaggacttcagcgacgtgctgcccagactgcccgacgacctgcaggacttcgacttcttcgagggcaagaacggcgacctgctgcccaccaccgaggaggccgaggagctggagagagccctgcaggccgtgaccagcctggagtgcctgagcaccatcggcgtgctggcccagagcgacggcgtgcccgtgcaggagctgagcgacagaggcatcggcgtgttcagcaccggcaccggcgccagcggcatccagagcctgagcagagaggtgaacaccgacctgggcgagctgctgaacggcagaatcgtgcacgacaacttcagcagcctggagctggacgagaacctgctgagaagcgccaccctgagcaacccccccacccccctggccggccagatccagggccagttcagcgcccccgccaacgtgggcctgaccagcgccaccctgatcagccagagcgccctgggcgagagagccttccccggccagttccacggcctgcacgacggcagccacgccagccagagaccccaccccgcccagctgctgagcaaggccgacgacctgatcaccagcagacagcagtacagcagcgaccacagccacagcagcccccacggcagccactacgacagcgagcacgtgcccagcccctacagcgaccacatcaccagcccccacaccaccagctacagcggcgacaacatggccgccaccttcagcgccgagatgcccatcatggcccagcacctgctgcccacccagctggaggtgcccctgggcggcgtggtgaaccccagaacccactggggcaacctgcccgtgaacctgggcgaccccagccccttcagcaacctgctgggcgccgacggccacctgctgagcaccagcctgagcaccccccccaccaccagcaacagcgagaccacccagcccgccttcgccaccgtgacccccagcagcagcagcgtgctgcccggcctgccccagaccagcttcagcggcatgggccccagcgccgagctgatggccagcaccagccccaagcagcagctgccccagttcagcgccgccttcggccaccagctgagcagccacagcggcatccccaaggacctgcagcccagccacagcagcatcgccccccccaccggcttcaccgtgaccggcgccaccgccaccagcaccaacaacgccagcagccccttccccagccccaactag

SEQ ID NO: 194884 - DNA, 114 bp, Artificial Sequence
  derived and/or modified sequence
atgtacgagggcaagcacatccacttcagcgaggtggacaacaagcccctgtgcagctacagccccaagctgtgcaagcagagaagactgaacggctacgccttctgcatctag

SEQ ID NO: 194885 - DNA, 2637 bp, Artificial Sequence
  derived and/or modified sequence
atgtacgagggcaagcacatccacttcagcgaggtggacaacaagcccctgtgcagctacagccccaagctgtgcaagcagagaagactgaacggctacgccttctgcatcagacacgtgctggaggacaagaccgcccccttcaagcagtgcgagtacgtggccaagtacaacagccagagatgcaccaaccccatccccaagagcgaggacagaagatactgcaacagccacctgcaggtgctgggcttcatccccaagaaggagagaaagaagaagaacgaccccatcgacgaggtgaaggtgagacaccagatggacaccatggccttcagcctgaccgtgcccaccctggccctgaagatgcccaacggcctggacggcatgagcctgagcccccccggcgccagagtgcccctgcactacctggagaccgagctggaggaccccttcgccttcaacgaggaggacgacgacctgaagaagggcgccaccgtgagaaagaagctgcagagcaagctggcccagaacagacagagacagagagagaccgagatcctgaaggtgagacaggagcacttcagccccccccccgcccccagccagcagcagcccccccagcagcacagccacctgagccccctgagcaccagcctgaagccccccgcccccccccagggcagcgtgtgcaagagcccccagccccagaacaccagcctgcccatgcagggcgtggcccccaccacccacaccatcgcccaggccagacagctgagccacaagagacccctgcccctgctgcccagcagcagagcccccaccgtggacccccccagaaccgacagaatcctgatgaaggccaccgccttcagcccccacttcagctgcatcagcagactgcagagactggtgaagctgtgcacccagaagcaccagctggacaccgacctgttcccccacctgggcctggactggagcgaggagagcggcgaggagcccgaggacagcgagcaggccagcccctaccaggtggcctggagcatcagagagaccctgagataccagagacacgccagcgacgacgacgacgccgagagcagaagcagcagagtgacccagctgtgcacctacttccagcagaagtacaagcacctgtgcagactggagagagccgagagcagacagaagaagtgcagacacaccttcagaaaggccctgctgcaggccgccagcaaggagcccgagtgcaccggccagctgatccaggagctgagaagagccgcctgcagcagaaccagcatcagcagaaccaagctgagagaggtggagcccgccgcctgcagcggcaccgtgaagggcgagcagtgcgccaacaaggccctgcccttcaccagacactgcttccagcacatcctgctgaaccacagccagcagctgttcagcagctgcaccgccaagttcgccgacggccagcagtgcagcgtgcccgtgttcgacatcacccaccagacccccctgtgcgaggagcacgccaagaagatggacaacttcctgagaggcgacaacagcagaaaggtgcagcaccagcagcagagaaagcccagaaagaagaccaagccccccgccctgaccaagaagcacaagaagaagagaagaagaggccccagaagaccccagaagcccatcccccccgccgtgccccagggcaacctgagcatgcccgccagcgtgagcctgcccgtggaggccagccacatcagaagccccagcacccccgagctgagcgccgacgagctgcccgacgacatcgccaacgagatcaccgacatcccccacgacctggagctgaaccaggaggacttcagcgacgtgctgcccagactgcccgacgacctgcaggacttcgacttcttcgagggcaagaacggcgacctgctgcccaccaccgaggaggccgaggagctggagagagccctgcaggccgtgaccagcctggagtgcctgagcaccatcggcgtgctggcccagagcgacggcgtgcccgtgcaggagctgagcgacagaggcatcggcgtgttcagcaccggcaccggcgccagcggcatccagagcctgagcagagaggtgaacaccgacctgggcgagctgctgaacggcagaatcgtgcacgacaacttcagcagcctggagctggacgagaacctgctgagaagcgccaccctgagcaacccccccacccccctggccggccagatccagggccagttcagcgcccccgccaacgtgggcctgaccagcgccaccctgatcagccagagcgccctgggcgagagagccttccccggccagttccacggcctgcacgacggcagccacgccagccagagaccccaccccgcccagctgctgagcaaggccgacgacctgatcaccagcagacagcagtacagcagcgaccacagccacagcagcccccacggcagccactacgacagcgagcacgtgcccagcccctacagcgaccacatcaccagcccccacaccaccagctacagcggcgacaacatggccgcccccgtgtgcttcagaggctaccacagacccgccagcgtggcctggggcctgctgctgaactag

SEQ ID NO: 194886 - DNA, 2637 bp, Artificial Sequence
  derived and/or modified sequence
atgtacgaaggcaagcacatacacttctcagaggtggataataagcccctgtgcagctactctccaaaactgtgcaagcagcggagactgaatggctacgctttctgcattcgtcatgtgctggaggataagactgcaccctttaaacagtgcgagtatgtggccaagtataacagtcagaggtgcaccaatcctatccctaagtctgaggataggcggtactgcaactctcacctccaggtcctcggctttattcctaagaaggaacgcaagaagaaaaatgatccaattgacgaggtgaaagtccgacaccaaatggacactatggctttttccctgactgtcccgaccctggccctgaagatgccaaatggtcttgacgggatgtccctgtccccccctggcgctcgggtgcctttgcactatcttgagactgaactcgaggaccccttcgcgttcaatgaggaagatgacgacttgaaaaagggcgccactgttcgaaaaaagttacagtccaaactcgcgcagaacaggcaaaggcaaagagagacagagattttgaaagttaggcaggaacatttttcacctcctccagccccctcccagcaacagccccctcagcagcattcacacctttcacctctgagcacgagcttaaaacctccagcccccccgcagggctccgtgtgcaaatccccccagccccaaaacacctccctgcccatgcagggcgttgcacccacaacacacaccatcgcacaggctagacaactcagtcacaaacgtcccctccccctcctcccctcttcccgcgcacctaccgtggatcctcccaggaccgaccggattctgatgaaggcgaccgcgttcagcccccactttagttgcatctcgcgacttcagcgattggtcaaattgtgcacgcagaaacaccagctcgacaccgatctatttcctcatctgggacttgattggagcgaggagagcggcgaggaacccgaggattccgaacaggcatcgccctaccaagttgcatggtctatccgggaaactttacgctatcagcgtcacgcgtcagatgatgatgacgccgaatcccggtcctctcgggttacccagctttgtacatactttcagcagaagtacaagcatctgtgtaggcttgagcgcgctgagtccaggcaaaaaaaatgtagacacactttcagaaaagccctgctgcaggctgccagcaaggagcctgagtgcaccgggcaactgatccaggagctgcggagggctgcctgttctcggaccagtatttcccggacaaaactccgcgaagtggagccagctgcctgctccggtactgtaaaaggcgagcaatgtgcaaataaggccctgccttttactagacattgttttcaacatatattgctcaaccactcccagcagctcttttcctcttgcaccgccaaattcgccgatgggcagcaatgcagcgtccccgtgtttgacatcacgcaccagacaccactgtgtgaggagcatgccaaaaaaatggataattttctccgaggagacaactcgcgtaaggtgcagcatcagcagcaaaggaagccacgtaagaagaccaagcctcctgccttaaccaaaaaacacaagaagaagaggagacgcggcccaaggcggcctcaaaagcctatccctccggccgtgccccaagggaatctatcgatgcctgcctctgtctcgctacccgttgaggcctcccacatcagatcaccttccacgcccgagctcagcgccgatgagctgcccgacgatatcgccaacgagataaccgacatccctcatgatctggaactgaaccaagaggacttcagtgacgttctcccacgactcccagatgatctacaggacttcgatttctttgaaggcaagaacggggatctcctgcctaccactgaagaagcggaagagcttgaacgagccctccaggcggtcacttcactggagtgcctgtccaccatcggagtgcttgcgcaaagcgacggggtacccgtccaggagctgagtgatcgcggaataggagtcttctccaccggcacgggcgcttccggcatccagagccttagtagagaggtaaacactgacctgggggaactcctgaacgggcgtatagtccacgataacttttccagtcttgagctggacgaaaacctcctgcgcagtgcaactctgagcaatcctcccacacccctggccgggcagatccagggtcagttctcggcccctgcgaatgttggccttacctctgctactctcatttcacagtcagctcttggtgagagagcatttcctggacaattccacggtctgcatgacggctcgcatgctagtcagcgcccccaccctgctcaacttctctccaaggccgacgaccttatcaccagccgtcagcagtacagctctgatcacagtcacagctcaccccatggctcccactatgattctgaacatgtgccctccccttacagcgaccacatcacgtcgccgcacactacctcttacagcggcgacaatatggccgcacccgtttgctttcgcggatatcacagaccggcttctgtggcctggggcctccttctgaactag

SEQ ID NO: 194887 - DNA, 2637 bp, Artificial Sequence
  derived and/or modified sequence
atgtatgagggcaagcacatccacttcagcgaggtggacaacaagcccctgtgcagctacagccccaagctgtgcaagcagaggcggctgaatggctacgccttctgcatcagacatgtgctggaggacaagacagcccccttcaagcagtgtgaatatgtggccaagtacaacagccagcgctgcaccaaccccatccccaagtctgaggaccggcgctactgcaacagccacctgcaggtgctgggcttcatccccaagaaggagaggaagaagaagaatgaccccattgatgaggtgaaggtgcgccaccagatggacaccatggccttcagcctgactgtgcccaccctggccctgaagatgcccaacggcctggatggcatgagcctgagccccccaggggcccgggtgcccctgcactacctggagacagagctggaggacccctttgccttcaatgaggaggatgatgacctgaagaagggggccaccgtgaggaagaagctgcagagcaagctggcccagaaccggcagaggcagcgggagacagagatcctgaaggtgcggcaggagcacttcagccccccaccagcccccagccagcagcagcccccccagcagcacagccacctgagccccctgagcaccagcctgaagcccccagccccaccccagggctctgtgtgcaagagcccccagccccagaacaccagcctgcccatgcagggcgtggcccccaccacccacaccatcgcccaggcccggcagctgagccacaagaggcccctgcccctgctgcccagcagccgggcccccaccgtggacccccccaggacagaccgcatcctgatgaaggccacagccttcagcccccacttcagctgcatcagccggctgcagaggctggtgaagctgtgcacccagaagcaccagctggacacagacctcttcccccacctgggcctggactggagcgaggagagcggggaggagcctgaggacagcgagcaggccagcccctaccaggtggcctggagcatccgggagaccctgcgctaccagagacatgccagtgatgatgatgatgctgagagccgcagcagccgggtgacccagctgtgcacctacttccagcagaagtacaagcacctgtgccgcctggagagagctgagagccggcagaagaagtgccgccacaccttcaggaaggccctgctgcaggccgccagcaaggagccagaatgtacaggccagctgatccaggagctgcggcgggccgcctgcagcaggaccagcatcagcaggaccaagctgcgggaggtggagcctgctgcctgcagcggcaccgtgaagggggagcagtgtgccaacaaggccctgcccttcaccaggcactgcttccagcacatcctgctgaaccacagccagcagctgttcagcagctgcacagccaagtttgctgatggccagcagtgcagcgtgcctgtgtttgacatcacccaccagacccccctgtgtgaggagcacgccaagaagatggacaacttcctgcggggggacaacagcaggaaggtgcagcaccagcagcagaggaagcccaggaagaagaccaagcccccagccctgaccaagaagcacaagaagaagagaagaagaggcccccggcggccccagaagcccatccccccagctgtgccccagggcaacctgtccatgcctgcctctgtgtccctgcctgtggaggccagccacatccgcagccccagcaccccagagctgtctgcagatgagctgcctgatgacatcgccaatgagatcacagacatcccccatgacctggagctgaaccaggaggacttcagtgatgtgctgccccggctgcctgatgacctgcaggactttgacttctttgagggcaagaatggagacctgctgcccaccacagaggaggccgaggagctggagcgggccctgcaggccgtgaccagcctggagtgcctgagcaccatcggcgtgctggcccagagtgatggagtgcctgtgcaggagctgagtgaccggggcatcggggtcttcagcactggaactggagccagcggcatccagagcctgagccgggaggtgaacacagacctgggggagctgctgaatggaagaattgtgcatgacaacttcagcagcctggagctggatgagaacctgctgcggagcgccaccctgagcaacccccccacccccctggccggccagatccagggccagttcagcgccccagccaacgtgggcctgaccagcgccaccctcatcagccagagcgccctgggggagcgggccttccctggccagttccacggcctgcatgatggcagccacgccagccagaggccccacccagcccagctgctgagcaaggcagatgacctgatcaccagccggcagcagtacagcagtgaccacagccacagcagcccccacggcagccactatgacagcgagcacgtgcccagcccctacagcgaccacatcaccagcccccacaccaccagctacagcggggacaacatggccgcccctgtgtgcttccggggctaccacaggcctgcctctgtggcctggggcctgctgctgaactag

SEQ ID NO: 194888 - DNA, 2637 bp, Artificial Sequence
  derived and/or modified sequence
atgtacgagggcaagcacatccacttcagcgaggtggacaacaagcccttatgcagctattctcccaaactgtgtaaacagcggagacttaacggatacgctttctgtatccgccacgtgttggaggacaaaaccgctccttttaaacagtgtgaatacgtggccaagtacaacagtcaacgatgtacaaatcctattcctaagagcgaagaccgaagatactgcaatagccacctgcaggtcttaggatttatccctaagaaagagcgcaagaagaagaatgatccgatcgatgaagtgaaggttaggcaccagatggataccatggctttttcactgaccgtccccaccttagctttgaagatgccaaacggattagatggtatgtccctaagcccccctggtgctagggtccctctgcactacttggaaaccgaacttgaggaccctttcgcatttaatgaagaggacgacgatctgaagaagggtgcgaccgtcagaaaaaaactgcagagcaagctcgctcaaaaccggcaacgacagcgcgagacggaaattttaaaggtgaggcaggaacacttctcgcccccccctgcacccagccagcagcagccgcctcaacagcattcccaccttagccccttgtcaacctctctgaagccaccagcccccccccagggcagcgtctgtaagtcaccccagccccagaacacgtccttacccatgcagggggtcgcccctacaacccatacaatagcccaggcacgccagctgtcacataagagaccactgcctcttcttccatcatctcgcgcccccacagttgacccaccacgcactgacaggattctgatgaaagctacagcgttttcaccccactttagctgcatatctcgtctgcagcggctggtgaagctgtgtactcagaagcatcaactagatacggatctgttcccccatcttgggctcgactggtcagaggagagcggagaggagcctgaggattccgaacaggcctcgccttaccaggttgcttggtctatccgcgaaaccctccgatatcagagacacgccagcgacgatgacgacgccgagtcacgctctagcagggtgactcagctgtgtacctatttccagcagaagtataagcatctgtgtagactggagcgcgccgagtcacgccagaaaaagtgcagacacaccttccggaaggccttactacaagccgccagcaaggagccggaatgtacaggacaactgatccaagaactccggagagctgcttgtagccggacctctatcagccgtaccaaactcagggaggttgaaccagcggcctgctctgggacagtgaagggggagcagtgcgccaataaggccctgcccttcacacggcactgtttccagcatattctgctgaaccacagtcaacaactcttttctagctgcacagcaaaatttgctgacggccagcaatgcagtgttcctgtgtttgacatcacacaccagacaccgctttgtgaggagcatgccaaaaaaatggacaattttctgaggggcgataactcacggaaggtgcaacaccaacagcagaggaagccacggaagaagacaaagccccccgctcttaccaaaaaacacaagaaaaagcggcggagaggacctcgacgccctcagaagccaatcccgccagccgtgcctcagggaaacctcagtatgccggccagcgtgtctctcccagttgaggcatctcatattaggtctccctctaccccggaactgagtgctgacgaacttcccgatgatattgccaacgagataacggacataccccatgacttggagctaaatcaggaagatttctcagacgtgctgccccggctgccagatgacctccaggacttcgattttttcgaagggaaaaatggggacctgctccctacaactgaggaggcagaggagctggaaagagcgcttcaggcggttacttccctggagtgtcttagcaccatcggtgttttagcccaaagcgacggcgtccctgtgcaagagctgagcgaccggggaatcggggtattcagtactgggactggggcatcaggcattcagtctctgagtcgcgaggttaatacagaccttggtgagctgttgaacggcagaattgtgcacgacaatttttcctctttggagctcgacgaaaacttattgcgcagcgccacgctgtcgaaccctcctactcccctggcgggccagatccagggacagttcagcgcgcctgccaatgtcgggctgacatcagctacgctgatctcgcaaagcgccctcggtgagcgtgcttttcctgggcagtttcatggcttgcacgacggtagccatgcttcccagcgtccacatcctgctcagctcctcagcaaggcagacgatctgataaccagtcggcaacaatattcgtccgatcacagccattccagcccacacggctctcactatgactctgaacacgtcccgtccccatactcagaccacattacaagccctcatactacatcctacagcggcgataacatggccgctccggtgtgtttccgcggataccataggccagcctctgtggcatgggggcttttactgaactag

SEQ ID NO: 194889 - DNA, 2637 bp, Artificial Sequence
  derived and/or modified sequence
atgtacgagggaaagcacatacacttctcagaggtagacaataagccactgtgctcctacagccccaagttgtgtaagcagagaaggctgaatggctatgctttttgcatacgccatgtgctggaggataagacagccccattcaaacagtgcgaatacgttgccaaatacaattcccagcgttgcactaatcccatacccaagtccgaggacaggaggtactgtaattcccaccttcaagttcttggcttcattcctaagaaggagaggaaaaaaaagaacgatccaatcgacgaggtgaaagtgcggcaccagatggatactatggcgttttcgctcactgtgccaaccttagctcttaagatgcccaacggtctggacggaatgagcctcagccccccaggagcccgagtccctctccattatctagaaactgagctagaagaccccttcgcttttaacgaggaagatgacgacctgaaaaaaggtgccaccgtacgaaagaaactccagagcaaactcgcacaaaaccggcagcgtcagcgtgagaccgagatcttaaaggtcaggcaagaacacttcagcccaccacctgcacctagtcagcaacagccaccccagcagcactcccatttaagtcctctgagcacctctctaaaacctcccgcaccaccacaaggatctgtttgcaaaagccctcagcctcagaacaccagccttccaatgcagggggtggcacctactactcacaccatagcccaagccaggcagctctcacacaaacgtccattgcctctgctcccttcctccagggctcccaccgtagaccccccacgtactgacagaatccttatgaaggctacagctttttcccctcacttcagttgcatctctcggctgcaacggctggtgaaactttgcacccagaagcatcagctagacactgacttatttcctcacctgggcttagactggtccgaggagagcggggaagagcccgaagacagcgagcaagccagtccctaccaggtcgcgtggtctattagggaaaccctgcggtatcaacggcatgccagcgacgacgacgatgccgagtcccgcagtagcagggtcacccagttatgcacgtatttccagcagaaatacaaacatctttgtcggcttgaaagggcagagtcccgacagaagaaatgccgccatacgtttagaaaggctctgctccaggcagcaagcaaggaacctgagtgcaccggacagctcattcaggaactgcgcagagctgcctgttcaaggacgtccatcagtagaacaaagcttagagaagtggagccagcagcatgtagcgggaccgttaaaggtgagcagtgcgccaacaaagccttgcctttcacacggcactgcttccagcatattctgctgaaccatagccagcagctgttctcatcctgtacggcgaagttcgcggacgggcagcagtgtagtgtgcccgtcttcgacatcacacaccaaacccccctctgcgaagagcacgcaaaaaagatggataacttccttcggggagataactcacggaaggtccagcatcaacaacagaggaagccaagaaagaagacaaaacccccagccctgaccaaaaaacacaagaaaaagaggaggcgcggtccgcgtaggccacaaaagcctatcccgcctgcggtgccacaggggaacctctccatgccggctagtgtatcactgcctgttgaagcgagccacatacgtagcccctctacgccagagcttagcgccgatgagctgcccgacgacattgcgaatgaaatcaccgacatcccccatgacttggaattgaatcaggaagactttagtgacgtgctcccgaggctgcctgacgatttgcaggatttcgacttttttgagggcaagaatggagatcttctccccactaccgaggaagccgaagagctagaacgcgctctacaagctgttacttccttggaatgcctcagcacaattggagtgctggcacaaagcgacggcgtacccgtacaggagctaagcgataggggtataggcgtgttctctacaggcacgggcgcttcaggtattcagtccctaagcagggaagtaaacacagacctgggcgagttgctgaacggcagaatcgttcacgacaacttctcgagccttgagctcgacgagaatctcctgcggtcagcaactctgagtaatccccctaccccattggccggtcagatacagggccagttcagcgctccggctaacgtgggcttgacctcagcgacgttaatttcccagtccgctctgggcgagcgcgcttttccagggcaattccacggcttacacgacgggagccacgcgagtcagagaccacaccccgcacagttattgtcaaaagccgatgatctgattacaagccgtcagcagtactcgtctgatcatagccattcaagtccacatggctcccattatgatagtgaacacgtaccgtcaccatactcagatcacatcacaagcccacacactaccagctatagcggggacaacatggctgcaccggtttgttttagaggatatcatcgccctgcatccgtagcttggggtctgctgctaaactag

SEQ ID NO: 194890 - protein, 783 aa, Artificial Sequence
  derived and/or modified sequence
MSGGHQLQLAALWPWLLMATLQAGFGRTGLVLAAAVESERSAEQKAIIRVIPLKMDPTGKLNLTLEGVFAGVAEITPAEGKLMQSHPLYLCNASDDDNLEPGFISIVKLESPRRAPRPCLSLASKARMAGERGASAVLFDITEDRAAAEQLQQPLGLTWPVVLIWGNDAEKLMEFVYKNQKAHVRIELKEPPAWPDYDVWILMTVVGTIFVIILASVLRIRCRPRHSRPDPLQQRTAWAISQLATRRYQASCRQARGEWPDSGSSCSSAPVCAICLEEFSEGQELRVISCLHEFHRNCVDPWLHQHRTCPLCMFNITEGDSFSQSLGPSRSYQEPGRRLHLIRQHPGHAHYHLPAAYLLGPSRSAVARPPRPGPFLPSQEPGMGPRHHRFPRAAHPRAPGEQQRLAGAQHPYAQGWGLSHLQSTSQHPAACPVPLRRARPPDSSGSGESYCTERSGYLADGPASDSSSGPCHGSSSDSVVNCTDISLQGVHGSSSTFCSSLSSDFDPLVYCSPKGDPQRVDMQPSVTSRPRSLDSVVPTGETQVSSHVHYHRHRHHHYKKRFQWHGRKPGPETGVPQSRPPIPRTQPQPEPPSPDQQVTRSNSAAPSGRLSNPQCPRALPEPAPGPVDASSICPSTSSLFNLQKSSLSARHPQRKRRGGPSEPTPGSRPQDATVHPACQIFPHYTPSVAYPWSPEAHPLICGPPGLDKRLLPETPGPCYSNSQPVWLCLTPRQPLEPHPPGEGPSEWSSDTAEGRPCPYPHCQVLSAQPGSEEELEELCEQAV

SEQ ID NO: 194891 - protein, 742 aa, Artificial Sequence
  derived and/or modified sequence
MSGGHQLQLAALWPWLLMATLQAGFGRTGLVLAAAVESERSAEQKAIIRVIPLKMDPTGKLNLTLEGVFAGVAEITPAEGKLMQARMAGERGASAVLFDITEDRAAAEQLQQPLGLTWPVVLIWGNDAEKLMEFVYKNQKAHVRIELKEPPAWPDYDVWILMTVVGTIFVIILASVLRIRCRPRHSRPDPLQQRTAWAISQLATRRYQASCRQARGEWPDSGSSCSSAPVCAICLEEFSEGQELRVISCLHEFHRNCVDPWLHQHRTCPLCMFNITEGDSFSQSLGPSRSYQEPGRRLHLIRQHPGHAHYHLPAAYLLGPSRSAVARPPRPGPFLPSQEPGMGPRHHRFPRAAHPRAPGEQQRLAGAQHPYAQGWGLSHLQSTSQHPAACPVPLRRARPPDSSGSGESYCTERSGYLADGPASDSSSGPCHGSSSDSVVNCTDISLQGVHGSSSTFCSSLSSDFDPLVYCSPKGDPQRVDMQPSVTSRPRSLDSVVPTGETQVSSHVHYHRHRHHHYKKRFQWHGRKPGPETGVPQSRPPIPRTQPQPEPPSPDQQVTRSNSAAPSGRLSNPQCPRALPEPAPGPVDASSICPSTSSLFNLQKSSLSARHPQRKRRGGPSEPTPGSRPQDATVHPACQIFPHYTPSVAYPWSPEAHPLICGPPGLDKRLLPETPGPCYSNSQPVWLCLTPRQPLEPHPPGEGPSEWSSDTAEGRPCPYPHCQVLSAQPGSEEELEELCEQAV

SEQ ID NO: 194892 - DNA, 2352 bp, Artificial Sequence
  derived and/or modified sequence
atgtcaggcggccatcagttgcagttggccgccctgtggccctggctgcttatggcaacgttgcaggccggctttggacgcaccggattggtacttgcagccgccgtcgaatctgagagaagtgccgaacaaaaagcgatcattagagtgatcccattaaagatggatcccactgggaaactgaacctgaccctggagggcgtcttcgcaggggtggcagaaataacacccgccgaggggaaactgatgcagtctcaccccctgtacctgtgcaacgcttctgacgatgataacctggagcctggattcattagcatcgtgaagctggagagcccacggagagcacctcggccttgtctgtcgctggcgtcaaaggctcggatggcaggcgagaggggcgcttccgccgttctgttcgacattactgaggatcgcgctgccgctgagcagctacagcagcctctgggactcacctggcctgttgtcctgatctgggggaacgatgcagagaaactcatggaattcgtgtataaaaaccagaaagcccacgtcaggatcgagttgaaggagcctcctgcgtggccagattatgacgtgtggattctgatgacagtcgtggggactatctttgtcattatcctggcgtctgtgcttaggatccgatgtcggcccaggcacagtagacccgacccccttcaacagcgcacagcctgggccatctcgcagctggcaactagacgataccaagcctcctgtcgccaggcgcggggtgagtggcctgactctggaagcagttgttcatcagcccccgtgtgtgccatctgcttggaggaatttagcgaagggcaggagctccgcgtgatttcatgtctgcacgaattccatcgtaactgcgtggacccttggttgcaccagcatcgaacctgtcccctatgcatgtttaatatcacggagggggattctttcagccagtctctcggacccagccggtcatatcaagagccaggacggagactgcacctgatacgccagcaccccggccatgcccattatcatttgcccgcagcctatctattgggaccgagtagatcagccgtagctcggccgccaagacctggtccatttctgccatctcaggaaccagggatgggccccaggcaccaccgattccctcgcgctgcgcacccaagagctccgggtgaacagcagcgcctggcaggcgctcagcatccctacgcccagggttggggtctgtcacatctacagtccacctcacagcatcccgccgcgtgtcccgtcccactgaggagggcgcgcccaccagactcttctgggagtggggagtcatactgtacagagcgcagcggttacttagctgacggacccgcaagtgattcaagcagtggtccatgccacggttcctccagtgactcagtggtcaactgcaccgacatttctcttcagggcgtgcacggttccagttctactttttgcagcagtttgagttctgattttgatcctttggtctattgctcccccaaaggggatcctcagcgggtggacatgcaaccatcagttacatcacggcccaggtccctggatagcgtggttcctactggagagactcaggtcagcagccacgtgcactaccatcggcacaggcaccatcactacaagaagcggttccagtggcatggtaggaagccgggcccagaaaccggggtgccccagagtagaccccctatcccacgtacacagcctcagcctgagcctccatctcccgatcagcaagtgaccagatccaattccgctgctcccagcgggcgtctgagcaatccccagtgccctagggcactccccgagccagcaccaggcccagttgatgccagcagtatatgtccttctacaagttctctgtttaatctgcagaagagctcactttcagccagacatcctcagaggaagcgtaggggcggaccctctgaacccactccaggctcaaggccacaggacgccacagttcatcccgcctgtcagatcttccctcattatactccaagcgtggcatacccctggagccccgaggctcatcctctcatttgcggcccacccggtcttgacaagaggctcctgcctgagacgccagggccatgctactccaacagccagccagtctggttgtgcctgaccccccgtcagcccttggagccacatcccccgggggaaggacccagcgagtggtcatcggacaccgctgaaggccgaccatgcccctaccctcactgtcaggtgctctcagcacagccaggcagtgaggaagaactagaggaactctgcgagcaggctgtttag

SEQ ID NO: 194893 - DNA, 2229 bp, Artificial Sequence
  derived and/or modified sequence
atgtcagggggccaccagctccagctagcggccctttggccatggttgctaatggctactcttcaggccggattcggtagaacgggtctcgtgctggctgccgcggtcgaaagcgagcgttcggctgagcagaaggccataattcgggtcatccctcttaaaatggatcccaccgggaagttgaatcttacactggagggggtctttgctggcgtggcagaaatcactcccgcagagggcaagctcatgcaggctcggatggcaggcgagcggggtgctagcgcggtgttattcgatataacagaagatagggccgccgccgaacagctgcaacagcctctggggttaacctggccagtagtcctgatatggggaaacgacgcagagaaattaatggagtttgtctataagaatcagaaggcccatgtgaggatcgagttgaaggaaccgccagcctggcccgactacgatgtgtggattctgatgactgtcgtgggaaccatcttcgtgataatactagcgtccgtgctacggattcggtgtaggcccaggcattccaggcccgacccattacagcagagaaccgcctgggcaatatctcagctggctactagacgctatcaggcaagttgccgtcaagcccggggtgaatggccagattccggcagcagctgttcaagcgccccagtatgcgctatctgcctggaggaatttagtgaaggtcaggagttgcgggtgatcagctgcctgcacgagttccaccgcaactgcgtggatccttggcttcaccagcatagaacatgcccactatgcatgttcaacatcaccgaaggggactccttcagtcagtcactggggccctctaggagctatcaggagcctggccgccgactccacttgatcaggcagcatcctggacacgctcactatcatcttccagccgcctacttgctaggtccaagcagaagcgccgtcgccaggcccccacggcccggacctttcctcccatcccaagaacctggaatgggaccgagacatcacagattccctcgggccgcgcatcccagggccccaggcgaacagcaaagattagctggcgctcaacacccctacgcccagggatggggattgtctcacctgcaaagtacctcgcaacatccagctgcctgcccagtgccgctacgccgggcaagaccccctgatagctcaggatcaggggagagttactgtaccgaacgctccgggtacttggcagacggccctgctagtgacagcagttcggggccgtgccacggctcttcttcagactctgtggtgaactgtacagatatcagcttgcagggtgtccatggctcctcttctacgttctgcagctctctcagttctgatttcgatccattagtatattgtagtcccaagggcgaccctcaacgagtcgatatgcagcctagtgttaccagcaggcctcggtctctcgatagcgtggtgcccacaggggagacccaggtttctagtcacgtccattatcaccggcatcgccaccatcattataagaagcggttccagtggcatggtcgtaagccaggccctgagactggtgtcccccagtcccgccctcctataccacggacccagccacaaccggagccgccaagccccgaccagcaggtgacacgatctaactccgctgctccatctggacggctgtcaaatccccagtgtccgagagccctgccagaaccagcacccggacccgtcgacgcatcctccatttgtcccagtacgtcttccttgttcaatctgcagaaatcaagcttgagtgctagacatccacagaggaagagacgcggaggacccagtgagcccacaccaggttcccgaccgcaggacgctactgtccaccccgcatgtcagatctttcctcactacaccccttcagtagcttatccatggagccccgaggcacatcccctcatttgcggccctcctggactggacaaacgcctgctgcctgaaactccagggccttgctattctaactcgcagcctgtatggctgtgtctgaccccaagacaacccctggagcctcatcctcccggggagggccctagcgagtggagctcagatactgccgaaggccgaccttgcccttaccctcattgtcaggtgctgtccgcccaaccaggcagtgaagaagagctggaagagctctgtgaacaggcagtctag

SEQ ID NO: 194894 - DNA, 2352 bp, Artificial Sequence
  derived and/or modified sequence
atgtctgggggccaccagctgcagctggccgccctgtggccctggctgctgatggccaccctgcaggccggctttggaagaacaggcctggtgctggccgctgctgtggagagcgagaggtctgctgagcagaaggccatcatccgggtcatccccctgaagatggaccccaccgggaagctgaacctgaccctggagggcgtgtttgctggggtggccgagatcaccccagctgagggcaagctgatgcagagccaccccctgtacctgtgcaatgccagtgatgatgacaacctggagcccggcttcatcagcatcgtgaagctggagagcccccggcgggccccccggccctgcctgagcctggccagcaaggccaggatggccggggagcggggggccagcgctgtgctgtttgacatcacagaagatagagctgctgctgagcagctgcagcagcccctgggcctgacctggcctgtggtgctgatctggggcaatgatgctgagaagctgatggagtttgtgtacaagaaccagaaggcccacgtgcgcatcgagctgaaggagcccccagcctggccagactatgatgtgtggatcctgatgacagtggtgggcaccatcttcgtcatcatcctggcctctgtgctgcgcatccgctgccggcccaggcacagcaggccagaccccctgcagcagaggacagcctgggccatcagccagctggccacccggcgctaccaggccagctgccggcaggcccggggggagtggccagacagcggcagcagctgcagcagcgcccctgtgtgtgccatctgcctggaggagttcagcgagggccaggagctgcgggtcatcagctgcctgcacgagttccacaggaactgtgtggacccctggctgcaccagcacaggacctgccccctgtgcatgttcaacatcacagaaggagacagcttcagccagagcctgggccccagccgcagctaccaggagcctggaagaaggctgcacctgatccggcagcaccctggccacgcccactaccacctgcctgctgcctacctgctgggccccagccgctctgctgtggcccggcccccccggcccggccccttcctgcccagccaggagcccggcatgggccccaggcaccaccgcttccccagggctgcccacccccgggcccctggagagcagcagaggctggccggggcccagcacccctatgcccagggctggggcctgagccacctgcagagcaccagccagcaccctgctgcctgccctgtgcccctgcggcgggcccggcccccagacagcagcggcagcggggagagctactgcacagagaggagcggctacctggctgatggccctgccagtgacagcagcagcggcccctgccacggcagcagcagtgacagcgtggtgaactgcacagacatcagcctgcagggcgtgcacggcagcagcagcaccttctgcagcagcctgagcagtgactttgaccccctggtgtactgcagccccaagggggacccccagagggtggacatgcagcccagcgtgaccagccggcccaggagcctggacagcgtggtgcccactggagagacccaggtgagcagccacgtgcactaccaccgccaccgccaccaccactacaagaagcgcttccagtggcacggcaggaagccaggccctgagactggagtgccccagagccggccccccatccccaggacccagccccagcctgagccccccagcccagaccagcaggtgaccaggagcaacagcgctgcccccagcggccgcctgagcaacccccagtgcccccgggccctgcctgagcccgcccctggccctgtggatgccagcagcatctgccccagcaccagcagcctcttcaacctgcagaagagcagcctgagcgcccggcacccccagaggaagaggcggggcggccccagcgagcccaccccaggcagccggccccaggatgccaccgtgcacccagcctgccagatcttcccccactacaccccatctgtggcctacccctggagccctgaggcccaccccctcatctgtggccccccaggcctggacaagaggctgctgcctgagaccccaggcccctgctacagcaacagccagcctgtgtggctgtgcctgaccccccggcagcccctggagccccaccccccaggagagggccccagcgagtggagcagtgacacagctgagggccggccctgcccctacccccactgccaggtgctgagcgcccagcccggcagcgaggaggagctggaggagctgtgtgagcaggccgtgtag

SEQ ID NO: 194895 - DNA, 2229 bp, Artificial Sequence
  derived and/or modified sequence
atgtctgggggccaccagctgcagctggccgccctgtggccctggctgctgatggccaccctgcaggccggctttggaagaacaggcctggtgctggccgctgctgtggagagcgagaggtctgctgagcagaaggccatcatccgggtcatccccctgaagatggaccccaccgggaagctgaacctgaccctggagggcgtgtttgctggggtggccgagatcaccccagctgagggcaagctgatgcaggccaggatggccggggagcggggggccagcgctgtgctgtttgacatcacagaggacagagctgctgctgagcagctgcagcagcccctgggcctgacctggcctgtggtgctgatctggggcaatgatgctgagaagctgatggagtttgtgtacaagaaccagaaggcccacgtgagaattgagctgaaggagcccccagcctggccagactatgatgtgtggatcctgatgacagtggtgggcaccatctttgtgatcatcctggcctctgtgctgcgcatccgctgccggcccaggcacagcaggccagaccccctgcagcagaggacagcctgggccatcagccagctggccacccggcgctaccaggccagctgccggcaggcccggggggagtggccagattctggcagcagctgcagcagcgcccctgtgtgtgccatctgcctggaggagttcagcgagggccaggagctgcgggtcatcagctgcctgcacgagttccacaggaactgtgtggacccctggctgcaccagcacaggacctgccccctgtgcatgttcaacatcacagaaggagacagcttcagccagagcctgggccccagccgcagctaccaggagcccggccggcggctgcacctgatccggcagcaccctggccacgcccactaccacctgcctgctgcctacctgctgggccccagccgctctgctgtggcccggccccccaggcctggccccttcctgcccagccaggagcccggcatgggccccaggcaccaccgcttcccccgggccgcccacccccgggcccctggagagcagcagaggctggccggggcccagcacccctatgcccagggctggggcctgagccacctgcagagcaccagccagcaccctgctgcctgccctgtgcccctgcggcgggcccggcccccagacagcagcggcagcggggagagctactgcacagagaggagcggctacctggctgatggccctgccagtgacagcagcagcggcccctgccacggcagcagcagtgacagcgtggtgaactgcacagacatcagcctgcagggcgtgcacggcagcagcagcaccttctgcagcagcctgagcagtgactttgaccccctggtgtactgcagccccaagggggacccccagagggtggacatgcagcccagcgtgaccagccggcccaggagcctggacagcgtggtgcccaccggggagacccaggtgagcagccacgtgcactaccaccgccaccgccaccaccactacaagaagcgcttccagtggcacggcaggaagccaggccctgagaccggggtgccccagagcaggcctcccatccccaggacccagccccagcctgagccccccagcccagaccagcaggtgaccaggagcaacagcgctgcccccagcggccgcctgagcaacccccagtgcccccgggccctgcctgagcccgcccctggccctgtggatgccagcagcatctgccccagcaccagcagcctcttcaacctgcagaagagcagcctgagcgcccggcacccccagaggaagagaagaggaggccccagcgagcccaccccaggcagccggccccaggatgccaccgtgcacccagcctgccagatcttcccccactacacccccagcgtggcctacccctggagccctgaggcccaccccctcatctgtggccccccaggcctggacaagaggctgctgcctgagaccccaggcccctgctacagcaacagccagcctgtgtggctgtgcctgaccccccggcagcccctggagccccaccccccaggagagggccccagcgagtggagcagtgacacagctgagggccggccctgcccctacccccactgccaggtgctgagcgcccagcccggcagcgaggaggagctggaggagctgtgtgagcaggccgtgtag

SEQ ID NO: 194896 - DNA, 2352 bp, Artificial Sequence
  derived and/or modified sequence
atgagcggcggccaccagctgcagctggccgccctgtggccctggctgctgatggcgaccctgcaagccgggttcggccgcactgggttggtattggctgctgctgtggagtccgagaggtctgctgaacagaaggctatcatcagggtgattcctctaaaaatggatccaactggcaagcttaatcttaccctcgaaggagtctttgctggggttgctgagataactccagcggagggcaaactgatgcagtcacacccactctacttatgcaatgcttccgacgacgacaatctcgaacccggcttcattagcatcgtgaagttggaaagtccccggagagctccgcgcccttgcctgtcactcgccagtaaggctcgcatggctggggagcgaggagcctccgcggtgttgtttgacatcaccgaggaccgggcggcggctgaacaactgcagcaacccctggggctgacttggccggtggttttaatttgggggaatgatgccgaaaaactcatggaattcgtctacaagaatcagaaagcccatgtgagaatcgaacttaaggaaccacctgcatggcccgactacgacgtgtggatcctgatgaccgtcgtgggaactatctttgtgataattctggcctccgtgttaagaatacgctgcaggcctcgtcactccaggccagacccactccaacagaggacagcatgggctatttcccaactagcaacacgaagataccaggctagctgcagacaagctagaggagaatggcccgactcagggagttcttgttcctctgccccggtgtgtgcaatatgcctcgaagagttttcagaaggacaggaactgcgggtgatctcttgccttcacgagtttcaccgcaactgcgtagacccgtggctacatcagcacaggacctgtcctctgtgcatgtttaacattacggagggcgactcattcagccagagtctgggtccttctcgatcttaccaggagcccggaagaagattgcacctgattcgacagcaccctggccacgcccactatcatttgcccgcagcctaccttttgggtccctcacggtccgctgttgcccgccctcctagacctgggccgtttctcccttctcaggagcccggcatgggccccaggcaccatcggtttccccgggctgctcatccacgagcaccaggcgaacagcagaggctagcaggggcccaacatccctatgcccagggatggggccttagccatctgcagagtacctcacagcatccggcagcatgtcccgttcctcttcgaagggcaaggcctcctgatagctcaggttcaggggaatcctattgtacagagcgctccgggtacctggcagacggccccgcgtcagatagctcctccggaccatgccacggctccagctctgacagcgtggtgaactgtacagatatttctctgcaaggcgtgcatggttcttcaagtacattctgcagttctttgtcatctgactttgaccctttagtgtattgcagccctaaaggcgatccgcagagagtagatatgcagcctagcgttactagtagacctaggtcccttgacagcgtggtccctactggggaaactcaggtgagttcccacgtacactaccaccgccaccggcaccaccactacaaaaaaagattccagtggcacggacgcaagcctggccctgagacaggcgttccgcagagtaggccaccaatcccgcggacacaaccacagcctgaaccccctagcccagaccagcaggttacgcggtctaactctgccgcgcccagcggtcgcctctccaatccccagtgtccgcgcgccttacctgaacctgcaccggggccagtcgatgctagcagtatatgtccctccacctccagcctcttcaatctgcaaaagtccagtctgtctgccaggcacccccagaggaagcggaggggagggccttcagaacccaccccaggctcaagacctcaggacgctacagtccacccagcctgccagattttcccacattacacaccatccgtagcctatccctggtctcctgaggcccaccctctgatttgcgggcctcccggattggataagcggctgctgccggaaactcctggtccatgttatagcaatagccagcctgtgtggctttgtctgacacccagacagcccctggagccccatccgccgggtgaaggcccctcggaatggagttcggacaccgcagagggtcggccctgcccttatcctcactgccaggtcttaagcgcccaaccaggatctgaagaggagctcgaggaactctgcgaacaagccgtgtag

SEQ ID NO: 194897 - DNA, 2229 bp, Artificial Sequence
  derived and/or modified sequence
atgagcggcggccaccagctgcagctggccgccctgtggccctggctgctgatggcgaccctgcaggccggattcggacgtaccggtttagtgttggcagcggccgtggagagtgagagaagcgccgagcaaaaggcaatcatcagggtcattcccttgaaaatggatcctaccggtaagctgaacctgactctggaaggtgtttttgctggggtcgcagagatcacgcccgctgaaggaaaactaatgcaggcacggatggccggcgaacgaggcgctagcgctgttctgtttgatatcactgaggatcgagccgcagctgagcagttgcagcaacctctgggcctgacatggcccgttgtcctaatctggggcaatgacgctgagaagctgatggagttcgtttacaaaaaccagaaggcccatgtgaggattgagctgaaagagccccccgcgtggcccgactacgacgtatggatcttaatgaccgtcgttggaacaatctttgtgatcatcttggcctctgtcctcagaattcgctgtagaccgcggcacagccggccggaccccctccaacagagaacagcgtgggccattagtcagctcgcgacaaggagatatcaagctagttgccggcaagccaggggcgaatggcctgattctggcagcagttgctcctccgctcctgtttgtgcgatctgccttgaggagttcagtgaggggcaagaactccgggtgattagttgcttgcacgagtttcatcgcaattgtgtagacccctggctgcatcaacaccggacatgccctttatgtatgtttaacattaccgaaggggacagcttcagccagtctctggggcccagtcggagttaccaagagccaggaaggcggctccatttgatccggcagcaccctggccacgctcattatcatcttccggccgcttatctgctgggtcccagtcgctccgccgtcgccagacctccacgacctgggccttttctgccttcccaggaacccgggatggggccccgtcaccacagattccctagagccgctcatccacgagccccaggagagcagcaacggcttgcaggggcacagcacccctacgctcaggggtggggtttgtcacacctgcagagcaccagccaacacccggccgcttgtccagtgcctctgcgacgcgctcggcctcccgacagctcgggctccggcgaatcatactgtaccgagcgatccgggtacctcgctgacggaccggcttcggatagtagctccggcccttgtcacggatcaagcagtgattccgtagttaactgcaccgacattagcctccaaggggtccatggtagcagctcaactttctgcagttcactttcctccgatttcgaccccctagtgtactgctcgccaaagggggacccccaaagggtagacatgcagccatctgttacatccaggccgcgctctcttgactccgtggtcccaaccggcgagactcaggtaagcagccacgtccactatcatcgacacagacatcaccattacaaaaaacgatttcagtggcatgggcgaaagccagggcccgaaaccggtgtccctcaaagccgtccgcccattcctcgcacacagccccaaccggagcccccatctcccgaccagcaagtgacccgttcaaacagtgctgctccatcaggaagactgtcaaacccccaatgtccgcgggccctgcccgagccagctcccgggcctgtggacgctagtagcatatgcccctccacatcttccctattcaacctgcagaaaagcagcttatcggctagacaccctcagcggaagcgccgcggtggtccgtccgaaccaacacctggctcccgcccacaagacgcaacggtccatcccgcctgccagattttcccacactataccccttctgttgcatacccctggagccccgaggcccaccctctgatctgtggtcctcccggactcgacaagcggctcctgcctgagacacccggcccatgctattcaaatagccagccggtctggctctgcctgacccccagacagcctcttgaaccacaccctcctggggaaggcccgtctgagtggtccagcgatacagctgagggccgaccctgtccgtacccgcattgccaagtgttgtccgcacaaccaggtagcgaggaagaactggaggagttgtgtgagcaagctgtttag

SEQ ID NO: 194898 - DNA, 2352 bp, Artificial Sequence
  derived and/or modified sequence
atgagcggcggacaccagctccaactggcagctctctggccttggctgctcatggctaccctccaggccggttttggcaggacgggcctagttctcgcagctgccgtggagagtgagcggtctgccgagcaaaaggccatcattagggttatacccttgaagatggaccccaccggtaagttaaatctgacactggagggcgtgttcgcaggggtcgccgagatcacaccggcagaggggaaactcatgcaatctcaccccttatacttgtgtaatgcttcagatgatgataacctagagcccggttttatatccatcgttaagctggagagcccgaggcgcgctccccgaccatgcctgagcctcgcgagcaaagcacggatggctggcgagcggggtgccagcgccgtccttttcgatatcactgaagatagagctgctgccgaacagcttcagcagccgctgggcctgacttggcctgttgtgctcatctggggaaatgatgctgaaaaattaatggagttcgtgtataagaatcagaaggcccacgtgaggatcgaactgaaggaacccccagcttggcctgattacgatgtgtggatcctcatgaccgttgtcggaaccatcttcgtcatcatcctggctagcgttctccgcattcgctgtagaccaagacatagtcgcccagaccctcttcaacaaagaaccgcatgggcgatctcacagctcgctacgcgacgctatcaggccagttgtcgtcaggctagaggcgagtggccagacagcgggtcctcgtgctccagcgcccctgtgtgcgcgatatgcctcgaggagttttctgagggtcaggagctgagagtgatctcttgcctgcacgaattccacagaaattgtgtcgacccctggctccaccagcatcggacttgtcccctatgtatgttcaacatcacggaaggggattcattctcccagagtctgggcccttccaggtcatatcaggaacctggtcgtcgtctccacttgattcggcagcacccagggcacgctcactaccatttgcctgccgcttacctgttaggacccagtaggtctgccgtggccaggcctcctaggcctggcccttttctgccttcccaagaaccaggtatgggccctaggcaccataggttccctcgagccgctcaccccagggctcccggtgaacagcagcgactggcaggtgcacagcacccttatgctcagggctggggattgtcccatctgcagagcacctcgcagcatcctgcagcatgtcctgtcccgctaaggcgcgcaagaccccctgatagcagcggttctggcgagtcctattgcactgaacgcagtggataccttgccgatggtcccgctagcgattccagttctggaccgtgtcacggtagtagctccgattcagttgttaattgtacagacatctctctgcagggcgtgcatgggtcatcaagcactttttgctcatctttaagctctgatttcgatcccctagtgtactgctctcccaaaggggacccccagagggtagacatgcagcccagcgtgacaagccgccctagaagtctagactccgtggtgcctaccggagaaactcaggtcagcagccatgtgcactaccatcggcaccgccatcaccactacaagaagcggtttcagtggcacggcagaaaacccggacccgagactggtgtcccacaaagcaggccgcctattccgaggactcagccccagcctgagccaccctcacctgatcaacaggttacccgcagcaatagtgctgctccaagcggacgcctaagcaacccgcagtgcccccgagccttgccagaacctgcgccaggtccagtcgacgcatcctcaatttgcccatctacctcctccctgttcaacttgcaaaagagctccctgtctgccaggcaccctcagcgtaaacggaggggtggcccatccgagcccacacctggatcccgcccacaggacgctacagtacatccagcctgtcagattttcccacactatacccctagcgttgcatacccatggagccccgaggcacaccccctgatttgtggcccacctgggctggacaagagattactgcctgaaaccccaggtccctgctattctaactcacagcctgtgtggttatgtctgaccccccgacagccactcgaaccgcaccctcccggtgaagggccaagcgaatggagcagtgacactgcggaagggaggccctgtccatatcctcactgccaggtactaagcgctcagccagggtcggaggaagagctcgaggaactgtgtgaacaagctgtgtag

SEQ ID NO: 194899 - DNA, 2229 bp, Artificial Sequence
  derived and/or modified sequence
atgtcaggtggacaccagcttcagttagctgccctgtggccttggctgctgatggccactctgcaagccggattcggccgaacaggacttgtgttggcggcagccgtcgagagcgagagatccgccgagcagaaggcaatcattagggttatccccctgaaaatggatccaaccgggaagctcaacctgaccctggaaggcgtatttgccggagttgcggagatcactcctgccgagggcaagttgatgcaggctaggatggcaggggagaggggagccagcgccgtcctctttgacatcaccgaggaccgtgctgcagccgaacagctgcagcaacccctcgggctgacctggccagtggtgttaatctggggcaacgatgctgaaaagctaatggaattcgtatataaaaaccagaaggcccatgtgaggatagaactaaaggagccaccggcttggcccgattatgatgtgtggatactgatgacggttgtgggcactatctttgtaatcatcctggcaagcgtgctccggataaggtgtcggcctcggcatagccgacctgaccctcttcaacagcgcacagcatgggccatcagtcagcttgccactaggagatatcaggcctcttgccgtcaggctaggggcgagtggcctgactccgggagcagttgcagcagcgcacctgtctgtgccatctgcctcgaggaattctcagaagggcaagaactgcgtgtcatatcgtgcctccacgagttccatcggaactgcgttgacccttggttacaccagcataggacttgcccactttgtatgttcaacattaccgagggagattcatttagccagtcattgggtcccagtcgcagctatcaggagcccggtcggagactgcatctaattcgacagcaccccggacacgctcactatcacttgccagctgcttatcttctgggaccatcacgctccgctgttgcacggcctcctaggcctggccctttcctgccaagccaagagccgggaatgggacctaggcatcataggttccctcgtgccgcacatcccagggccccaggcgagcagcagagacttgcaggagcacaacacccatacgcccaaggctggggcttgtcccacctgcagagcacaagccaacatccagctgcctgccccgtgcccctcaggcgggctagaccgcctgacagtagcggctctggcgaaagttactgtacggaacgcagtggctatctcgccgacggacccgcttctgactcttcaagtgggccatgtcacggcagctcttctgattccgtagtgaactgtaccgatatttccctgcaaggcgtccacgggtcgagttccactttctgcagtagcctctctagcgatttcgacccactagtgtattgctcacctaaaggcgacccacagagagtcgatatgcaaccatctgtcacttcaagacctcgaagccttgattcagtggtgcccacaggagagacacaagtgtcctctcacgtccactaccaccgccacaggcaccatcattacaagaagcggttccagtggcatggcagaaaacctggccctgagaccggcgtaccccaaagtcggcctcctattcctcggacccagccccagcccgagccgccatcccccgaccagcaggttacgcgcagtaatagcgccgctccctctgggaggctaagcaaccctcagtgtcctcgggctctgcctgagccagcgcctggacctgtcgacgccagtagcatctgtccatcgactagtagcttgtttaatttgcagaagtcaagcttgagcgccaggcatcctcaacgaaagcgcaggggtgggccaagcgagcccacccctggctcgcggcctcaggatgcaactgtgcacccagcctgccagatcttcccacactataccccgagtgtggcctatccttggagtcccgaggcccatccactgatctgtggccctcctggactcgataaaaggctcctgcctgagacccccggaccctgttactccaactctcagcctgtgtggctctgtcttaccccaagacagcctctggagccgcatcctcctggggaaggcccttcagagtggagctcagacactgccgaggggcgtccttgtccataccctcattgccaagtcctcagcgcccaaccaggttcagaagaggaattggaggagctgtgtgagcaggcagtatag

SEQ ID NO: 194900 - DNA, 5283 bp, Artificial Sequence
  derived and/or modified sequence
gtacttggttaagcagttgaaaccttttttgagcaggatctgtaaaagcataattgaatttgtttcacccccgtggattccagtgggcccgacagcgcaacagtgcctggcaacttgatgcatatggaagagcaatgccaagtgatctgacataatacaaattcacgaagtgacattcaatcacaagcaaagttggaaattccaaagagaagtggtgagatctttactagtcacagtgaagatgggagaaaatgacatacctgcagcagatgtgggctgaaaatatcctcttctctgcccaatcaggaatgctacctgtttttgggaataaactttagagaaaggaagggccaaaactacgacttggctttctgaaacggaagcataaatgttcttttcctccatttgtctggatctgagaacctgcatttggtattagctagtggaagcagtatgtatggttgaagtgcattgctgcagctggtagcatgagtggtggccaccagctgcagctggctgccctctggccctggctgctgatggctaccctgcaggcaggctttggacgcacaggactggtactggcagcagcggtggagtctgaaagatcagcagaacagaaagctattatcagagtgatccccttgaaaatggaccccacaggaaaactgaatctcactttggaaggtgtgtttgctggtgttgctgaaataactccagcagaaggaaaattaatgcagtcccacccgctgtacctgtgcaatgccagtgatgacgacaatctggagcctggattcatcagcatcgtcaagctggagagtcctcgacgggccccccgcccctgcctgtcactggctagcaaggctcggatggcgggtgagcgaggagccagtgctgtcctctttgacatcactgaggatcgagctgctgctgagcagctgcagcagccgctggggctgacctggccagtggtgttgatctggggtaatgacgctgagaagctgatggagtttgtgtacaagaaccaaaaggcccatgtgaggattgagctgaaggagcccccggcctggccagattatgatgtgtggatcctaatgacagtggtgggcaccatctttgtgatcatcctggcttcggtgctgcgcatccggtgccgcccccgccacagcaggccggatccgcttcagcagagaacagcctgggccatcagccagctggccaccaggaggtaccaggccagctgcaggcaggcccggggtgagtggccagactcagggagcagctgcagctcagcccctgtgtgtgccatctgtctggaggagttctctgaggggcaggagctacgggtcatttcctgcctccatgagttccatcgtaactgtgtggacccctggttacatcagcatcggacttgccccctctgcatgttcaacatcacagagggagattcattttcccagtccctgggaccctctcgatcttaccaagaaccaggtcgaagactccacctcattcgccagcatcccggccatgcccactaccacctccctgctgcctacctgttgggcccttcccggagtgcagtggctcggcccccacgacctggtcccttcctgccatcccaggagccaggcatgggccctcggcatcaccgcttccccagagctgcacatccccgggctccaggagagcagcagcgcctggcaggagcccagcacccctatgcacaaggctggggactgagccacctccaatccacctcacagcaccctgctgcttgcccagtgcccctacgccgggccaggccccctgacagcagtggatctggagaaagctattgcacagaacgcagtgggtacctggcagatgggccagccagtgactccagctcagggccctgtcatggctcttccagtgactctgtggtcaactgcacggacatcagcctacagggggtccatggcagcagttctactttctgcagctccctaagcagtgactttgaccccctagtgtactgcagccctaaaggggatccccagcgagtggacatgcagcctagtgtgacctctcggcctcgttccttggactcggtggtgcccacaggggaaacccaggtttccagccatgtccactaccaccgccaccggcaccaccactacaaaaagcggttccagtggcatggcaggaagcctggcccagaaaccggagtcccccagtccaggcctcctattcctcggacacagccccagccagagccaccttctcctgatcagcaagtcaccagatccaactcagcagccccttcggggcggctctctaacccacagtgccccagggccctccctgagccagcccctggcccagttgacgcctccagcatctgccccagtaccagcagtctgttcaacttgcaaaaatccagcctctctgcccgacacccacagaggaaaaggcgggggggtccctccgagcccacccctggctctcggccccaggatgcaactgtgcacccagcttgccagatttttccccattacacccccagtgtggcatatccttggtccccagaggcacaccccttgatctgtggacctccaggcctggacaagaggctgctaccagaaaccccaggcccctgttactcaaattcacagccagtgtggttgtgcctgactcctcgccagcccctggaaccacatccacctggggaggggccttctgaatggagttctgacaccgcagagggcaggccatgcccttatccgcactgccaggtgctgtcggcccagcctggctcagaggaggaactcgaggagctgtgtgaacaggctgtgtgagatgttcaggcctagctccaaccaagagtgtgctccagatgtgtttgggccctacctggcacagagtcctgctcctgggaaaggaaaggaccacagcaaacaccattctttttgccgtacttcctagaagcactggaagaggactggtgatggtggagggtgagagggtgccgtttcctgctccagctccagaccttgtctgcagaaaacatctgcagtgcagcaaatccatgtccagccaggcaaccagctgctgcctgtggcgtgtgtgggctggatcccttgaaggctgagtttttgagggcagaaagctagctatgggtagccaggtgttacaaaggtgctgctccttctccaacccctacttggtttccctcaccccaagcctcatgttcataccagccagtgggttcagcagaacgcatgacaccttatcacctccctccttgggtgagctctgaacaccagctttggcccctccacagtaaggctgctacatcaggggcaaccctggctctatcattttccttttttgccaaaaggaccagtagcataggtgagccctgagcactaaaaggaggggtccctgaagctttcccactatagtgtggagttctgtccctgaggtgggtacagcagccttggttcctctgggggttgagaataagaatagtggggagggaaaaactcctccttgaagatttcctgtctcagagtcccagagaggtagaaaggaggaatttctgctggactttatctgggcagaggaaggatggaatgaaggtagaaaaggcagaattacagctgagcggggacaacaaagagttcttctctgggaaaagttttgtcttagagcaaggatggaaaatggggacaacaaaggaaaagcaaagtgtgacccttgggtttggacagcccagaggcccagctccccagtataagccatacaggccagggacccacaggagagtggattagagcacaagtctggcctcactgagtggacaagagctgatgggcctcatcagggtgacattcaccccagggcagcctgaccactcttggcccctcaggcattatcccatttggaatgtgaatgtggtggcaaagtgggcagaggaccccacctgggaacctttttccctcagttagtggggagactagcacctaggtacccacatgggtatttatatctgaaccagacagacgcttgaatcaggcactatgttaagaaatatatttatttgctaatatatttatccacaaatgtggtctggtcttgtggttttgttctgtcgtgactgtcactcagggtaacaacgtcatctctttctacatcaagagaagtaaattatttatgttatcagaggctaggctccgattcatgaaaggatagggtagagtagagggcttggcaataagaactggtttgtaagcccctaaaagtgtggcttagtgagatcagggaaggagaaagcatgactggattcttactgtgcttcagtcattattattatactgttcacttcacacattatcatacttcagtgactcagaccttgggcaaatactctgtgcctcgctttttcagtccataaaatgggcctacttaatagttgttgcaggacttacatgagataatagagtgtagaaaatatgttccaaagtggaaagttttattcagtgatagaaaacatccaaacctgtcacagagcccatctgaacacagcatgggaccgccaacaagaagaaagcccgcccggaagcagctcaatcaggaggctgggctggaatgacagcgcagcggggcctgaaactatttatatcccaaagctcctctcagataaacacaaatgactgcgttctgcctgcactcgggctattgcgaggacagagagctggtgctccattggcgtgaagtctccagggccagaaggggcctttgtcgcttcctcacaaggcacaagttccccttctgcttccccgagaaaggtttggtaggggtggtggtttagtgcctatagaacaaggcatttcgcttcctagacggtgaaatgaaagggaaaaaaaggacacctaatctcctacaaatggtctttagtaaaggaaccgtgtctaagcgctaagaactgcgcaaagtataaattatcagccggaacgagcaaacagacggagttttaaaagataaatacgcatttttttccgccgtagctcccaggccagcattcctgtgggaagcaagtggaaaccctatagcgctctcgcagttaggaaggaggggtggggctgtccctggatttcttctcggtctctgcagagacaatccagagggagacagtggattcactgcccccaatgcttctaaaacggggagacaaaacaaaaaaaaacaaacttcgggttaccatcggggaacaggaccgacgcccagggccaccagccc

SEQ ID NO: 194901 - DNA, 5160 bp, Artificial Sequence
  derived and/or modified sequence
gtacttggttaagcagttgaaaccttttttgagcaggatctgtaaaagcataattgaatttgtttcacccccgtggattccagtgggcccgacagcgcaacagtgcctggcaacttgatgcatatggaagagcaatgccaagtgatctgacataatacaaattcacgaagtgacattcaatcacaagcaaagttggaaattccaaagagaagtggtgagatctttactagtcacagtgaagatgggagaaaatgacatacctgcagcagatgtgggctgaaaatatcctcttctctgcccaatcaggaatgctacctgtttttgggaataaactttagagaaaggaagggccaaaactacgacttggctttctgaaacggaagcataaatgttcttttcctccatttgtctggatctgagaacctgcatttggtattagctagtggaagcagtatgtatggttgaagtgcattgctgcagctggtagcatgagtggtggccaccagctgcagctggctgccctctggccctggctgctgatggctaccctgcaggcaggctttggacgcacaggactggtactggcagcagcggtggagtctgaaagatcagcagaacagaaagctattatcagagtgatccccttgaaaatggaccccacaggaaaactgaatctcactttggaaggtgtgtttgctggtgttgctgaaataactccagcagaaggaaaattaatgcaggctcggatggcgggtgagcgaggagccagtgctgtcctctttgacatcactgaggatcgagctgctgctgagcagctgcagcagccgctggggctgacctggccagtggtgttgatctggggtaatgacgctgagaagctgatggagtttgtgtacaagaaccaaaaggcccatgtgaggattgagctgaaggagcccccggcctggccagattatgatgtgtggatcctaatgacagtggtgggcaccatctttgtgatcatcctggcttcggtgctgcgcatccggtgccgcccccgccacagcaggccggatccgcttcagcagagaacagcctgggccatcagccagctggccaccaggaggtaccaggccagctgcaggcaggcccggggtgagtggccagactcagggagcagctgcagctcagcccctgtgtgtgccatctgtctggaggagttctctgaggggcaggagctacgggtcatttcctgcctccatgagttccatcgtaactgtgtggacccctggttacatcagcatcggacttgccccctctgcatgttcaacatcacagagggagattcattttcccagtccctgggaccctctcgatcttaccaagaaccaggtcgaagactccacctcattcgccagcatcccggccatgcccactaccacctccctgctgcctacctgttgggcccttcccggagtgcagtggctcggcccccacgacctggtcccttcctgccatcccaggagccaggcatgggccctcggcatcaccgcttccccagagctgcacatccccgggctccaggagagcagcagcgcctggcaggagcccagcacccctatgcacaaggctggggactgagccacctccaatccacctcacagcaccctgctgcttgcccagtgcccctacgccgggccaggccccctgacagcagtggatctggagaaagctattgcacagaacgcagtgggtacctggcagatgggccagccagtgactccagctcagggccctgtcatggctcttccagtgactctgtggtcaactgcacggacatcagcctacagggggtccatggcagcagttctactttctgcagctccctaagcagtgactttgaccccctagtgtactgcagccctaaaggggatccccagcgagtggacatgcagcctagtgtgacctctcggcctcgttccttggactcggtggtgcccacaggggaaacccaggtttccagccatgtccactaccaccgccaccggcaccaccactacaaaaagcggttccagtggcatggcaggaagcctggcccagaaaccggagtcccccagtccaggcctcctattcctcggacacagccccagccagagccaccttctcctgatcagcaagtcaccagatccaactcagcagccccttcggggcggctctctaacccacagtgccccagggccctccctgagccagcccctggcccagttgacgcctccagcatctgccccagtaccagcagtctgttcaacttgcaaaaatccagcctctctgcccgacacccacagaggaaaaggcgggggggtccctccgagcccacccctggctctcggccccaggatgcaactgtgcacccagcttgccagatttttccccattacacccccagtgtggcatatccttggtccccagaggcacaccccttgatctgtggacctccaggcctggacaagaggctgctaccagaaaccccaggcccctgttactcaaattcacagccagtgtggttgtgcctgactcctcgccagcccctggaaccacatccacctggggaggggccttctgaatggagttctgacaccgcagagggcaggccatgcccttatccgcactgccaggtgctgtcggcccagcctggctcagaggaggaactcgaggagctgtgtgaacaggctgtgtgagatgttcaggcctagctccaaccaagagtgtgctccagatgtgtttgggccctacctggcacagagtcctgctcctgggaaaggaaaggaccacagcaaacaccattctttttgccgtacttcctagaagcactggaagaggactggtgatggtggagggtgagagggtgccgtttcctgctccagctccagaccttgtctgcagaaaacatctgcagtgcagcaaatccatgtccagccaggcaaccagctgctgcctgtggcgtgtgtgggctggatcccttgaaggctgagtttttgagggcagaaagctagctatgggtagccaggtgttacaaaggtgctgctccttctccaacccctacttggtttccctcaccccaagcctcatgttcataccagccagtgggttcagcagaacgcatgacaccttatcacctccctccttgggtgagctctgaacaccagctttggcccctccacagtaaggctgctacatcaggggcaaccctggctctatcattttccttttttgccaaaaggaccagtagcataggtgagccctgagcactaaaaggaggggtccctgaagctttcccactatagtgtggagttctgtccctgaggtgggtacagcagccttggttcctctgggggttgagaataagaatagtggggagggaaaaactcctccttgaagatttcctgtctcagagtcccagagaggtagaaaggaggaatttctgctggactttatctgggcagaggaaggatggaatgaaggtagaaaaggcagaattacagctgagcggggacaacaaagagttcttctctgggaaaagttttgtcttagagcaaggatggaaaatggggacaacaaaggaaaagcaaagtgtgacccttgggtttggacagcccagaggcccagctccccagtataagccatacaggccagggacccacaggagagtggattagagcacaagtctggcctcactgagtggacaagagctgatgggcctcatcagggtgacattcaccccagggcagcctgaccactcttggcccctcaggcattatcccatttggaatgtgaatgtggtggcaaagtgggcagaggaccccacctgggaacctttttccctcagttagtggggagactagcacctaggtacccacatgggtatttatatctgaaccagacagacgcttgaatcaggcactatgttaagaaatatatttatttgctaatatatttatccacaaatgtggtctggtcttgtggttttgttctgtcgtgactgtcactcagggtaacaacgtcatctctttctacatcaagagaagtaaattatttatgttatcagaggctaggctccgattcatgaaaggatagggtagagtagagggcttggcaataagaactggtttgtaagcccctaaaagtgtggcttagtgagatcagggaaggagaaagcatgactggattcttactgtgcttcagtcattattattatactgttcacttcacacattatcatacttcagtgactcagaccttgggcaaatactctgtgcctcgctttttcagtccataaaatgggcctacttaatagttgttgcaggacttacatgagataatagagtgtagaaaatatgttccaaagtggaaagttttattcagtgatagaaaacatccaaacctgtcacagagcccatctgaacacagcatgggaccgccaacaagaagaaagcccgcccggaagcagctcaatcaggaggctgggctggaatgacagcgcagcggggcctgaaactatttatatcccaaagctcctctcagataaacacaaatgactgcgttctgcctgcactcgggctattgcgaggacagagagctggtgctccattggcgtgaagtctccagggccagaaggggcctttgtcgcttcctcacaaggcacaagttccccttctgcttccccgagaaaggtttggtaggggtggtggtttagtgcctatagaacaaggcatttcgcttcctagacggtgaaatgaaagggaaaaaaaggacacctaatctcctacaaatggtctttagtaaaggaaccgtgtctaagcgctaagaactgcgcaaagtataaattatcagccggaacgagcaaacagacggagttttaaaagataaatacgcatttttttccgccgtagctcccaggccagcattcctgtgggaagcaagtggaaaccctatagcgctctcgcagttaggaaggaggggtggggctgtccctggatttcttctcggtctctgcagagacaatccagagggagacagtggattcactgcccccaatgcttctaaaacggggagacaaaacaaaaaaaaacaaacttcgggttaccatcggggaacaggaccgacgcccagggccaccagccc

SEQ ID NO: 194902 - DNA, 2352 bp, Artificial Sequence
  derived and/or modified sequence
atgagcggcggccaccagctgcagctggccgccctgtggccctggctgctgatggccaccctgcaggccggcttcggcagaaccggcctggtgctggccgccgccgtggagagcgagagaagcgccgagcagaaggccatcatcagagtgatccccctgaagatggaccccaccggcaagctgaacctgaccctggagggcgtgttcgccggcgtggccgagatcacccccgccgagggcaagctgatgcagagccaccccctgtacctgtgcaacgccagcgacgacgacaacctggagcccggcttcatcagcatcgtgaagctggagagccccagaagagcccccagaccctgcctgagcctggccagcaaggccagaatggccggcgagagaggcgccagcgccgtgctgttcgacatcaccgaggacagagccgccgccgagcagctgcagcagcccctgggcctgacctggcccgtggtgctgatctggggcaacgacgccgagaagctgatggagttcgtgtacaagaaccagaaggcccacgtgagaatcgagctgaaggagccccccgcctggcccgactacgacgtgtggatcctgatgaccgtggtgggcaccatcttcgtgatcatcctggccagcgtgctgagaatcagatgcagacccagacacagcagacccgaccccctgcagcagagaaccgcctgggccatcagccagctggccaccagaagataccaggccagctgcagacaggccagaggcgagtggcccgacagcggcagcagctgcagcagcgcccccgtgtgcgccatctgcctggaggagttcagcgagggccaggagctgagagtgatcagctgcctgcacgagttccacagaaactgcgtggacccctggctgcaccagcacagaacctgccccctgtgcatgttcaacatcaccgagggcgacagcttcagccagagcctgggccccagcagaagctaccaggagcccggcagaagactgcacctgatcagacagcaccccggccacgcccactaccacctgcccgccgcctacctgctgggccccagcagaagcgccgtggccagaccccccagacccggccccttcctgcccagccaggagcccggcatgggccccagacaccacagattccccagagccgcccaccccagagcccccggcgagcagcagagactggccggcgcccagcacccctacgcccagggctggggcctgagccacctgcagagcaccagccagcaccccgccgcctgccccgtgcccctgagaagagccagaccccccgacagcagcggcagcggcgagagctactgcaccgagagaagcggctacctggccgacggccccgccagcgacagcagcagcggcccctgccacggcagcagcagcgacagcgtggtgaactgcaccgacatcagcctgcagggcgtgcacggcagcagcagcaccttctgcagcagcctgagcagcgacttcgaccccctggtgtactgcagccccaagggcgacccccagagagtggacatgcagcccagcgtgaccagcagacccagaagcctggacagcgtggtgcccaccggcgagacccaggtgagcagccacgtgcactaccacagacacagacaccaccactacaagaagagattccagtggcacggcagaaagcccggccccgagaccggcgtgccccagagcagaccccccatccccagaacccagccccagcccgagccccccagccccgaccagcaggtgaccagaagcaacagcgccgcccccagcggcagactgagcaacccccagtgccccagagccctgcccgagcccgcccccggccccgtggacgccagcagcatctgccccagcaccagcagcctgttcaacctgcagaagagcagcctgagcgccagacacccccagagaaagagaagaggcggccccagcgagcccacccccggcagcagaccccaggacgccaccgtgcaccccgcctgccagatcttcccccactacacccccagcgtggcctacccctggagccccgaggcccaccccctgatctgcggcccccccggcctggacaagagactgctgcccgagacccccggcccctgctacagcaacagccagcccgtgtggctgtgcctgacccccagacagcccctggagccccacccccccggcgagggccccagcgagtggagcagcgacaccgccgagggcagaccctgcccctacccccactgccaggtgctgagcgcccagcccggcagcgaggaggagctggaggagctgtgcgagcaggccgtgtag

SEQ ID NO: 194903 - DNA, 2229 bp, Artificial Sequence
  derived and/or modified sequence
atgagcggcggccaccagctgcagctggccgccctgtggccctggctgctgatggccaccctgcaggccggcttcggcagaaccggcctggtgctggccgccgccgtggagagcgagagaagcgccgagcagaaggccatcatcagagtgatccccctgaagatggaccccaccggcaagctgaacctgaccctggagggcgtgttcgccggcgtggccgagatcacccccgccgagggcaagctgatgcaggccagaatggccggcgagagaggcgccagcgccgtgctgttcgacatcaccgaggacagagccgccgccgagcagctgcagcagcccctgggcctgacctggcccgtggtgctgatctggggcaacgacgccgagaagctgatggagttcgtgtacaagaaccagaaggcccacgtgagaatcgagctgaaggagccccccgcctggcccgactacgacgtgtggatcctgatgaccgtggtgggcaccatcttcgtgatcatcctggccagcgtgctgagaatcagatgcagacccagacacagcagacccgaccccctgcagcagagaaccgcctgggccatcagccagctggccaccagaagataccaggccagctgcagacaggccagaggcgagtggcccgacagcggcagcagctgcagcagcgcccccgtgtgcgccatctgcctggaggagttcagcgagggccaggagctgagagtgatcagctgcctgcacgagttccacagaaactgcgtggacccctggctgcaccagcacagaacctgccccctgtgcatgttcaacatcaccgagggcgacagcttcagccagagcctgggccccagcagaagctaccaggagcccggcagaagactgcacctgatcagacagcaccccggccacgcccactaccacctgcccgccgcctacctgctgggccccagcagaagcgccgtggccagaccccccagacccggccccttcctgcccagccaggagcccggcatgggccccagacaccacagattccccagagccgcccaccccagagcccccggcgagcagcagagactggccggcgcccagcacccctacgcccagggctggggcctgagccacctgcagagcaccagccagcaccccgccgcctgccccgtgcccctgagaagagccagaccccccgacagcagcggcagcggcgagagctactgcaccgagagaagcggctacctggccgacggccccgccagcgacagcagcagcggcccctgccacggcagcagcagcgacagcgtggtgaactgcaccgacatcagcctgcagggcgtgcacggcagcagcagcaccttctgcagcagcctgagcagcgacttcgaccccctggtgtactgcagccccaagggcgacccccagagagtggacatgcagcccagcgtgaccagcagacccagaagcctggacagcgtggtgcccaccggcgagacccaggtgagcagccacgtgcactaccacagacacagacaccaccactacaagaagagattccagtggcacggcagaaagcccggccccgagaccggcgtgccccagagcagaccccccatccccagaacccagccccagcccgagccccccagccccgaccagcaggtgaccagaagcaacagcgccgcccccagcggcagactgagcaacccccagtgccccagagccctgcccgagcccgcccccggccccgtggacgccagcagcatctgccccagcaccagcagcctgttcaacctgcagaagagcagcctgagcgccagacacccccagagaaagagaagaggcggccccagcgagcccacccccggcagcagaccccaggacgccaccgtgcaccccgcctgccagatcttcccccactacacccccagcgtggcctacccctggagccccgaggcccaccccctgatctgcggcccccccggcctggacaagagactgctgcccgagacccccggcccctgctacagcaacagccagcccgtgtggctgtgcctgacccccagacagcccctggagccccacccccccggcgagggccccagcgagtggagcagcgacaccgccgagggcagaccctgcccctacccccactgccaggtgctgagcgcccagcccggcagcgaggaggagctggaggagctgtgcgagcaggccgtgtag

SEQ ID NO: 194904 - protein, 622 aa, Artificial Sequence
  derived and/or modified sequence
MVDVVGLERETGPRGSPWPGLPLPSLVGPAPLLTCLCPQCLSVEDALGLGEPEGSGLPPGPVLEARYVARLSAAAVLYLSNPEGTCEDARAGLWASHADHLLALLESPKALTPGLSWLLQRMQARAAGQTPKTACVDIPQLLEEAVGAGAPGSAGGVLAALLDHVRSGSCFHALPSPQYFVDFVFQQHSSEVPMTLAELSALMQRLGVGREAHSDHSHRHRGASSWDPVPLISSSNSSSVWDTVCLSARDVMAAYGLSEQAGVTPEAWAQLSPALLQQQLSGACTSQSRPPVQDQLSQSERYLYGSLATLLICLCAVFGLLLLTCTGCRGVTHYILQTFLSLAVGALTGDAVLHLTPKVLGLHTHSEEGLSPQPTWRLLAMLAGLYAFFLFENLFNLLLPRDPEDLEDGPCGHSSHSHGGHSHGVSLQLAPSELRQPKPPHEGSRADLVAEESPELLNPEPRRLSPELRLLPYMITLGDAVHNFADGLAVGAAFASSWKTGLATSLAVFCHELPHELGDFAALLHAGLSVRQALLLNLASALTAFAGLYVALAVGVSEESEAWILAVATGLFLYVALCDMLPAMLKVRDPRPWLLFLLHNVGLLGGWTVLLLLSLYEDDITF

SEQ ID NO: 194905 - DNA, 1869 bp, Artificial Sequence
  derived and/or modified sequence
atggtcgacgtagttggcctggagagagagaccgggcccagaggtagtccctggcctggactgcctctgcccagtctggtaggtccggcccctctcctcacctgtctctgtccccagtgcctatctgttgaagacgctttggggctgggagagccggagggaagcggtttaccaccaggacctgtgctcgaggctagatatgtcgctcgactgtccgcagccgccgtgttatatctctctaacccggaaggtacctgcgaagacgctagggccggattgtgggcgtctcacgccgatcatttgctggcactacttgagtcccctaaagctctaactcccggactctcctggttgctgcagcgaatgcaggcaagggcggcggggcagactccaaagaccgcatgcgtggacattccccaactgttggaagaagctgtgggtgcgggcgccccaggatccgcagggggcgttctggctgctctgctggaccatgttagatctgggtcctgttttcacgccctgcctagtccccagtatttcgtggactttgtattccaacaacattctagtgaagtcccaatgacattggccgagttgtcagcacttatgcaacgcctaggagtcggacgagaggcacactccgatcacagtcaccggcaccggggcgcttcttcctgggatccagttccccttatctccagttccaatagttccagtgtttgggacacggtgtgcttgagcgcaagggacgttatggccgcctacggccttagcgagcaagcgggtgtcacccccgaagcctgggcccaactctctccagctctgctgcaacagcagttgtctggtgcttgcaccagccagtctcgccctccagtgcaagaccagctctcccagtcggagcgatacctgtacggttctctggccaccctgctcatttgcctgtgcgcggtgttcgggctgcttctgctgacctgtacgggctgtcggggcgtcacacactacatactccagacattcctgtctctcgccgttggagcactgactggagatgctgtgctgcacctcactcctaaggtcctgggtctgcacacacatagcgaggaaggtttgagccctcagcccacctggcgattgctggccatgctggcaggcttatacgcattctttctgtttgagaacctgttcaacctgctcctgcccagggatccagaagacttagaggacggcccctgcgggcacagtagtcacagccacgggggccattcacacggagtgagcctgcaactcgcacctagtgaactgagacagcctaaaccccctcacgagggctcccgtgcagatctcgttgccgaagagagtcccgaactcctgaaccctgagcctaggagactctcacccgagctgaggctcttaccatacatgattacactgggagacgctgttcacaattttgcggacgggctggcagtcggggcagcctttgcctcctcatggaaaaccgggctagccacgagtttggctgtgttctgccacgagctgccacatgaactcggcgattttgccgccctcctgcatgcggggctctctgtgcggcaagcactcctcctgaacctcgcatcagccctgactgcttttgccggtctatatgtggcgctggccgtgggggtgtccgaggagtcagaggcctggattcttgccgtggccaccgggttgttcctgtatgtcgcactatgcgacatgctccccgctatgctgaaagtgagggaccctcggccatggctgctgttcctcctacataacgttggccttttagggggctggactgttcttctactgctgagcctctatgaagatgatatcacattttag

SEQ ID NO: 194906 - DNA, 1869 bp, Artificial Sequence
  derived and/or modified sequence
atggtggatgtggtgggcctggagcgggagaccggcccccggggcagcccctggccaggcctgcccctgcccagcctggtgggccctgcccccctgctgacctgcctgtgcccccagtgcctgtctgtggaggatgccctgggcctgggggagcctgagggcagcggcctgcccccaggccctgtgctggaggcccgctacgtggcccggctgtctgctgctgctgtgctgtacctgagcaaccctgagggcacctgtgaagatgcccgggccggcctgtgggccagccacgccgaccacctgctggccctgctggagagccccaaggccctgaccccaggcctgtcctggctgctgcagaggatgcaggcccgggctgctggccagacccccaagacagcctgtgtggacatcccccagctgctggaggaggccgtgggcgctggggcccctggcagcgctgggggcgtgctggccgccctgctggaccacgtgcgcagcggcagctgcttccacgccctgcccagcccccagtactttgtggactttgtgttccagcagcacagcagcgaggtgcccatgaccctggccgagctgagcgccctgatgcagaggctgggcgtgggccgggaggcccacagcgaccacagccaccgccacagaggagccagctcctgggaccctgtgcccctcatcagcagcagcaacagcagctctgtgtgggacacagtgtgcctgagcgccagagatgtgatggccgcctacggcctgtctgagcaggccggcgtgaccccagaggcctgggcccagctgagccctgccctgctgcagcagcagctgagcggggcctgcaccagccagagccggccccctgtgcaggaccagctgagccagagcgagcgctacctgtatggcagcctggccaccctgctgatctgcctgtgtgctgtgtttggcctgctgctgctgacctgcaccggctgccggggcgtgacccactacatcctgcagaccttcctgagcctggccgtgggcgccctgactggagatgctgtgctgcacctgacccccaaggtgctgggcctgcacacccacagcgaggagggcctgagcccccagcccacctggaggctgctggccatgctggccggcctgtatgccttcttcctgtttgagaacctcttcaacctgctgctgccccgggaccctgaggacctggaggatggcccctgtggccacagcagccacagccacggcggccacagccatggagtgtccctgcagctggcccccagcgagctgcggcagcccaagccccctcatgagggcagcagagctgacctggtggccgaggagagccctgagctgctgaaccctgagccccggcggctgagccctgagctgcggctgctgccctacatgatcaccctgggagatgctgtgcacaactttgctgatggcctggccgtgggcgccgcctttgccagctcctggaagacaggcctggccaccagcctggccgtgttctgccacgagctgccccatgagctgggggactttgctgccctgctgcacgccggcctgtctgtgcggcaggccctgctgctgaacctggccagcgccctgacagcctttgctggcctgtatgtggccctggccgtgggcgtgtctgaggagagcgaggcctggatcctggccgtggccaccggcctcttcctgtatgtggccctgtgtgacatgctgcctgccatgctgaaggtgcgggacccccggccctggctgctcttcctgctgcacaacgtgggcctgctgggcggctggacagtgctgctgctgctgagcctgtatgaagatgacatcaccttctag

SEQ ID NO: 194907 - DNA, 1869 bp, Artificial Sequence
  derived and/or modified sequence
atggtggacgtggtgggcctggagcgggagaccggcccccggggctcaccatggcccgggctgccattaccttccttggtgggccctgccccactgctgacttgtctgtgcccacagtgcctatctgtagaggacgcactagggctgggggaacccgaggggtccggcctgcccccaggacccgtgcttgaagcgaggtatgttgctcgcctctccgctgcagcagttttgtacctgtccaaccctgaaggaacctgtgaggacgctagggcaggtctgtgggcgtcccatgcagaccacttgttggccctgctcgaatccccaaaggctctcacaccaggactgtcgtggctcctgcagcggatgcaggcaagggccgctggacagacgcctaagaccgcatgtgtagacatccctcagctcctggaagaagcagtgggtgcaggcgcgccaggctctgccggcggcgtgctcgccgcgctgctcgaccacgtaaggagtggcagttgctttcacgccctaccttctcctcagtatttcgtggactttgtcttccagcaacactcctcagaggttccaatgacattagccgagctgagtgccttgatgcaaaggctcggcgtgggacgggaagctcactctgatcacagtcatagacaccgaggggctagctcttgggacccggtgccgctgataagcagtagcaacagcagctctgtgtgggatacagtgtgtttgtcggctcgagacgtgatggcagcatacggactgtctgagcaggctggagtgacgcctgaggcttgggcccagttgtccccagctctgctccagcagcagctaagcggtgcttgcacgtcgcaatctagaccgccagtccaggaccagttgagccagtccgagcgctatctgtatggaagcctggccaccctgctgatctgtctgtgtgccgttttcggacttctgcttctgacctgtactggatgccgcggagtgactcactacattctgcagacgttcctgtctctggccgtgggtgcattgactggtgacgctgtactccatctgacccccaaagtcctcggcctgcacacccattccgaggagggactgtccccccaacctacgtggcggctgctcgcgatgctggcagggctgtacgctttctttctcttcgaaaatttgttcaatttgctgctgcccagggacccagaagatctcgaggacgggccctgtggccactccagtcactctcatgggggccattcacacggggtgtccctgcagctcgcgccctccgagcttcggcagcccaagccgccccatgagggcagtagggccgatcttgtagctgaagaatccccggaattgttgaacccagaacctagaaggctgagcccagagcttcggcttctgccttatatgattacgctgggcgatgcggtccacaacttcgctgacggactggcggtgggggccgcatttgcgtctagttggaaaacaggcctcgccacttcactagctgtgttctgccatgagctaccccatgagcttggagattttgccgctctgctgcatgcaggactctcagtgcgccaggcgctgctgttgaatctggctagtgctcttactgcctttgccggactctacgtagccctggccgtcggcgtcagcgaggagagtgaagcttggatactggccgttgcaaccggattgttcttgtacgtggccctctgtgatatgctcccagcaatgcttaaagttcgcgatcctaggccgtggcttctgttcttgctgcacaatgtgggcttactaggcggttggactgtgttacttcttctgtctctctacgaagatgacatcaccttctag

SEQ ID NO: 194908 - DNA, 1869 bp, Artificial Sequence
  derived and/or modified sequence
atggtcgatgtggtcggccttgagagggagacaggaccgagaggctcgccgtggcccggtctgccacttccatccctggtgggcccagcccctcttctgacttgtctgtgccctcagtgtctgtctgtggaggatgcactggggctgggagagcctgaagggtcaggcctccccccaggcccagtactggaggccagatacgtggctcgcttgagcgcagctgccgtcctttatctatcaaatccagaaggtacatgtgaggatgcccgtgcaggattgtgggcctctcacgccgatcacctgctcgccctcctcgaatcacctaaagctctaacccctggcctgagctggctcttgcagagaatgcaagccagggctgctggacagacgcccaaaaccgcctgcgtggatataccacagctactggaggaggccgtaggtgcaggcgcaccaggatccgcgggaggagtgctcgctgcgctgctggatcacgtgaggagtgggagctgctttcacgcacttccaagtccacagtactttgtggacttcgtctttcagcaacattcttccgaggttccaatgactctagccgaactgtccgctctgatgcagcggctgggcgtaggacgggaggcacacagcgaccattcccatcgacaccgtggagctagctcctgggatcctgttcccctgatcagctcttccaatagtagctctgtgtgggatactgtttgcctatcagctcgcgatgtcatggcagcctatggactttcagagcaagccggtgttacaccagaggcttgggcacagctgagccctgctctgctgcagcagcagctctccggggcatgtacgtctcagtcacgccctcccgttcaagaccagctgtctcagtccgagcggtatctctacgggtccctcgccaccctgctgatttgtctttgcgccgttttcggattactgttgttaacgtgtacaggctgtcgcggtgtgacacactatatcctccagactttccttagtctggcggtcggcgcacttactggagacgctgtgctgcatttgacgcccaaggttttgggactgcacacccattccgaggaggggctgagcccacagccaacctggcggctgctggcaatgctggcgggattgtatgccttcttcctgtttgaaaacctgtttaatcttctgttaccccgagatccggaagacctcgaagatggtccctgtggacattcttcccactcacacggcggacactcccatggcgtgtctctacagctggctcccagcgagctccggcaacctaaacccccacatgaggggagtcgagcagacctggttgccgaggaatctccagaattactgaaccctgagcctaggagattgtctcccgagcttaggctactgccctacatgattacgctgggcgacgctgtccataatttcgcagatggcttagctgtcggggcagccttcgcttcttcgtggaagaccggcctagccactagcctggctgtgttttgccacgaactaccccacgagcttggagacttcgctgcgttgctgcatgccggtctgagtgttagacaggccctgctgcttaacctggcttccgcactaactgcgttcgccggactgtatgtggccctggccgtgggggtttccgaggaaagcgaagcttggattctcgccgtcgccaccgggttatttctgtatgtggctctatgtgatatgctgcctgccatgttaaaggtgagggacccccgaccttggctcttgtttttactccataatgtggggctgttgggcggttggacagtcctccttctgctgtctctctacgaggatgatatcaccttctag

SEQ ID NO: 194909 - DNA, 2297 bp, Artificial Sequence
  derived and/or modified sequence
aaactccaggaggcggaggaggctagtggcagtacctgggcaccctgaccctccccacaggccagagcccaccctcctgctcatgagggcagacaggcctttccagggacacagtccctcttctccccaggaccccagggccaactccccctgccggccctctgccatcaaattggcagtggctccaggggagtcccctggggatgggggaccactgttggggacccctctgcgtgcacccctgtagttggggaagcaggacaggggcctggggagacggaagggcgccaggggttgagagaggatggtggacgttgttggacttgaaagggaaacaggccctcggggaagcccctggccaggcctgcctctcccctccctggtgggcccagcgcccctgctcacttgtctctgcccacagtgcctgtctgtggaggacgccctgggcctgggcgagcctgaggggtcagggctgcccccgggcccggtcctggaggccaggtacgtcgcccgcctcagtgccgccgccgtcctgtacctcagcaaccccgagggcacctgtgaggacgctcgggctggcctctgggcctctcatgcagaccacctcctggccctgctcgagagccccaaggccctgaccccgggcctgagctggctgctgcagaggatgcaggcccgggctgccggccagacccccaagacggcctgcgtagatatccctcagctgctggaggaggcggtgggggcgggggctccgggcagtgctggcggcgtcctggctgccctgctggaccatgtcaggagcgggtcttgcttccacgccttgccgagccctcagtacttcgtggactttgtgttccagcagcacagcagcgaggtccctatgacgctggccgagctgtcagccttgatgcagcgcctgggggtgggcagggaggcccacagtgaccacagtcatcggcacaggggagccagcagctgggaccctgtgcccctcatcagctccagcaacagctccagtgtgtgggacacggtatgcctgagtgccagggacgtgatggctgcatatggactgtcggaacaggctggggtgaccccggaggcctgggcccaactgagccctgccctgctccaacagcagctgagtggagcctgcacctcccagtccaggccccccgtccaggaccagctcagccagtcagagaggtatctgtacggctccctggccacgctgctcatctgcctctgcgcggtctttggcctcctgctgctgacctgcactggctgcaggggggtcacccactacatcctgcagaccttcctgagcctggcagtgggtgcactcactggggacgctgtcctgcatctgacgcccaaggtgctggggctgcatacacacagcgaagagggcctcagcccacagcccacctggcgcctcctggctatgctggccgggctctacgccttcttcctgtttgagaacctcttcaatctcctgctgcccagggacccggaggacctggaggacgggccctgcggccacagcagccatagccacgggggccacagccacggtgtgtccctgcagctggcacccagcgagctccggcagcccaagcccccccacgagggctcccgcgcagacctggtggcggaggagagcccggagctgctgaaccctgagcccaggagactgagcccagagttgaggctactgccctatatgatcactctgggcgacgccgtgcacaacttcgccgacgggctggccgtgggcgccgccttcgcgtcctcctggaagaccgggctggccacctcgctggccgtgttctgccacgagttgccacacgagctgggggacttcgccgccttgctgcacgcggggctgtccgtgcgccaagcactgctgctgaacctggcctccgcgctcacggccttcgctggtctctacgtggcactcgcggttggagtcagcgaggagagcgaggcctggatcctggcagtggccaccggcctgttcctctacgtagcactctgcgacatgctcccggcgatgttgaaagtacgggacccgcggccctggctcctcttcctgctgcacaacgtgggcctgctgggcggctggaccgtcctgctgctgctgtccctgtacgaggatgacatcaccttctgataccctgccctagtcccccacctttgacttaagatcccacacctcacaaacctacagcccagaaaccagaagcccctatagaggccccagtcccaactccagtaaagacactcttgtccttgga

SEQ ID NO: 194910 - DNA, 1869 bp, Artificial Sequence
  derived and/or modified sequence
atggtggacgtggtgggcctggagagagagaccggccccagaggcagcccctggcccggcctgcccctgcccagcctggtgggccccgcccccctgctgacctgcctgtgcccccagtgcctgagcgtggaggacgccctgggcctgggcgagcccgagggcagcggcctgccccccggccccgtgctggaggccagatacgtggccagactgagcgccgccgccgtgctgtacctgagcaaccccgagggcacctgcgaggacgccagagccggcctgtgggccagccacgccgaccacctgctggccctgctggagagccccaaggccctgacccccggcctgagctggctgctgcagagaatgcaggccagagccgccggccagacccccaagaccgcctgcgtggacatcccccagctgctggaggaggccgtgggcgccggcgcccccggcagcgccggcggcgtgctggccgccctgctggaccacgtgagaagcggcagctgcttccacgccctgcccagcccccagtacttcgtggacttcgtgttccagcagcacagcagcgaggtgcccatgaccctggccgagctgagcgccctgatgcagagactgggcgtgggcagagaggcccacagcgaccacagccacagacacagaggcgccagcagctgggaccccgtgcccctgatcagcagcagcaacagcagcagcgtgtgggacaccgtgtgcctgagcgccagagacgtgatggccgcctacggcctgagcgagcaggccggcgtgacccccgaggcctgggcccagctgagccccgccctgctgcagcagcagctgagcggcgcctgcaccagccagagcagaccccccgtgcaggaccagctgagccagagcgagagatacctgtacggcagcctggccaccctgctgatctgcctgtgcgccgtgttcggcctgctgctgctgacctgcaccggctgcagaggcgtgacccactacatcctgcagaccttcctgagcctggccgtgggcgccctgaccggcgacgccgtgctgcacctgacccccaaggtgctgggcctgcacacccacagcgaggagggcctgagcccccagcccacctggagactgctggccatgctggccggcctgtacgccttcttcctgttcgagaacctgttcaacctgctgctgcccagagaccccgaggacctggaggacggcccctgcggccacagcagccacagccacggcggccacagccacggcgtgagcctgcagctggcccccagcgagctgagacagcccaagcccccccacgagggcagcagagccgacctggtggccgaggagagccccgagctgctgaaccccgagcccagaagactgagccccgagctgagactgctgccctacatgatcaccctgggcgacgccgtgcacaacttcgccgacggcctggccgtgggcgccgccttcgccagcagctggaagaccggcctggccaccagcctggccgtgttctgccacgagctgccccacgagctgggcgacttcgccgccctgctgcacgccggcctgagcgtgagacaggccctgctgctgaacctggccagcgccctgaccgccttcgccggcctgtacgtggccctggccgtgggcgtgagcgaggagagcgaggcctggatcctggccgtggccaccggcctgttcctgtacgtggccctgtgcgacatgctgcccgccatgctgaaggtgagagaccccagaccctggctgctgttcctgctgcacaacgtgggcctgctgggcggctggaccgtgctgctgctgctgagcctgtacgaggacgacatcaccttctag

SEQ ID NO: 194911 - protein, 706 aa, Artificial Sequence
  derived and/or modified sequence
MNESKPGDSQNLACVFCRKHDDCPNKYGEKKTKEKWNLTVHYYCLLMSSGIWQRGKEEEGVYGFLIEDIRKEVNRASKLKCCVCKKNGASIGCVAPRCKRSYHFPCGLQRECIFQFTGNFASFCWDHRPVQIITSNNYRESLPCTICLEFIEPIPSYNILRSPCCKNAWFHRDCLQVQAINAGVFFFRCTICNNSDIFQKEMLRMGIHIPEKDASWELEENAYQELLQHYERCDVRRCRCKEGRDYNAPDSKWEIKRCQCCGSSGTHLACSSLRSWEQNWECLECRGIIYNSGEFQKAKKHVLPNSNNVGITDCLLEESSPKLPRQSPGSQSKDLLRQGSKFRRNVSTLLIELGFQIKKKTKRLYINKANIWNSALDAFRNRNFNPSYAIEVAYVIENDNFGSEHPGSKQEFLSLLMQHLENSSLFEGSLSKNLSLNSQALKENLYYEAGKMLAISLVHGGPSPGFFSKTLFNCLVYGPENTQPILDDVSDFDVAQIIIRINTATTVADLKSIINECYNYLELIGCLRLITTLSDKYMLVKDILGYHVIQRVHTPFESFKQGLKTLGVLEKIQAYPEAFCSILCHKPESLSAKILSELFTVHTLPDVKALGFWNSYLQAVEDGKSTTTMEDILIFATGCSSIPPAGFKPTPSIECLHVDFPVGNKCNNCLAIPITNTYKEFQENMDFTIRNTLRLEKEESSHYIGH

SEQ ID NO: 194912 - protein, 736 aa, Artificial Sequence
  derived and/or modified sequence
MLIPALQISDSESVGLEDGIEQSAYLTESKMNESKPGDSQNLACVFCRKHDDCPNKYGEKKTKEKWNLTVHYYCLLMSSGIWQRGKEEEGVYGFLIEDIRKEVNRASKLKCCVCKKNGASIGCVAPRCKRSYHFPCGLQRECIFQFTGNFASFCWDHRPVQIITSNNYRESLPCTICLEFIEPIPSYNILRSPCCKNAWFHRDCLQVQAINAGVFFFRCTICNNSDIFQKEMLRMGIHIPEKDASWELEENAYQELLQHYERCDVRRCRCKEGRDYNAPDSKWEIKRCQCCGSSGTHLACSSLRSWEQNWECLECRGIIYNSGEFQKAKKHVLPNSNNVGITDCLLEESSPKLPRQSPGSQSKDLLRQGSKFRRNVSTLLIELGFQIKKKTKRLYINKANIWNSALDAFRNRNFNPSYAIEVAYVIENDNFGSEHPGSKQEFLSLLMQHLENSSLFEGSLSKNLSLNSQALKENLYYEAGKMLAISLVHGGPSPGFFSKTLFNCLVYGPENTQPILDDVSDFDVAQIIIRINTATTVADLKSIINECYNYLELIGCLRLITTLSDKYMLVKDILGYHVIQRVHTPFESFKQGLKTLGVLEKIQAYPEAFCSILCHKPESLSAKILSELFTVHTLPDVKALGFWNSYLQAVEDGKSTTTMEDILIFATGCSSIPPAGFKPTPSIECLHVDFPVGNKCNNCLAIPITNTYKEFQENMDFTIRNTLRLEKEESSHYIGH

SEQ ID NO: 194913 - DNA, 2211 bp, Artificial Sequence
  derived and/or modified sequence
atgctgatccccgccctgcagatcagcgacagcgagagcgtgggcctggaggacggcatcgagcagagcgcctacctgaccgagagcaagatgaacgagagcaagcccggcgacagccagaacctggcctgcgtgttctgcagaaagcacgacgactgccccaacaagtacggcgagaagaagaccaaggagaagtggaacctgaccgtgcactactactgcctgctgatgagcagcggcatctggcagagaggcaaggaggaggagggcgtgtacggcttcctgatcgaggacatcagaaaggaggtgaacagagccagcaagctgaagtgctgcgtgtgcaagaagaacggcgccagcatcggctgcgtggcccccagatgcaagagaagctaccacttcccctgcggcctgcagagagagtgcatcttccagttcaccggcaacttcgccagcttctgctgggaccacagacccgtgcagatcatcaccagcaacaactacagagagagcctgccctgcaccatctgcctggagttcatcgagcccatccccagctacaacatcctgagaagcccctgctgcaagaacgcctggttccacagagactgcctgcaggtgcaggccatcaacgccggcgtgttcttcttcagatgcaccatctgcaacaacagcgacatcttccagaaggagatgctgagaatgggcatccacatccccgagaaggacgccagctgggagctggaggagaacgcctaccaggagctgctgcagcactacgagagatgcgacgtgagaagatgcagatgcaaggagggcagagactacaacgcccccgacagcaagtgggagatcaagagatgccagtgctgcggcagcagcggcacccacctggcctgcagcagcctgagaagctgggagcagaactgggagtgcctggagtgcagaggcatcatctacaacagcggcgagttccagaaggccaagaagcacgtgctgcccaacagcaacaacgtgggcatcaccgactgcctgctggaggagagcagccccaagctgcccagacagagccccggcagccagagcaaggacctgctgagacagggcagcaagttcagaagaaacgtgagcaccctgctgatcgagctgggcttccagatcaagaagaagaccaagagactgtacatcaacaaggccaacatctggaacagcgccctggacgccttcagaaacagaaacttcaaccccagctacgccatcgaggtggcctacgtgatcgagaacgacaacttcggcagcgagcaccccggcagcaagcaggagttcctgagcctgctgatgcagcacctggagaacagcagcctgttcgagggcagcctgagcaagaacctgagcctgaacagccaggccctgaaggagaacctgtactacgaggccggcaagatgctggccatcagcctggtgcacggcggccccagccccggcttcttcagcaagaccctgttcaactgcctggtgtacggccccgagaacacccagcccatcctggacgacgtgagcgacttcgacgtggcccagatcatcatcagaatcaacaccgccaccaccgtggccgacctgaagagcatcatcaacgagtgctacaactacctggagctgatcggctgcctgagactgatcaccaccctgagcgacaagtacatgctggtgaaggacatcctgggctaccacgtgatccagagagtgcacacccccttcgagagcttcaagcagggcctgaagaccctgggcgtgctggagaagatccaggcctaccccgaggccttctgcagcatcctgtgccacaagcccgagagcctgagcgccaagatcctgagcgagctgttcaccgtgcacaccctgcccgacgtgaaggccctgggcttctggaacagctacctgcaggccgtggaggacggcaagagcaccaccaccatggaggacatcctgatcttcgccaccggctgcagcagcatcccccccgccggcttcaagcccacccccagcatcgagtgcctgcacgtggacttccccgtgggcaacaagtgcaacaactgcctggccatccccatcaccaacacctacaaggagttccaggagaacatggacttcaccatcagaaacaccctgagactggagaaggaggagagcagccactacatcggccactag

SEQ ID NO: 194914 - DNA, 5804 bp, Artificial Sequence
  derived and/or modified sequence
gaccgctctttccgggtttgcgagcggaagtggacgaatttgaatcctgtgggccgttgaatgtggctgctcgcggtcggcgtgccccgacgtacagcgggccgggaaaagtggcactgaggctctggaacttctgcccagctctccttgtaaaatgaatgaaagtaaacctggtgactcacagaaccttgcttgtgttttctgtcgaaaacatgatgactgtcctaataaatacggagaaaagaaaactaaggagaaatggaatctcactgtacattactactgtttgttgatgtcaagtggaatttggcagagaggcaaagaagaagaaggagtttatggttttctaatagaagatatcaggaaggaagtgaatagagcttctaaactgaaatgctgtgtttgcaagaaaaatggtgcttcaattggatgtgttgcaccccgatgtaaacgaagttatcatttcccatgtggacttcagagagaatgtattttccagtttactggcaattttgcgtcattttgttgggaccatcgacctgttcaaataattacatctaataattatagagagtccttaccatgcaccatttgcttggaatttattgagcctattccaagttataacatattacgaagtccttgttgtaagaacgcttggtttcatagagactgtttacaggttcaagcaataaatgcgggagtgtttttctttaggtgtacaatatgcaataatagtgacatctttcagaaagagatgttgagaatgggaattcatattcctgaaaaagatgcttcctgggaattagaggaaaacgcttatcaagagcttctgcagcactatgagcgttgtgatgttcgaagatgtcgttgcaaagaagggcgagactataatgcacctgatagcaaatgggaaataaagcgctgtcagtgttgtggttccagtggcacacatttagcctgctcctcattacggtcatgggagcaaaattgggagtgtttggaatgtaggggtattatctacaattcaggagagttccaaaaagccaaaaaacatgtattacccaattctaataatgtggggattacagattgtttgttggaagagtcatcacctaaattacccagacagtcacctggatcccagagtaaagatctactgaggcaaggcagcaaatttagaagaaatgtatcaacactattaatagagttaggattccaaattaaaaaaaaaactaaaagattgtatatcaacaaagccaatatctggaatagtgccttagatgcattcagaaatcgaaactttaatccttcatatgcaattgaagtagcatatgttattgaaaatgataattttggaagtgagcatcctggatcaaagcaagaatttctgagtctcttaatgcaacatcttgagaactcatcattgtttgaagggtccttgtcaaagaacttgtctctaaattctcaagctctgaaagagaatctttactatgaagctggcaaaatgcttgccatttctttagttcacggtggtccttcacctggtttcttttctaaaaccttgtttaactgccttgtttatggaccagaaaatacccagccaattttagatgatgtttcagactttgatgtggcacagattataatcaggataaatactgcaacaactgtagctgacttaaagtcaataataaatgaatgctataactaccttgagttaattggatgtctcagacttataacgacattaagtgataaatatatgttagtaaaagacatacttggctaccatgtaattcagagagtccacacaccctttgaaagttttaagcagggtctgaaaacccttggtgttttggagaaaattcaggcttatccagaagcattttgtagcatcctgtgtcataaacctgagagtctttctgcaaaaatccttagtgagctttttacagtacacacattacctgatgtgaaagctttggggttttggaacagttacttacaggctgttgaagatggtaaatctacaacaacaatggaagacattcttatttttgcaactggttgcagttccattcctccagctggatttaaacccactccttcaattgagtgtctgcatgtggattttcctgttggaaacaagtgtaataactgtttagcaattcccatcaccaatacatataaagagtttcaagaaaatatggacttcaccataagaaacactctaagactagaaaaggaagaaagttctcattacattggacattaaaatgtttccttgaacaaagagaagcttctttaaaagctgctattgataactctcttttatttcactaaccttttcatcatcactttgaacaaactagttagcttcttgacctaataaaatttatgatatgaatataaaggaatattatagccacttaggctaaaaaaaggttttttttgttaaagcatactagtcaaaattggtgataatttctcattttcttgatatagatacttcataaacctcaatataaatactctcaaaatggttgtatggattttatttaggtatggtagcatggttaataaaagtaaaaactgttttactcacattttttgtaaattaggattacatatagaatgccacaatttctctaggtttattcaattttcaaattattcctcattttattttaaagcattaaatagaaaagctaattggttaaattttgttatataaatcagagtcatatattctgggatttgtgttactatgcatacttttctaggatgtcaccaaattagttgtttaaaatgtttttagattactgatttatattaagatgacccacactgcaattagattatgcctagtgggaagtattatataaaaagcagaattaagctgggcacatgtgcttgtaatctcagttataagggaggctgaggtgggagaatcgagatactcagccagcctggcaatgtagcaaagactccatctcaaaaaaaaaaacagaattgcacaaattttctggaatctatggacattccatgagcttaaacacttttgaggtggataacatttagttgaaaatacctaagaaagtgtgtcttctttaaagccttggctttaatcatgggaaattgttgttgttgttgttgttgtttgtatcctatgtttggtattctgtatgtctgatccataatcattttagatatttgaatgatctctgtggattggtaggtttggccatttgaccattatttattatcaagttggttgtatgctaaggtaagttgacgccatagcattatacagttatcttcattgctcttgaatgatatctgttatataagcaatgtataaataaagtaaaaaggatagaatgaaaaacccattctaatgtcaccactcagagataagtaccgtatttctgtgtatccttctataaactctttacttctgtttcctttattttttaactttaataatgctactaaaagacaatacctaaaagtaactgtactaacaaagtgctaacaatgtgaaaatatatagtcccatagtcatgtccccatatttatactcccacagaagaaaaaattggaaaacaaagtctgatgtccttaatctattaacatatttaaatgatataatggttcagttttccatgaaagtaaatcattatgggaagtaaaatgttttaaccatatttttcttaatacacaaagcaggtgtcagctgttgtattctcacccttcttaagaaaaatcattacattattgatattttttaagtaacagaatagatttgaaagagataatatatctcttaataccaaaggaaaactaaaacataattctagtgtacttttctttgttccctcatgtctttttcaatctgtacactaacatacctagcaaatttgttttactttaacttgaaatatttaagaacattaaacaagacatttctttggctttggttgaatttttttgtctcaccaatagtaattgaaagatcaattatcaaagagtttgaatagctaatataaaccccaaagtcaccatacagtttttattccaaatatgttgataaaaagatatttgtttctttatccaccttatttttattacagctaaaaaccaatacaaaccaataaaacctagttaaagctattttctggtttttagttgcaattaatttcccctagggtagaaattaaagctgattaagtcacacacacatactttgttggggtgggggtggcaggtggagaggcagtgtacttgggttagctacaattaaaaacagtatttcaattcctcatttgacttattttatatatagacagggccttagtgataagatggtgtaaataatttaggatattcatgttttaaagtgaagcataaatatttattttgcaaaatgttttctagtttgaaggatgttccattattaccatttttagattaatctgtatggtcaaggaatatcagagaaacctgtaggttatttattttctgcagtgtcattttgtcaaatggttggtattataattgttcttttcttattaattttataaccagtgcataattcttacattagattttaaaaaagaattatgctataaatctttataaatgtgtacatatatttcttaaatattgcaattgcctaaatgttgtatattttaaggctgttttctcttgctcttaatgttgaggaaaactataaattgatctataatgcatctactgttaatggttttggttagtttgatattcattgtttttaaacactttccaatatggaaactttaacaccttttatacaattctctactattcaagatattctttaaaatatctcaccagaaacttacaattttatactttgtaatttttagtttctgtaatttgaggaagtgactttttttgtttgggttaagtaaaaagcctttgattgattaccagcatgagaattcaccttggtttctattttatgcatttgtaaatttttcccctaattatatggaagctattggaacttttgtattcagtgctaaatactaagtcaaggggagtatattaggtaagttttttcagtgactgtgcctttagcattcagtcattataagaaaatgatcagaacaaaatcattacattataaacatgtaattcttttatatagtgattatcatgtactgcattgttactttaaaataagctattaaactagtttttatggttcaagtaatgcaatacaaagtttcatgcttcaagtaatgcaatacaaaacataacccatttaatgatgaattacttgaatgtatattatctgtggtttaggaaaatttggattgtcttgaagagactcagttttcaagttctgattttgaccattatctcttctaattcataaacatatcccagtacctacactatgccaggtattatgctaggtgatcgtttatatgtcagcctatttcccccccttttaaagactgccagattaaccaaaaagcgtgacatttataacaatgttttataaataaataaatgtgtttatgccactaaaggtaaactgcctatttaaactaagtaattttttgggatttaataagattaagattctgacgaaactgaaagatacaagattcctttactctccacatttgagagatcctataagcaagcagttagtgtctgacacccaggaacctatagaaatgagggaatctgtgttaaaactatgtatcctctaatgtaaaatagcttaccagaataaattatttaagccaaaa

SEQ ID NO: 194915 - DNA, 2211 bp, Artificial Sequence
  derived and/or modified sequence
atgctgattccggcactgcaaatttcggatagtgaatctgtgggtttggaggatggcattgagcaatccgcttacctgaccgagtctaaaatgaacgagagcaaaccaggtgatagtcaaaatctagcctgcgtgttctgccggaaacatgatgactgccctaacaaatatggggagaagaaaacaaaggaaaagtggaacctgacggtacattactattgcctcctgatgagcagcggcatctggcaaaggggaaaggaggaagagggagtctacggcttcttgattgaagatattaggaaagaggtgaaccgggcgtctaaactcaaatgttgtgtgtgcaagaagaatggagcctctattgggtgtgtggcccctaggtgcaagcgctcctatcattttccctgcggcttgcagcgcgagtgtatattccagtttactggcaacttcgcctcattttgttgggaccaccggcctgttcagattatcaccagcaataactatcgcgaatcccttccttgcaccatctgcctggagttcatcgagcccatccctagctacaatatacttcgaagtccctgctgcaagaacgcatggttccatcgagactgtcttcaagtgcaagctattaatgcgggtgtatttttctttcggtgtacgatctgtaataacagcgacatatttcagaaagaaatgctgagaatgggcatccacatccccgagaaggatgcctcctgggaacttgaggagaacgcttatcaagagttgttgcaacactatgagcggtgtgatgtgaggcggtgcagatgtaaagaaggtagggattacaatgcaccagactctaagtgggagatcaaacgctgccaatgttgtgggtctagcggaacccatctggcttgttccagtctgcggtcttgggagcagaattgggagtgcttggagtgtaggggaattatatataactccggtgaatttcagaaagctaagaagcacgtccttcccaacagtaataacgtcggaatcactgactgcttgttggaagaaagcagcccaaagctgccccggcaaagccctggttctcagagcaaggatctccttcggcaaggatcgaaatttaggaggaatgttagcaccctcttgatagagctgggatttcagattaaaaaaaagacgaagagactttatatcaacaaagcgaacatctggaatagcgctctcgacgcttttcgcaataggaattttaacccgtcctacgccatcgaggtggcctacgtgatcgagaacgacaatttcgggtccgagcacccaggctccaaacaggagttcctgtcccttcttatgcagcatctggaaaacagtagccttttcgaggggtcactgtctaagaatctaagcctgaacagccaggccctgaaagaaaacttgtattacgaagccggcaagatgctggcgattagcctcgtccatggaggaccttctccagggtttttctccaagaccctgttcaattgtttggtatatggccctgagaatacgcagcccatccttgacgacgtgtcagattttgacgtggctcaaattatcattaggattaacacggcaactacggtcgctgaccttaaatcaataattaacgaatgctataactatctggaactgataggctgtctgcgactcataactactctgagtgacaaatatatgctggtgaaagatatactcggctaccacgtaattcagcgggtccacaccccattcgaaagttttaaacagggacttaagaccctgggagtgctcgagaagatccaagcatatccggaagcattctgcagcatactctgtcacaagccagagagcctgtccgctaagatcctaagtgaactcttcaccgtgcatactctgcccgacgtgaaggccctgggcttctggaatagctaccttcaggccgtggaggacgggaaatccactaccaccatggaagacattcttatcttcgcaaccggttgtagctcaatccctccagccggctttaagcccaccccctccattgaatgcttgcacgtggattttcccgtcggtaacaaatgcaacaactgtctggcaattccaattacgaatacatataaggagtttcaggagaatatggactttactattagaaatacactacgactggagaaggaagagtcctcacactatatcgggcattag

SEQ ID NO: 194916 - DNA, 2211 bp, Artificial Sequence
  derived and/or modified sequence
atgctgatcccagccctgcagatcagtgacagcgagagcgtgggcctggaggatggcatcgagcagagcgcctacctgacagagagcaagatgaatgaaagcaagccaggggacagccagaacctggcctgtgtgttctgcaggaagcatgatgactgccccaacaagtatggagagaagaagaccaaggagaagtggaacctgactgtgcactactactgcctgctgatgagcagcggcatctggcagaggggcaaggaggaggagggcgtgtatggcttcctgattgaggacatcaggaaggaggtgaacagagccagcaagctgaagtgctgcgtgtgcaagaagaatggagccagcatcggctgtgtggccccccgctgcaagaggagctaccacttcccctgtggcctgcagcgggagtgcatcttccagttcaccggcaactttgccagcttctgctgggaccacaggcctgtgcagatcatcaccagcaacaactaccgggagagcctgccctgcaccatctgcctggagttcatcgagcccatccccagctacaacatcctgcggagcccctgctgcaagaatgcctggttccaccgggactgcctgcaggtgcaggccatcaatgctggggtcttcttcttccgctgcaccatctgcaacaacagcgacatcttccagaaggagatgctgaggatgggcatccacatccctgagaaggatgcctcctgggagctggaggagaatgcctaccaggagctgctgcagcactatgaaagatgtgatgtgcggcgctgccgctgcaaggagggccgggactacaatgccccagacagcaagtgggagatcaagcgctgccagtgctgcggcagcagcggcacccacctggcctgcagcagcctgcgctcctgggagcagaactgggagtgcctggagtgccggggcatcatctacaacagcggggagttccagaaggccaagaagcacgtgctgcccaacagcaacaacgtgggcatcacagactgcctgctggaggagagcagccccaagctgccccggcagagccctggcagccagagcaaggacctgctgcggcagggcagcaagttcagaagaaatgtgtccaccctgctgattgagctgggcttccagatcaagaagaagaccaagaggctgtacatcaacaaggccaacatctggaacagcgccctggatgccttcaggaacagaaacttcaaccccagctatgccatcgaggtggcctacgtgattgaaaatgacaactttggaagtgagcaccctggcagcaagcaggagttcctgagcctgctgatgcagcacctggagaacagcagcctgtttgagggcagcctgagcaagaacctgagcctgaacagccaggccctgaaggaaaatctctactatgaagctgggaagatgctggccatcagcctggtgcatggaggccccagccctggcttcttcagcaagaccctcttcaactgcctggtgtatggccctgagaacacccagcccatcctggatgatgtgtctgactttgatgtggcccagatcatcatccgcatcaacacagccaccaccgtggccgacctgaagagcatcatcaatgaatgctacaactacctggagctgattggctgcctgcggctcatcaccaccctgagtgacaagtacatgctggtgaaggacatcctgggctaccacgtgatccagagggtgcacaccccatttgagagcttcaagcagggcctgaagaccctgggcgtgctggagaagatccaggcctacccagaggccttctgcagcatcctgtgccacaagccagagagcctgagcgccaagatcctgtctgagctgttcaccgtgcacaccctgcctgatgtgaaggccctgggcttctggaacagctacctgcaggccgtggaggatggcaagagcaccaccaccatggaggacatcctgatctttgccaccggctgcagcagcatccccccagctggcttcaagcccacccccagcattgagtgcctgcacgtggacttccctgtgggcaacaagtgcaacaactgcctggccatccccatcaccaacacctacaaggagttccaggagaacatggacttcaccatccggaacaccctgcggctggagaaggaggagagcagccactacatcggccactag

SEQ ID NO: 194917 - DNA, 2211 bp, Artificial Sequence
  derived and/or modified sequence
atgctgatccccgccctgcagatcagcgacagcgagagcgtgggcctcgaagatggtatagaacaaagcgcatatctcacagaatctaagatgaacgagtccaagccgggtgactcccagaatctcgcatgcgttttctgccggaaacacgacgactgcccaaataaatatggcgagaagaagaccaaagagaagtggaacttaaccgttcattattattgcctcctaatgtcatccggcatctggcagaggggcaaggaagaggaaggtgtgtacggtttcctcatcgaggacatcagaaaggaagtgaaccgtgcttcgaagctgaaatgttgtgtgtgtaagaaaaatggtgcttccatagggtgcgtcgcccctaggtgcaagaggagttatcatttcccttgcggtctccagcgggaatgcatcttccaatttaccggaaacttcgcgtcattctgctgggaccataggcccgtacagataattacaagcaacaactaccgcgaatcactaccttgtaccatctgtttggaatttattgaaccgatcccatcatataatatccttcgcagcccgtgctgcaagaatgcttggtttcaccgcgattgtctccaggtgcaggctattaatgccggcgtgttcttctttcgctgcactatatgtaataacagtgatatcttccagaaggagatgctgcgtatgggcatccatatcccagaaaaggacgcttcctgggagctggaagaaaacgcataccaggagctgctacaacattacgaaaggtgcgatgttcgcaggtgccggtgtaaagagggaagagattacaacgcgcctgactctaaatgggaaattaaacgctgccaatgctgtggatcaagtggaacgcatctggcctgcagctccctgaggagttgggagcaaaattgggagtgcctggaatgtcgaggcatcatctataactctggggaatttcagaaggcgaagaagcatgtgttgcccaacagcaataacgtgggcattacagactgcctcctcgaggaatcatccccaaagctgccccggcagagccctggttcccagtcaaaagacctcctgaggcagggctcgaaatttcgacgcaacgtttctaccttactcatcgaattgggcttccagatcaaaaagaaaactaagcgactgtacattaacaaggctaatatttggaattcagcgttagacgctttccgcaaccggaacttcaaccccagctacgccatcgaagtagcctacgtcattgaaaacgataatttcggctcggaacaccccggctccaagcaggagttcctgtccctgttgatgcagcatctcgagaactcatcactgtttgaaggatctcttagcaaaaatctctctctgaactctcaggccctgaaagagaacttatactacgaggcgggcaagatgctggcgatttcgctggtccatggaggcccttccccaggtttcttcagtaagactttgttcaactgcttggtctacggacccgaaaatacacaaccaatattggatgatgtcagtgattttgacgttgcgcagattataattaggatcaacaccgcgactacagtggccgatctgaaatcaatcataaatgagtgttataactacctggagctgatcggctgcttgcggttgatcacgaccctgtctgacaagtacatgctggtgaaggatattctgggctatcacgtgattcaaagggttcacacgccctttgagtcgttcaaacaggggttgaaaaccctaggagtgctggagaagatccaggcttaccctgaggccttttgttccatcctgtgccacaagcccgagtcactgagtgccaaaatcctgagcgagctctttacagtgcacactctaccggacgttaaagctctcgggttttggaatagttacctgcaagcggtagaggacggcaagtcgaccaccactatggaagatattctgattttcgccaccggctgctctagtattccacctgctggcttcaaacctacgccgtccatagaatgcctccatgtggactttcccgttggaaacaagtgtaacaattgccttgcaattcctatcacaaatacctacaaggaatttcaggagaatatggacttcaccatcagaaacactctgaggctagagaaagaagagtccagccactacattggccattag

SEQ ID NO: 194918 - DNA, 2211 bp, Artificial Sequence
  derived and/or modified sequence
atgttgattccggcactgcagattagtgactctgagagcgtgggcctagaggatggcatcgagcagtcagcctacctgaccgagtctaaaatgaatgagagtaagccaggagattcccaaaatctggcctgcgtgttctgtagaaaacatgatgattgccccaacaaatatggtgagaaaaagaccaaagagaaatggaatttaaccgtgcattattattgtttgctaatgtccagcggcatttggcagcgcggaaaggaagaagaaggagtctacggattcctgatcgaagatattcgcaaggaggtgaaccgggcttcaaagctcaaatgttgcgtgtgtaagaagaatggtgcatccatcggatgcgtggctccgagatgtaaacgctcatatcattttccctgcgggctccagcgggagtgcattttccagttcaccggcaactttgctagcttttgttgggaccacagaccagtccagatcattaccagtaacaattaccgagaaagcctcccatgcactatctgcctggaattcatcgaaccgatcccgtcatataacattctccggtcaccatgctgtaaaaatgcatggttccatcgagattgtctccaagtgcaagccatcaatgctggtgtcttctttttccgctgtaccatatgcaacaacagcgatatcttccagaaagaaatgcttagaatgggcatccacattccagaaaaagacgcctcctgggagttggaggagaacgcttatcaggagttactgcaacactacgagcggtgtgacgtgcgaagatgtcgatgcaaggaaggtagggactacaatgcccctgattccaaatgggaaatcaaaagatgtcagtgttgtgggagttctggtacacatctggcctgttcaagcctgcggtcttgggagcagaactgggaatgtcttgagtgtaggggcattatatacaattccggcgaatttcagaaagctaagaaacacgtcttgcctaattctaataatgtgggaattactgattgccttctggaggagtcctcccctaagcttcctcgtcagtccccgggatctcagtccaaggacctgctgcggcagggcagtaagtttcgcaggaacgtgtctactctcctgatagagctcggttttcagattaaaaagaagaccaagcggctctatattaacaaggcgaatatttggaatagcgccctggacgcctttcggaaccgcaacttcaatccgtcttacgccatcgaggttgcctacgtaatcgagaacgacaacttcggaagtgagcacccaggcagcaagcaggaatttctgagcctgctgatgcaacatctcgaaaacagttccctgttcgagggaagcttatccaagaacttgtctttgaatagtcaagcccttaaagagaacttgtactacgaggcgggtaaaatgttggccatttcacttgtgcatggcggtccaagccccggttttttttccaagaccctcttcaactgcttggtgtatggtccggagaatactcagcctattctggatgacgtatcagattttgatgttgcccagatcattatccgcataaatacagccaccacagttgcggacttaaagtccattattaacgaatgctacaattaccttgagcttatcggctgcttacgactgataacaactctctctgataagtatatgctagtcaaggacatccttgggtatcatgtgatccagcgcgtgcacacgccttttgagagttttaaacaggggttaaaaaccttaggtgtgcttgagaagattcaggcgtaccctgaggccttttgcagtatactctgtcacaaacctgaaagtctatccgccaagatcctatcggagctattcaccgtgcatacgctgcccgacgtcaaagccctcggcttctggaactcatatctccaggcggtggaggacggaaagtctacgacaaccatggaggacatcctgatctttgcgaccggatgctcctccatcccccctgccggattcaagcctacgccaagcatcgaatgccttcacgtcgacttcccagtcggtaataaatgtaacaattgcctggctatcccaataacgaacacatacaaagaattccaggaaaacatggactttacaataaggaacacactgcgcctggaaaaagaggaatccagccattatatcggtcactag

SEQ ID NO: 194919 - DNA, 3796 bp, Artificial Sequence
  derived and/or modified sequence
agagagagaagcaggaccgtggggtgggagagggtgtcaggaggccggacgtcgcagccggggcctcgcagtgcttttggggacgtctggtgctggggcccggcctggagactaagggaattcggggcactgggggcgtttgctggaccagcgctctcgacggttgcgcacgccagccagctctcagtgttgaggattcggaggccctgccggtcccccgcgagtaaaccttgtttatacgcatcctccgtggctttttttaaacccgtagtttattatttccaccaattcggctcgaatgctgaaattttaacagtagttaaatctcactgtgaaggcgttgccacgtttaaacaaatctcttttaatgaaagatggaaggttggggcgggtttagaatgaaaagatgctctacgtggctccgcgttcctcctgagagagatacccgggcaaccttgattaactctggactgcagggaagtgacagtctttgaaatgcctgagtgggatttaaactgaaattcgagtgtcctttgtatttaaaacccggatatttttctttcacggttgacatttttcatgtaccgcaaaaatccgagactcctatttaaaccggctgtggtaacagcggtggtgattaactagggtcttagtttgcaaacaatagggataaggtttagttccaccgccctgccttttcgcctccctcattcattggccaactgggttattatggagtctttttggaagtaatccactaatgctttgagcatctgtttctttgggttttattgttttgggcttttttttttttaatttttaatgatgaactatctgaaatatggaactctgtctaacccagtagtaaagtcatgccttctggaatggtttaaaagtgtgccataaatgtaaactataaatgggaactttaaatgtgtacaagttttacatctttattaaaaatcgtcagttttgtgtagcttaatacgaaaagatattttaagttccttttaaggttttaacaccaggatattgtaccatttaaatgtataaatatatttttaaaagtaggacttcataataatcagaataaaaacattccttcatccagtgctggctattccagcacccccattcttcctgctattgaacttttaagtgttagccaggaagaatagacttaaatactcggtgtttaggatagttaaaatatgagcatttttcatatagtgtctttgtaacagagacattggctatacttctctaagcctttctgctcatttcatatgtgctgtcaacaaatggtaatttttaaaaattgatcgctatatcctaatctctttatttttttctacctgaattattttcattggatttttgctctttcttaaatcagtgagtttcagaatttattgtgtatacactaccttgaaggatttgttcaacaatgctgattcctgcacttcagatctcagattctgaatcagtaggtctggaggatggcattgaacagtctgcatatttaactgaaagtaaaatgaatgaaagtaaacctggtgactcacagaaccttgcttgtgttttctgtcgaaaacatgatgactgtcctaataaatacggagaaaagaaaactaaggagaaatggaatctcactgtacattactactgtttgttgatgtcaagtggaatttggcagagaggcaaagaagaagaaggagtttatggttttctaatagaagatatcaggaaggaagtgaatagagcttctaaactgaaatgctgtgtttgcaagaaaaatggtgcttcaattggatgtgttgcaccccgatgtaaacgaagttatcatttcccatgtggacttcagagagaatgtattttccagtttactggcaattttgcgtcattttgttgggaccatcgacctgttcaaataattacatctaataattatagagagtccttaccatgcaccatttgcttggaatttattgagcctattccaagttataacatattacgaagtccttgttgtaagaacgcttggtttcatagagactgtttacaggttcaagcaataaatgcgggagtgtttttctttaggtgtacaatatgcaataatagtgacatctttcagaaagagatgttgagaatgggaattcatattcctgaaaaagatgcttcctgggaattagaggaaaacgcttatcaagagcttctgcagcactatgagcgttgtgatgttcgaagatgtcgttgcaaagaagggcgagactataatgcacctgatagcaaatgggaaataaagcgctgtcagtgttgtggttccagtggcacacatttagcctgctcctcattacggtcatgggagcaaaattgggagtgtttggaatgtaggggtattatctacaattcaggagagttccaaaaagccaaaaaacatgtattacccaattctaataatgtggggattacagattgtttgttggaagagtcatcacctaaattacccagacagtcacctggatcccagagtaaagatctactgaggcaaggcagcaaatttagaagaaatgtatcaacactattaatagagttaggattccaaattaaaaaaaaaactaaaagattgtatatcaacaaagccaatatctggaatagtgccttagatgcattcagaaatcgaaactttaatccttcatatgcaattgaagtagcatatgttattgaaaatgataattttggaagtgagcatcctggatcaaagcaagaatttctgagtctcttaatgcaacatcttgagaactcatcattgtttgaagggtccttgtcaaagaacttgtctctaaattctcaagctctgaaagagaatctttactatgaagctggcaaaatgcttgccatttctttagttcacggtggtccttcacctggtttcttttctaaaaccttgtttaactgccttgtttatggaccagaaaatacccagccaattttagatgatgtttcagactttgatgtggcacagattataatcaggataaatactgcaacaactgtagctgacttaaagtcaataataaatgaatgctataactaccttgagttaattggatgtctcagacttataacgacattaagtgataaatatatgttagtaaaagacatacttggctaccatgtaattcagagagtccacacaccctttgaaagttttaagcagggtctgaaaacccttggtgttttggagaaaattcaggcttatccagaagcattttgtagcatcctgtgtcataaacctgagagtctttctgcaaaaatccttagtgagctttttacagtacacacattacctgatgtgaaagctttggggttttggaacagttacttacaggctgttgaagatggtaaatctacaacaacaatggaagacattcttatttttgcaactggttgcagttccattcctccagctggatttaaacccactccttcaattgagtgtctgcatgtggattttcctgttggaaacaagtgtaataactgtttagcaattcccatcaccaatacatataaagagtttcaagaaaatatggacttcaccataagaaacactctaagactagaaaaggaagaaagttctcattacattggacattaaaatgtttccttgaacaaagagaagcttctttaaaagctgctattgataactctcttttatttcactaaccttttcatcatcactttgaacaaactagttagcttcttgacctaataaaatttatgatatgaatataaa

SEQ ID NO: 194920 - DNA, 2121 bp, Artificial Sequence
  derived and/or modified sequence
atgaacgagagcaaaccaggtgattctcagaacttggcatgcgttttctgcaggaaacacgatgattgcccgaacaagtacggggagaagaaaaccaaggagaaatggaacctaaccgtccactactactgccttctgatgagtagcggcatatggcagcggggcaaagaggaagagggcgtgtatggcttccttatcgaggacatccggaaggaggtgaatcgcgctagtaaattgaagtgctgcgtctgtaagaagaacggcgcttcaatcggatgcgttgcgccccgatgcaaaagaagctaccactttccctgtgggttgcaacgcgaatgcatcttccaattcaccggaaattttgcttccttttgttgggatcatagacccgtccagataattacaagtaacaattaccgggagtccctcccctgtactatatgtctggagttcatagaaccaattcctagttacaacattctaagaagcccctgttgtaaaaatgcgtggtttcacagagactgcctgcaggtacaggctataaatgccggcgtttttttcttcagatgcactatttgcaacaattctgatattttccaaaaggaaatgctgcggatgggtatacacatacccgaaaaggacgcctcctgggagctggaggagaacgcataccaagagctcctgcagcattatgagcgttgtgatgttaggcgttgccgctgcaaagagggccgtgattacaacgctcccgatagtaagtgggagatcaagaggtgccagtgttgcggctcctctggtacacatctcgcatgttcatctcttcgttcctgggaacaaaattgggaatgtcttgagtgtcgcgggatcatttataatagcggcgaatttcagaaggctaaaaagcacgtgctgcccaatagcaataatgtcggcatcacggactgccttttagaggagtccagtccgaagctgccacggcagagtcccgggagccagtctaaggatttgctgagacaagggtccaaattccggaggaatgtatctaccctgctcatcgagctcggcttccaaatcaagaaaaaaactaaaaggttgtacatcaacaaagccaatatttggaattctgctctggatgcatttcgtaaccgaaacttcaacccgagctacgctatcgaagtggcatacgtgattgaaaacgataactttggcagtgagcaccctgggagcaaacaggagttcctgtcccttctgatgcagcacctagaaaatagctcattattcgagggctctctgagtaaaaatctttctctaaacagtcaggctctcaaggaaaatctgtattacgaggcaggaaaaatgttagcaatctccctcgtgcacgggggtcccagtcctggattctttagcaaaaccctctttaattgcctagtgtatggcccagaaaacacccagcctatcctggatgatgtgagtgactttgatgtagcccagattattattagaatcaacactgctacaactgtggccgacttaaagagcatcatcaatgaatgctacaactatctggagctgattggctgtctgaggttgatcacaactctcagcgacaagtacatgctggtcaaagacatcctgggataccacgttatccagagagtgcacacacctttcgaatctttcaaacaagggctgaagacactcggggtgcttgagaagatccaggcctaccctgaggcattttgctctattctgtgtcataagcctgagagcttatctgcgaaaattttgagcgaactgttcacagtccacactttacctgatgtgaaagcccttgggttttggaacagttatctgcaggccgttgaagatgggaaatccactaccactatggaagacatcttaatcttcgcgacgggatgctcaagcattcctcccgccggtttcaaaccgactccttccatagagtgtctgcatgtggatttccctgttgggaataaatgtaataactgccttgcaatccctataacgaacacatataaggagttccaggaaaatatggatttcacgatacgcaacaccttgagactcgagaaggaggagagcagtcactacataggccattag

SEQ ID NO: 194921 - DNA, 2121 bp, Artificial Sequence
  derived and/or modified sequence
atgaatgaaagcaagccaggggacagccagaacctggcctgtgtgttctgcaggaagcatgatgactgccccaacaagtatggagagaagaagaccaaggagaagtggaacctgactgtgcactactactgcctgctgatgagcagcggcatctggcagaggggcaaggaggaggagggcgtgtatggcttcctgattgaggacatcaggaaggaggtgaacagagccagcaagctgaagtgctgcgtgtgcaagaagaatggagccagcatcggctgtgtggccccccgctgcaagaggagctaccacttcccctgtggcctgcagcgggagtgcatcttccagttcaccggcaactttgccagcttctgctgggaccacaggcctgtgcagatcatcaccagcaacaactaccgggagagcctgccctgcaccatctgcctggagttcatcgagcccatccccagctacaacatcctgcggagcccctgctgcaagaatgcctggttccaccgggactgcctgcaggtgcaggccatcaatgctggggtcttcttcttccgctgcaccatctgcaacaacagcgacatcttccagaaggagatgctgaggatgggcatccacatccctgagaaggatgcctcctgggagctggaggagaatgcctaccaggagctgctgcagcactatgaaagatgtgatgtgcggcgctgccgctgcaaggagggccgggactacaatgccccagacagcaagtgggagatcaagcgctgccagtgctgcggcagcagcggcacccacctggcctgcagcagcctgcgctcctgggagcagaactgggagtgcctggagtgccggggcatcatctacaacagcggggagttccagaaggccaagaagcacgtgctgcccaacagcaacaacgtgggcatcacagactgcctgctggaggagagcagccccaagctgccccggcagagccctggcagccagagcaaggacctgctgcggcagggcagcaagttcagaagaaatgtgtccaccctgctgattgagctgggcttccagatcaagaagaagaccaagaggctgtacatcaacaaggccaacatctggaacagcgccctggatgccttcaggaacagaaacttcaaccccagctatgccatcgaggtggcctacgtgattgaaaatgacaactttggaagtgagcaccctggcagcaagcaggagttcctgagcctgctgatgcagcacctggagaacagcagcctgtttgagggcagcctgagcaagaacctgagcctgaacagccaggccctgaaggaaaatctctactatgaagctgggaagatgctggccatcagcctggtgcatggaggccccagccctggcttcttcagcaagaccctcttcaactgcctggtgtatggccctgagaacacccagcccatcctggatgatgtgtctgactttgatgtggcccagatcatcatccgcatcaacacagccaccaccgtggccgacctgaagagcatcatcaatgaatgctacaactacctggagctgattggctgcctgcggctcatcaccaccctgagtgacaagtacatgctggtgaaggacatcctgggctaccacgtgatccagagggtgcacaccccatttgagagcttcaagcagggcctgaagaccctgggcgtgctggagaagatccaggcctacccagaggccttctgcagcatcctgtgccacaagccagagagcctgagcgccaagatcctgtctgagctgttcaccgtgcacaccctgcctgatgtgaaggccctgggcttctggaacagctacctgcaggccgtggaggatggcaagagcaccaccaccatggaggacatcctgatctttgccaccggctgcagcagcatccccccagctggcttcaagcccacccccagcattgagtgcctgcacgtggacttccctgtgggcaacaagtgcaacaactgcctggccatccccatcaccaacacctacaaggagttccaggagaacatggacttcaccatccggaacaccctgcggctggagaaggaggagagcagccactacatcggccactag

SEQ ID NO: 194922 - DNA, 2121 bp, Artificial Sequence
  derived and/or modified sequence
atgaacgagagcaagcccggcgacagccagaacctggcctgcgtgttttgccgaaaacatgatgactgtcctaataaatatggcgaaaaaaaaaccaaagaaaagtggaaccttaccgttcattactactgcctgcttatgagcagcggcatctggcagcgcgggaaggaagaagagggggtctacggatttttgattgaagatatccggaaggaggtgaatagggcgtccaagttgaagtgttgtgtttgcaagaagaacggcgcgtccattggttgcgtagctccccgatgtaagcggtcttaccacttcccctgcggactgcagcgcgagtgtatcttccagtttaccggaaattttgcttccttttgctgggaccatcgcccagtacagatcataacctctaataattatcgcgaaagtctcccttgcacaatttgtctggaattcatcgaaccgattccgtcatacaatatcctgcggagtccttgctgcaaaaacgcctggttccatcgagattgccttcaagtacaagctattaatgccggtgtgttcttcttccggtgcactatctgtaacaacagtgatattttccaaaaagagatgttgaggatgggcattcacataccagaaaaggatgcctcttgggaactggaggaaaacgcctatcaggaactgctgcaacactatgaacggtgtgacgtgagacggtgccgatgtaaggaaggaagagattataacgcaccagatagtaagtgggagattaagagatgccaatgctgcggttcgtctgggactcatctggcatgtagttcattaagaagctgggagcagaactgggagtgcctggagtgtcgcgggattatttacaattctggcgagtttcagaaggccaaaaaacacgtgctgccgaacagcaataacgtgggtattacagattgcttactggaagagtcttcaccaaaactgccgaggcagtctcctggttcgcagagcaaagatttgctacgccagggtagtaaattccgacgaaacgtcagtaccctgctgatcgagctcggattccagatcaagaagaagaccaagcgcttatacattaataaagcaaatatctggaacagcgccctggacgcgttccggaaccgaaactttaatccttcctatgcaattgaggtggcttatgtgattgaaaatgataactttggttcagaacaccccggatccaaacaagaatttctgtcactgttaatgcagcatctcgagaatagtagtctgtttgaagggtctctgtcaaagaacctgagccttaactcccaggctcttaaggagaatctgtattatgaggccgggaagatgctcgctatttctttggtccatgggggacctagcccagggtttttctcaaagactctgttcaactgtctggtgtatggacccgaaaatacccaaccaattctggacgatgtttcagacttcgacgtggcacagattatcatccgaatcaacaccgctaccacggtagcagacttaaagtcaataattaatgagtgctataactatcttgagctgatagggtgtctgcgtctcatcaccaccctgtctgacaagtatatgctggtgaaggatatactggggtatcacgtaatccagcgcgtgcacacaccttttgaatcctttaaacaaggtcttaagactctgggtgtgctagagaagattcaggcataccccgaagctttctgctcaatcctgtgccataagcccgaatctctgagcgcgaagatcctttctgaattgtttacggtgcatacgctccctgacgtgaaggctctgggattctggaacagctatctccaggcagtcgaagacggcaagtccaccactaccatggaggacatccttatcttcgcaacgggctgttccagcattccacccgctgggtttaagccaactccttctatagagtgtttgcacgtcgactttccggtagggaacaaatgtaacaattgcctcgccattccgattacgaacacatataaggaattccaggaaaacatggacttcaccatccgcaatacactgcgcctcgagaaggaggagagttcccattacattgggcattag

SEQ ID NO: 194923 - DNA, 2121 bp, Artificial Sequence
  derived and/or modified sequence
atgaacgagtccaagcctggcgattctcagaacttagcgtgtgtgttctgccgcaagcatgacgactgtcctaacaagtatggggaaaagaaaacaaaagagaagtggaacttgactgtgcattattattgcctgttgatgagcagtgggatctggcaacgcggaaaggaggaggagggcgtgtatggttttctcattgaagatattcggaaggaagttaacagagcttccaagctcaaatgctgtgtgtgcaaaaagaatggagcctccatcggatgcgttgcgccaaggtgcaaaagaagttaccattttccttgcggcctacaacgcgagtgcatcttccagttcaccggcaatttcgcttccttttgctgggatcatcggccagtgcagataatcacgtctaacaactatcgagaatccttgccgtgcactatctgcctagagtttattgaacccatacccagctacaacatcctgaggtctccctgctgcaagaacgcctggtttcatcgggactgtctgcaggttcaagcaattaacgctggtgttttcttcttccggtgtaccatatgtaacaattcggacatctttcagaaggaaatgctgaggatggggatccatattcccgaaaaagacgcctcttgggaactggaagagaatgcctatcaagagctcctacagcactatgagcgatgtgatgttcgtaggtgccgctgcaaggaggggagagactacaatgcacccgatagcaaatgggaaattaagagatgtcagtgttgtggctcatcgggcacacatcttgcgtgtagttccctgagatcctgggagcagaactgggaatgcctcgagtgccgtggtatcatttacaatagtggagagtttcagaaggccaaaaagcatgtgctgcccaatagcaataacgttggtatcaccgattgcctcctggaggagtccagtcctaagctgccaaggcagagtcctggtagtcagtcaaaagatctgcttaggcaaggctcaaaattccgcagaaacgtcagtaccctgcttatagagcttgggttccagataaagaaaaaaacaaaacggctctatatcaataaagccaatatttggaactctgccctcgacgcttttagaaacaggaattttaatccctcctacgcaatcgaggtggcctatgtcatcgagaatgacaatttcgggtccgaacaccctggcagcaagcaggaattcctttccctgttgatgcagcaccttgagaattccagccttttcgagggatccttgagcaaaaatctgtccctgaactcccaggcactgaaggaaaacttgtactatgaagcaggaaagatgctcgcgatatccctggtgcacggcggacctagccctggcttctttagcaaaacccttttcaactgcctggtgtatggcccagagaatacccagcccatcttggatgatgtctctgatttcgatgtcgctcagatcattatccgaattaataccgcgaccaccgtggcagacctgaaaagtatcataaatgagtgttacaattacctggagctcatcggatgcctcaggctgattacaactctttccgataaatacatgcttgtaaaggatattctgggataccacgttatccagcgcgttcatacaccatttgagagttttaaacagggtttaaaaacactcggcgtgctagaaaagatccaggcctatcccgaggctttctgctctatcctttgccataaacctgaatctttgtccgctaagattctttccgaactgtttaccgtacacacacttcccgacgtgaaagctttaggattttggaacagctatctgcaggccgtggaagatggcaagtccactacaaccatggaagacatcctgatcttcgccacaggctgcagtagcattcccccagccggattcaaacccacaccctctatcgagtgcctgcatgtggatttccccgtgggcaacaaatgtaacaactgcctggcaatccctattacaaacacctataaggaattccaggagaacatggatttcactataagaaacacactgaggctcgagaaagaggaaagcagtcattatatcggccattag

SEQ ID NO: 194924 - DNA, 2121 bp, Artificial Sequence
  derived and/or modified sequence
atgaacgagagcaagcccggcgacagccagaacctggcctgcgtgttctgcagaaagcacgacgactgccccaacaagtacggcgagaagaagaccaaggagaagtggaacctgaccgtgcactactactgcctgctgatgagcagcggcatctggcagagaggcaaggaggaggagggcgtgtacggcttcctgatcgaggacatcagaaaggaggtgaacagagccagcaagctgaagtgctgcgtgtgcaagaagaacggcgccagcatcggctgcgtggcccccagatgcaagagaagctaccacttcccctgcggcctgcagagagagtgcatcttccagttcaccggcaacttcgccagcttctgctgggaccacagacccgtgcagatcatcaccagcaacaactacagagagagcctgccctgcaccatctgcctggagttcatcgagcccatccccagctacaacatcctgagaagcccctgctgcaagaacgcctggttccacagagactgcctgcaggtgcaggccatcaacgccggcgtgttcttcttcagatgcaccatctgcaacaacagcgacatcttccagaaggagatgctgagaatgggcatccacatccccgagaaggacgccagctgggagctggaggagaacgcctaccaggagctgctgcagcactacgagagatgcgacgtgagaagatgcagatgcaaggagggcagagactacaacgcccccgacagcaagtgggagatcaagagatgccagtgctgcggcagcagcggcacccacctggcctgcagcagcctgagaagctgggagcagaactgggagtgcctggagtgcagaggcatcatctacaacagcggcgagttccagaaggccaagaagcacgtgctgcccaacagcaacaacgtgggcatcaccgactgcctgctggaggagagcagccccaagctgcccagacagagccccggcagccagagcaaggacctgctgagacagggcagcaagttcagaagaaacgtgagcaccctgctgatcgagctgggcttccagatcaagaagaagaccaagagactgtacatcaacaaggccaacatctggaacagcgccctggacgccttcagaaacagaaacttcaaccccagctacgccatcgaggtggcctacgtgatcgagaacgacaacttcggcagcgagcaccccggcagcaagcaggagttcctgagcctgctgatgcagcacctggagaacagcagcctgttcgagggcagcctgagcaagaacctgagcctgaacagccaggccctgaaggagaacctgtactacgaggccggcaagatgctggccatcagcctggtgcacggcggccccagccccggcttcttcagcaagaccctgttcaactgcctggtgtacggccccgagaacacccagcccatcctggacgacgtgagcgacttcgacgtggcccagatcatcatcagaatcaacaccgccaccaccgtggccgacctgaagagcatcatcaacgagtgctacaactacctggagctgatcggctgcctgagactgatcaccaccctgagcgacaagtacatgctggtgaaggacatcctgggctaccacgtgatccagagagtgcacacccccttcgagagcttcaagcagggcctgaagaccctgggcgtgctggagaagatccaggcctaccccgaggccttctgcagcatcctgtgccacaagcccgagagcctgagcgccaagatcctgagcgagctgttcaccgtgcacaccctgcccgacgtgaaggccctgggcttctggaacagctacctgcaggccgtggaggacggcaagagcaccaccaccatggaggacatcctgatcttcgccaccggctgcagcagcatcccccccgccggcttcaagcccacccccagcatcgagtgcctgcacgtggacttccccgtgggcaacaagtgcaacaactgcctggccatccccatcaccaacacctacaaggagttccaggagaacatggacttcaccatcagaaacaccctgagactggagaaggaggagagcagccactacatcggccactag

SEQ ID NO: 194925 - DNA, 891 bp, Artificial Sequence
  derived and/or modified sequence
atggagcaccttaaggccttcgacgacgagatcaatgcctttctggataatatgtttggtccgcgagatagccgcgtgagaggatggtttatgctcgactcctacctgcctacctttttcttaaccgtgatgtacctcctttcgatttggctgggcaacaagtacatgaagaacaggcccgcgctgtccctcagaggaattttaactctgtataatctggggatcacccttctctcagcctacatgttggctgagctaattctcagtacttgggagggcggctacaatttgcagtgccaggaccttacaagcgcaggcgaagccgatattagggtcgccaaagtactgtggtggtattatttctctaaatcggtggagtttctcgacacaatcttcttcgtgttgagaaaaaaaacctcacagatcacctttctgcatgtttaccatcatgccagcatgttcaatatttggtggtgcgtgctgaattggataccctgtgggcaatccttctttggccctaccctgaatagctttatccacattcttatgtatagttactatggcctgtctgtgtttccctccatgcacaagtatttatggtggaaaaaatatctaacccaggcccagctggtgcagttcgtacttaccattacccacacgatgtcagccgtcgtaaaaccatgcggatttccatttggctgtctgatcttccagtccagttacatgctcacactcgtcattctgtttctgaatttttatgtccaaacctataggaagaaaccaatgaagaaggatatgcaggaaccaccagcgggcaaagaggtcaagaacggctttagcaaggcctactttacggctgctaacggagtgatgaacaagaaggcgcagtag

SEQ ID NO: 194926 - DNA, 891 bp, Artificial Sequence
  derived and/or modified sequence
atggagcacctgaaggcctttgatgatgagatcaatgccttcctggacaacatgtttggcccccgggacagccgggtgcggggctggttcatgctggacagctacctgcccaccttcttcctgactgtgatgtacctgctgagcatctggctgggcaacaagtacatgaagaacagacctgccctgagcctgcggggcatcctgaccctgtacaacctgggcatcaccctgctgagcgcctacatgctggccgagctgatcctgagcacctgggagggcggctacaacctgcagtgccaggacctgaccagcgctggggaggccgacatccgggtggccaaggtgctgtggtggtactacttcagcaagtctgtggagttcctggacaccatcttctttgtgctgaggaagaagaccagccagatcaccttcctgcacgtgtaccaccacgcctccatgttcaacatctggtggtgtgtgctgaactggatcccctgtggccagagcttcttcggccccaccctgaacagcttcatccacatcctgatgtacagctactacggcctgagcgtcttccccagcatgcacaagtacctgtggtggaagaagtacctgacccaggcccagctggtgcagtttgtgctgaccatcacccacaccatgtctgctgtggtgaagccctgtggcttccccttcggctgcctgatcttccagagcagctacatgctgaccctggtgatcctcttcctgaacttctacgtgcagacctacaggaagaagcccatgaagaaggacatgcaggagcccccagctgggaaggaggtgaagaatggcttcagcaaggcctacttcaccgctgccaacggggtgatgaacaagaaggcccagtag

SEQ ID NO: 194927 - DNA, 891 bp, Artificial Sequence
  derived and/or modified sequence
atggagcacctgaaggccttcgacgacgagatcaacgccttcctggacaacatgttcggacctagggattctagagtcaggggatggtttatgctggactcatacctgccaaccttctttctaacagtcatgtacttactgagcatatggctgggtaacaagtatatgaaaaaccgtcccgccctgtcccttcgcgggattctgacactttacaatctgggaatcactctgttatctgcttacatgctggccgagctcattctgagtacttgggaggggggctataatcttcaatgtcaggaccttacatccgccggggaggccgacatccgggtggcgaaggtactgtggtggtactatttctcgaagtctgtggagtttttggacactatcttttttgtgctcaggaagaaaacttcacaaattaccttcctccacgtgtatcatcacgccagtatgttcaatatatggtggtgcgtccttaattggatcccatgtggccaatcgttctttgggcccactctcaacagtttcatccacattctgatgtacagctactatggcctgagcgtgtttccatccatgcacaagtacctctggtggaaaaagtatcttactcaagcccagttggtgcagtttgttcttacaatcactcatacgatgtctgctgtggtcaagccatgcgggtttccctttggatgtcttatctttcaatcttcctatatgctcactcttgttatcctgtttcttaatttctatgtacagacttacaggaaaaaacccatgaaaaaggatatgcaagagccacctgcgggcaaggaggtgaagaatgggttttctaaggcgtatttcactgccgcaaacggagtgatgaataagaaggcacagtag

SEQ ID NO: 194928 - DNA, 891 bp, Artificial Sequence
  derived and/or modified sequence
atggagcatcttaaagcgtttgacgacgagatcaatgcatttctggataacatgtttgggccacgcgacagcagggtccgcggttggtttatgctcgactcctacttaccaaccttcttcctcactgtgatgtacctgttgtctatatggttgggcaataagtacatgaaaaacagaccagcactgagccttcgcggtatcctgacactctacaaccttggcataaccctgctgtctgcttatatgcttgcagaactgattctgtccacctgggaaggaggttataatctccagtgccaggacctaacatctgctggcgaggcagacatcagggttgcgaaagtgttatggtggtattacttcagcaagtccgtggaatttcttgataccattttctttgtactcagaaaaaagactagccagatcacttttctgcatgtttaccatcatgcttccatgtttaatatctggtggtgcgtgctcaattggataccatgcggccagtctttctttggacccactctcaacagcttcatccatatcttgatgtattcgtactatggattgagcgtcttccccagtatgcataaatatttgtggtggaaaaagtatctcacccaagcccagttagtacaattcgtcctcaccataacccatactatgtccgctgttgtgaaaccgtgtggattcccattcgggtgcttaatctttcagtcatcctatatgttgactttggtaattttgtttttaaacttctatgttcagacctaccgaaagaaacccatgaaaaaagacatgcaggaaccgcctgcaggcaaggaagttaaaaatggattcagcaaagcatattttaccgccgctaatggggttatgaataaaaaggcccagtag

SEQ ID NO: 194929 - DNA, 891 bp, Artificial Sequence
  derived and/or modified sequence
atggagcacctgaaggccttcgacgacgagatcaacgccttcctggacaacatgttcggccccagagacagcagagtgagaggctggttcatgctggacagctacctgcccaccttcttcctgaccgtgatgtacctgctgagcatctggctgggcaacaagtacatgaagaacagacccgccctgagcctgagaggcatcctgaccctgtacaacctgggcatcaccctgctgagcgcctacatgctggccgagctgatcctgagcacctgggagggcggctacaacctgcagtgccaggacctgaccagcgccggcgaggccgacatcagagtggccaaggtgctgtggtggtactacttcagcaagagcgtggagttcctggacaccatcttcttcgtgctgagaaagaagaccagccagatcaccttcctgcacgtgtaccaccacgccagcatgttcaacatctggtggtgcgtgctgaactggatcccctgcggccagagcttcttcggccccaccctgaacagcttcatccacatcctgatgtacagctactacggcctgagcgtgttccccagcatgcacaagtacctgtggtggaagaagtacctgacccaggcccagctggtgcagttcgtgctgaccatcacccacaccatgagcgccgtggtgaagccctgcggcttccccttcggctgcctgatcttccagagcagctacatgctgaccctggtgatcctgttcctgaacttctacgtgcagacctacagaaagaagcccatgaagaaggacatgcaggagccccccgccggcaaggaggtgaagaacggcttcagcaaggcctacttcaccgccgccaacggcgtgatgaacaagaaggcccagtag

SEQ ID NO: 194930 - protein, 561 aa, Artificial Sequence
  derived and/or modified sequence
MAFMEKPPAGKVLLDDTVPLTAAIEASQSLQSHTIVRRYSDFDLLNNSLQIAGLSLPLPPKKLIGNMDREFIAERQKGLQNYLNVITTNHILSNCELVKKFLDPNNYSANYTEIALQQVSMFFRSEPKWEVVEPLKDIGWRIRKKYFLMKIKNQPKERLVLSWADLGPDKYLSDKDFQCLIKLLPSCLHPYIYRVTFATANESSALLIRMFNEKGTLKDLIYKAKPKDPFLKKYCNPKKIQGLELQQIKTYGRQILEVLKFLHDKGFPYGHLHASNVMLDGDTCRLLDLENSLLGLPSFYRSYFSQFRKINTLESVDVHCFGHLLYEMTYGRPPDSVPVDSFPPAPSMAVVAVLESTLSCEACKNGMPTISRLLQMPLFSDVLLTTSEKPQFKIPTKLKEALRIAKECIEKRLIEEQKQIHQHRRLTRAQSHHGSEEERKKRKILARKKSKRSALENSEEHSAKYSNSNNSAGSGASSPLTSPSSPTPPSTSGISALPPPPPPPPPPAAPLPPASTEAPAQLSSQAVNGMSRGALLSSIQNFQKGTLRKAKTCDHSAPKIG

SEQ ID NO: 194931 - protein, 578 aa, Artificial Sequence
  derived and/or modified sequence
MAFMEKPPAGKVLLDDTVPLTAAIEASQSLQSHTEYIIRVQRGISVENSWQIVRRYSDFDLLNNSLQIAGLSLPLPPKKLIGNMDREFIAERQKGLQNYLNVITTNHILSNCELVKKFLDPNNYSANYTEIALQQVSMFFRSEPKWEVVEPLKDIGWRIRKKYFLMKIKNQPKERLVLSWADLGPDKYLSDKDFQCLIKLLPSCLHPYIYRVTFATANESSALLIRMFNEKGTLKDLIYKAKPKDPFLKKYCNPKKIQGLELQQIKTYGRQILEVLKFLHDKGFPYGHLHASNVMLDGDTCRLLDLENSLLGLPSFYRSYFSQFRKINTLESVDVHCFGHLLYEMTYGRPPDSVPVDSFPPAPSMAVVAVLESTLSCEACKNGMPTISRLLQMPLFSDVLLTTSEKPQFKIPTKLKEALRIAKECIEKRLIEEQKQIHQHRRLTRAQSHHGSEEERKKRKILARKKSKRSALENSEEHSAKYSNSNNSAGSGASSPLTSPSSPTPPSTSGISALPPPPPPPPPPAAPLPPASTEAPAQLSSQAVNGMSRGALLSSIQNFQKGTLRKAKTCDHSAPKIG

SEQ ID NO: 194932 - protein, 441 aa, Artificial Sequence
  derived and/or modified sequence
MFFRSEPKWEVVEPLKDIGWRIRKKYFLMKIKNQPKERLVLSWADLGPDKYLSDKDFQCLIKLLPSCLHPYIYRVTFATANESSALLIRMFNEKGTLKDLIYKAKPKDPFLKKYCNPKKIQGLELQQIKTYGRQILEVLKFLHDKGFPYGHLHASNVMLDGDTCRLLDLENSLLGLPSFYRSYFSQFRKINTLESVDVHCFGHLLYEMTYGRPPDSVPVDSFPPAPSMAVVAVLESTLSCEACKNGMPTISRLLQMPLFSDVLLTTSEKPQFKIPTKLKEALRIAKECIEKRLIEEQKQIHQHRRLTRAQSHHGSEEERKKRKILARKKSKRSALENSEEHSAKYSNSNNSAGSGASSPLTSPSSPTPPSTSGISALPPPPPPPPPPAAPLPPASTEAPAQLSSQAVNGMSRGALLSSIQNFQKGTLRKAKTCDHSAPKIG

SEQ ID NO: 194933 - protein, 334 aa, Artificial Sequence
  derived and/or modified sequence
MFFRSEPKWEVVEPLKDIGWRIRKKYFLMKIKNQPKERLVLSWADLGPDKYLSDKDFQCLIKLLPSCLHPYIYRVTFATANESSALLIRMFNEKGTLKDLIYKAKPKDPFLKKYCNPKKIQGLELQQIKTYGRQILEVLKFLHDKGFPYGHLHASNVMLDGDTCRLLDLENSLLGLPSFYRSYFSQFRKINTLESVDVHCFGHLLYEMTYGRPPDSVPVDSFPPAPSMAVVAVLESTLSCEACKNGMPTISRLLQMPLFSDVLLTTSEKPQFKIPTKLKEALRIAKECIEKRLIEEQKQIHQHRRLTRAQSHHGSEEERKKKDFSSKEVKTICS

SEQ ID NO: 194934 - DNA, 1686 bp, Artificial Sequence
  derived and/or modified sequence
atggcattcatggagaaaccacccgcgggaaaggtgctgcttgatgacaccgttccactgactgccgccattgaggcttcccagtcgctccaatcacataccattgtgaggaggtattccgattttgatctccttaataattcgctacagattgctgggttgtccttgcccctgcccccaaagaaactcattggaaatatggatagggagttcattgcggagaggcaaaagggcctgcagaactacctcaacgtgatcaccacaaatcacatcctgagtaattgcgaactcgtgaagaagttcctggatccaaataactacagcgctaattacacagagatcgctttacaacaagtcagcatgttcttcaggtctgaacccaagtgggaagtggttgaaccactcaaagacatcggttggcgcatacggaagaaatactttctgatgaagataaaaaatcagcctaaggagcgcctggtcctgtcatgggccgatctggggcccgacaaatatctttccgacaaggatttccagtgtttgatcaagttgttgcctagttgtctgcacccctacatttatcgtgtgacctttgcaacagctaatgaaagctctgccttgctgatccgaatgtttaacgaaaaggggactctgaaggatctcatttacaaagccaaacctaaggatccattcctaaagaagtactgcaatcctaagaaaattcaaggacttgagctgcaacagatcaagacctacgggcggcagatacttgaagttcttaagttccttcatgataaaggattcccatacgggcacctccatgcctctaatgtaatgttagatggcgatacttgccgactgctggacctcgaaaacagtctcctgggcctaccctcgttctaccggagctacttttcacaattccggaagatcaacacccttgagtccgtggatgtgcattgctttggccatcttctctacgaaatgacctacggaagacccccagactccgtgcctgtggactctttcccaccagctccatctatggctgtagtggcagtgctagaatcaactctgagttgcgaggcttgcaagaacggcatgccaaccatctcacgcctgcttcagatgcccttattcagtgacgtactcctcaccacatctgagaagcctcagtttaagattcctaccaagttgaaagaagcgctgcgtatcgctaaagaatgcattgagaagcggttgatagaagagcagaaacagattcatcaacatcgtaggctgaccagagcccagtcacaccacggttcagaggaagaacgcaaaaaaagaaaaatcctggcgcgaaaaaaatcaaaacggtcagccttggagaacagtgaggagcattccgcgaagtatagcaattccaacaactcggcagggtcaggagcctcttcgcctctgacttccccctccagccctactcccccctccacgtcagggatatctgctcttcctccaccccccccaccaccaccacctccagcagctccgctaccgccagcatccaccgaagcgccagcacagctgtccagtcaggcagtgaacgggatgagtcggggcgccctgctgtctagcatccaaaattttcagaaaggaactctccgtaaagcaaagacctgtgatcactccgcacccaagataggctag

SEQ ID NO: 194935 - DNA, 1737 bp, Artificial Sequence
  derived and/or modified sequence
atggctttcatggaaaagccaccggctggcaaggtgctgttggatgacactgtgcctctgaccgcagccatagaagcatcacagtcgttgcagagtcatacagagtacatcattagagtgcaacgaggaataagcgtggaaaatagctggcaaatcgtccgtcgctacagcgactttgatctgctgaacaattctctccagatcgcaggcctctctctcccactcccaccgaaaaagctcattggaaatatggacagagagtttatcgctgagcggcagaaaggcctccagaactatttgaacgtcataactaccaaccacattcttagcaattgcgagttggtaaagaagttcttagatcccaacaattactcagccaattacaccgagatcgcactgcagcaggtttctatgttttttagatcagagcccaaatgggaagttgtcgagccactgaaagatatcggctggcgcatcagaaagaagtactttctcatgaaaattaagaaccagccaaaagagcgtttggtgttatcctgggctgacctcggaccagacaaatacctgagcgacaaagattttcagtgcctcattaagttactgccaagctgtttacacccctacatatatagagtcaccttcgctaccgccaatgaaagctcagcgttattgattcgcatgtttaacgaaaaagggaccttgaaagacctgatctacaaggctaagcctaaggacccgtttttgaaaaagtactgtaaccccaaaaagattcagggccttgagcttcagcaaattaagacctatggaagacaaatcctggaggtgttaaagttcctccacgacaaggggttcccctatggacatctgcacgccagcaacgtcatgctggacggggacacctgtagactgctggacctagagaactcccttctgggcctccctagcttctaccggagctattttagccagtttagaaagattaacaccctggaatctgttgacgtccattgttttggacacctgctttatgagatgacctatggcaggcccccagattccgttccggtggactcatttcccccggctccttccatggccgtggttgctgtgctcgagagcacgctctcctgcgaggcatgcaagaatggcatgccgacaatctccagattgcttcagatgccacttttctccgatgtcctcctgactacaagcgagaagccccagtttaaaatccccacgaagcttaaggaagcactccgcatagccaaggaatgcattgaaaaaaggctgattgaagagcagaaacagatacaccagcataggcggttgactagagcacaatctcatcacgggtccgaagaggagcggaagaagagaaagattttggctcgcaagaagtccaagcgaagcgccctggaaaactccgaggagcattccgccaagtattcgaactcaaataatagtgctggctctggggcttcaagccccctgacttcaccgtcttctccaactccacccagcacttctggcatttccgccctgcctccgccaccgccccctccaccacctcctgccgctccattaccgccagcatcaacagaagccccagcccagctctcctctcaggcagtgaacgggatgtccagaggtgcccttctgagctctattcagaacttccaaaaaggcaccctgcggaaagccaagacctgcgatcactcggctccaaagatcggatag

SEQ ID NO: 194936 - DNA, 1686 bp, Artificial Sequence
  derived and/or modified sequence
atggccttcatggagaagcccccagctgggaaggtgctgctggatgacacagtgcccctgacagctgccatcgaggccagccagagcctgcagagccacaccatcgtgcggcgctacagcgactttgacctgctgaacaacagcctgcagattgctggcctgagcctgcccctgccccccaagaagctgattggcaacatggaccgggagttcatcgccgagcggcagaagggcctgcagaactacctgaatgtcatcaccaccaaccacatcctgagcaactgtgagctggtgaagaagttcctggaccccaacaactacagcgccaactacacagagatcgccctgcagcaggtgtccatgttcttccgctctgagcccaagtgggaggtggtggagcccctgaaggacatcggctggaggatcaggaagaagtacttcctgatgaagatcaagaaccagcccaaggagcggctggtgctgtcctgggccgacctgggccctgacaagtacctgagtgacaaggacttccagtgcctgatcaagctgctgcccagctgcctgcacccctacatctacagagtgacctttgccacagccaatgaaagcagcgccctgctgatccgcatgtttaatgagaagggcaccctgaaggacctgatctacaaggccaagcccaaggaccccttcctgaagaagtactgcaaccccaagaagatccagggcctggagctgcagcagatcaagacctacggccggcagatcctggaggtgctgaagttcctgcatgacaagggcttcccctacggccacctgcacgccagcaatgtgatgctggatggagacacctgccgcctgctggacctggagaacagcctgctgggcctgcccagcttctaccgcagctacttcagccagttcaggaagatcaacaccctggagagcgtggatgtgcactgcttcggccacctgctgtatgagatgacctacggccggcccccagacagcgtgcctgtggacagcttccccccagcccccagcatggctgtggtggccgtgctggagagcaccctgagctgtgaggcctgcaagaatggcatgcccaccatcagccggctgctgcagatgcccctcttcagtgatgtgctgctgaccaccagcgagaagccccagttcaagatccccaccaagctgaaggaggccctgcgcatcgccaaggaatgtattgagaagaggctcatcgaggagcagaagcagatccaccagcaccggcggctgacccgggcccagagccaccacggcagcgaggaggagaggaagaagaggaagatcctggccaggaagaagagcaagaggtctgccctggagaacagcgaggagcacagcgccaagtacagcaacagcaacaacagcgctggcagcggggccagcagccccctgaccagccccagcagccccaccccacccagcaccagcggcatcagcgccctgcccccacctcctcctcctcctcctcctcctgctgcccccctgcccccagccagcacagaggccccagcccagctgagcagccaggccgtgaatggcatgagcagaggagccctgctgagcagcatccagaacttccagaagggcaccctgaggaaggccaagacctgtgaccacagcgcccccaagattggatag

SEQ ID NO: 194937 - DNA, 1737 bp, Artificial Sequence
  derived and/or modified sequence
atggccttcatggagaagcccccagctgggaaggtgctgctggatgacacagtgcccctgacagctgccatcgaggccagccagagcctgcagagccacacagagtacatcatccgggtgcagaggggcatctctgtggagaacagctggcagatcgtgcggcgctacagcgactttgacctgctgaacaacagcctgcagattgctggcctgagcctgcccctgccccccaagaagctgattggcaacatggaccgggagttcatcgccgagcggcagaagggcctgcagaactacctgaatgtcatcaccaccaaccacatcctgagcaactgtgagctggtgaagaagttcctggaccccaacaactacagcgccaactacacagaaattgccctgcagcaggtgtccatgttcttccgctctgagcccaagtgggaggtggtggagcccctgaaggacatcggctggaggatcaggaagaagtacttcctgatgaagatcaagaaccagcccaaggagcggctggtgctgtcctgggccgacctgggccctgacaagtacctgagtgacaaggacttccagtgcctgatcaagctgctgcccagctgcctgcacccctacatctacagagtgacctttgccacagccaatgaatcttctgccctgctgatccgcatgtttaatgagaagggcaccctgaaggacctgatctacaaggccaagcccaaggaccccttcctgaagaagtactgcaaccccaagaagatccagggcctggagctgcagcagatcaagacctacggccggcagatcctggaggtgctgaagttcctgcatgacaagggcttcccctacggccacctgcacgccagcaatgtgatgctggatggagacacctgccgcctgctggacctggagaacagcctgctgggcctgcccagcttctaccgcagctacttcagccagttcaggaagatcaacaccctggagagcgtggatgtgcactgcttcggccacctgctgtatgagatgacctacggccggcccccagattctgtgcctgtggacagcttccccccagcccccagcatggctgtggtggccgtgctggagagcaccctgagctgtgaggcctgcaagaatggcatgcccaccatcagccggctgctgcagatgcccctcttcagtgatgtgctgctgaccaccagcgagaagccccagttcaagatccccaccaagctgaaggaggccctgagaattgccaaggagtgcatcgagaagaggctgattgaggagcagaagcagatccaccagcaccggcggctgacccgggcccagagccaccacggcagcgaggaggagaggaagaagaggaagatcctggccaggaagaagagcaagaggtctgccctggagaacagcgaggagcacagcgccaagtacagcaacagcaacaacagcgctggcagcggggccagcagccccctgaccagccccagcagccccaccccacccagcaccagcggcatcagcgccctgcccccacctcctcctcctcctcctcctcctgctgcccccctgcccccagccagcacagaggccccagcccagctgagcagccaggccgtgaatggcatgagcagaggagccctgctgagcagcatccagaacttccagaagggcaccctgaggaaggccaagacctgtgaccacagcgcccccaagattggatag

SEQ ID NO: 194938 - DNA, 1686 bp, Artificial Sequence
  derived and/or modified sequence
atggccttcatggagaagccccccgccggcaaggtgctgctggacgatacagttcccttgaccgccgccatagaggcttcacagagcctccagtcccacaccattgtccgccggtatagtgattttgacctgttaaacaacagtctgcaaatcgctggcctgtcactcccactgccccctaagaaactcatcggtaatatggaccgggagtttatcgccgagcgccaaaaagggctgcagaactatttaaatgtcatcaccactaaccatattctctctaattgcgaactggtaaagaaattcctggacccaaataattacagtgcgaattataccgagattgcgcttcagcaggtctctatgttctttcgatccgaaccaaagtgggaggttgtcgagccgcttaaagatatcggttggcggatcaggaagaagtacttcttaatgaagatcaagaatcagcccaaagagaggctggtcctttcttgggcagacttgggacccgataagtacttgtcagacaaggatttccaatgtctcatcaaactgcttcctagctgcctacatccttacatatatcgggtcactttcgccaccgccaatgagagctctgccctgctaatcagaatgtttaatgaaaaggggaccctcaaggatttgatttataaggccaaacctaaggacccttttttgaagaagtactgcaatccaaagaagatccaaggattggagctgcaacagattaagacctatggcaggcagattctcgaggttttgaaatttcttcatgacaaagggtttccatatgggcatttacatgccagcaatgtgatgttggacggcgacacatgtaggctcctggacctggagaattctctgcttggtctcccttcattttatcgatcatacttctctcaattcaggaaaataaatactctggagtctgttgatgtgcactgttttggtcatcttctctacgagatgacatacggccgaccaccagactcagttccagtggatagctttccccctgcacctagcatggctgtggtcgccgtgctcgagtcaactctgagctgtgaggcctgcaagaacggcatgccaaccatctctcgtctgctgcaaatgcccctcttttccgatgtgctcttgacaacatccgaaaaaccgcagttcaagattcccactaaactgaaggaggcattgaggattgctaaggagtgtatcgaaaaacgtctcatcgaagagcaaaaacagattcatcaacacaggagattgacaagggcccagtctcatcacgggtctgaagaagaacggaagaaaagaaagattctggcgagaaaaaaatctaaaagaagtgcgttggaaaactctgaggaacactctgccaaatattccaactcgaacaactccgctggcagtggagcgagctctcccctcacaagcccgtcaagtcccacacccccttccacctcagggatcagcgcgctaccccccccacccccaccacccccaccaccggccgctcccctcccccctgcctctacggaagctccagctcagctgtccagccaggccgttaacggaatgagtagaggtgccttgctgtcaagcatacagaacttccagaagggaactctcaggaaggctaagacttgtgaccacagcgccccgaagatcgggtag

SEQ ID NO: 194939 - DNA, 1737 bp, Artificial Sequence
  derived and/or modified sequence
atggccttcatggagaagccccccgccggcaaggtgctgctggacgatacggttcctctgacagcggcaattgaagcttctcagagcctacagagccacacagaatatattatccgagtccagagagggatcagtgtcgagaactcctggcaaatcgttcgcagatattccgattttgatctgcttaataattcgttgcagatcgcagggctcagcctccccttacctcccaagaaactgatcggcaacatggacagggagttcattgctgagaggcaaaagggtctccagaactaccttaatgtgatcacaactaaccacatcctgtcaaactgtgagctggttaagaaattcctcgatccaaacaactacagtgccaattacacagaaatcgccctgcagcaggtctcaatgttttttcggagtgagccaaagtgggaggtggtagagccgctcaaggacatagggtggagaatccgcaaaaagtatttcttaatgaaaataaaaaaccagcccaaagagcgcctagtcctgtcttgggccgatctgggacccgataagtacctgagcgacaaggacttccaatgtcttatcaaactgttgccatcctgcctccacccctacatctaccgcgtgaccttcgctaccgctaacgaatcatcagcgctccttattcgaatgttcaacgaaaaggggactctgaaagatctcatctataaagccaagcccaaggatcccttcctcaagaagtactgtaacccaaagaagatacagggtctagagttacagcagatcaagacatacgggcgccagattctggaggtgctcaagttcctgcatgataaaggattcccttacggccatctgcatgccagcaacgtaatgctggacggggatacctgtcgcttacttgacctagagaattccctgcttggactgccttctttctatcgtagctacttctcacagtttcgaaagattaacaccctcgaatccgtagatgttcactgcttcggccacctgctttatgagatgacttacgggcgcccccccgatagcgtcccagtggatagttttccccccgcaccgagtatggctgtggtggccgtgcttgagtccacattgagctgcgaagcctgtaagaatggcatgccgactatctctcggttgctccagatgccgctgttttccgatgtgcttctgacaacctctgagaagccccaatttaagatccctacaaagctcaaagaggcactgcgaattgctaaggagtgtatagaaaagagactaattgaggagcaaaagcaaatacaccaacatcggcggctcacccgagctcaaagccaccatgggagtgaggaggagaggaaaaagcgtaaaatccttgcccgtaagaaatcaaagcgctcagctctagagaactcagaagaacattcagctaaatatagcaatagtaataacagtgctggatctggcgcgagcagtccacttacaagcccgagctcaccaaccccccctagcacctctggaatatcagcgcttcccccacccccccccccccccccaccccccgctgctcccctaccccctgcttctactgaggcccctgcacagttatcatcccaggcagtcaatgggatgtcgcgcggtgccctgctctcaagcattcagaactttcagaagggtacattacggaaggccaagacttgtgaccactctgcaccgaaaatcgggtag

SEQ ID NO: 194940 - DNA, 1686 bp, Artificial Sequence
  derived and/or modified sequence
atggcatttatggaaaagcctcccgcaggcaaggtgttgcttgatgatacagttcccttgaccgctgctatcgaggccagtcaatctttgcagagccatacaattgtcagaagatacagtgactttgacctgcttaataactctctccaaatcgcaggcctttccctccctctcccgccaaaaaaactcataggaaatatggatcgggagtttatagccgaacgccaaaagggactacagaactacctgaacgtgattactacaaaccacatcctatcgaactgcgaactcgtgaaaaagttcctcgaccccaacaactactccgcaaactacacagagatagctctccaacaggttagcatgttcttcagatccgagcccaagtgggaggtcgtcgaacctctgaaagatatcggatggcgaatcagaaagaagtatttccttatgaaaattaaaaatcagccgaaggaacggttagtgctttcatgggctgacctgggcccagataagtacctatctgataaggactttcagtgtctgatcaaacttctacctagctgtctgcacccttacatctaccgggtgacctttgcgaccgccaatgagagctccgccttgctgattcggatgtttaacgagaaggggactctaaaggatcttatttataaagctaagccaaaggatccatttttgaagaaatactgcaacccaaagaagatacagggattggaactgcagcaaatcaagacttatggtagacagattttagaggtcctgaaattcctgcacgacaaaggtttcccatacggacacctgcacgcaagcaatgtaatgctggatggagacacttgtcgactgctggatttggaaaatagtcttctagggctgccaagtttctaccggagctacttcagtcaattccggaaaatcaacaccttggaaagcgtcgatgttcattgctttgggcaccttttgtatgagatgacatatgggaggccccctgacagtgtccccgtcgatagttttccaccagcaccatcaatggccgtggttgcagtcctggaatccacactgtcgtgtgaggcctgtaagaatggtatgcctaccatcagtaggttattgcaaatgccactgttctcagacgtgctgctgacgacctccgaaaagcctcagtttaaaataccaaccaaattaaaggaagcccttaggattgctaaggagtgtatcgaaaaaaggctaattgaggagcaaaaacaaatacaccagcacaggcggctgacccgcgcacagtcccaccacggatctgaagaggaacgaaagaagaggaagatccttgcacgtaaaaagtcgaaacggtccgcccttgaaaatagcgaagaacacagcgcaaagtactctaacagcaacaatagcgcgggaagtggggcatcgagtcccttgacgagccccagcagccccactccgccttcaacttctggtatcagcgcactacctccgccaccaccgccaccccctcctccggcagctcccttaccacccgcttctaccgaagctcctgctcagctgagttctcaggccgttaacggaatgagccgcggtgccctgttgtcaagcatccagaattttcagaaaggcactctgcggaaggccaaaacatgtgaccacagcgctcctaagattggttag

SEQ ID NO: 194941 - DNA, 1737 bp, Artificial Sequence
  derived and/or modified sequence
atggcattcatggagaaaccacccgcagggaaagtccttctggatgatacggttcccctaacagcagccattgaggctagtcaatccttgcaaagtcatacagaatatatcataagggtccagcgaggaatcagtgtggagaattcatggcagatagtgcgacgttatagtgatttcgatctgctaaacaacagcttgcaaattgctggtctcagtctgccgctgccgccaaagaaactgatcggcaatatggatagggaattcatcgcggagcggcaaaaaggtttgcagaattatctgaatgtgatcaccacgaatcacattctgagcaattgtgaactggttaagaaatttctggaccctaataactatagcgctaattacaccgaaatcgctctacaacaggtgtcgatgttcttccggtctgagcctaaatgggaggtagttgaacctctgaaggatattggatggcgtattcgaaagaaatacttcttaatgaaaatcaaaaatcagccgaaagagagactcgtactgtcttgggccgacctcggccctgataagtacctttctgataaagacttccaatgcttaattaagcttcttcccagctgtctgcacccctatatttatcgtgtgacctttgctaccgccaatgaaagctccgcactacttatcaggatgtttaacgagaagggtacacttaaggatctgatttataaagctaagcccaaggacccgttccttaaaaaatactgcaaccctaagaaaatccagggtctggagctgcagcaaattaagacatacggaagacagattctggaagtgctgaagtttctccacgataaaggatttccctacgggcacctccacgcttccaacgttatgctggacggcgacacctgccgactgctagacctggagaactcactgctggggcttccttctttctatagaagttacttctcccagttcaggaaaattaatacacttgaatctgttgatgtgcattgctttggtcatctgttgtatgaaatgacgtacggccgaccacccgactccgtgccggtagattcttttccacccgcacctagcatggctgtggtggctgttttggagtccaccctgtcttgcgaggcttgtaagaacggtatgcctactatctcgaggcttctacagatgcccctgttcagtgacgtgctgctgacaacgtcagagaagccacagttcaagattccaaccaagcttaaggaggcccttcggattgctaaggaatgcatcgaaaaaagactgattgaggaacaaaagcagatccatcagcacagaagacttacccgcgctcagagtcaccatggaagcgaggaggagcggaagaaaaggaagattcttgccaggaaaaagtccaaaaggtccgcccttgaaaactctgaagaacacagcgccaaatactctaattctaataactccgctggcagcggcgctagtagccccttgacgtcgccctcttcacctactccaccgtctacgtcaggcattagtgccctcccgcctccccctccacctccacccccaccagctgcccctctgccgccagcctccactgaggcccctgcccaactttcttcgcaggccgtgaacggaatgtctaggggggctttactgtcatctattcagaactttcaaaagggcacactgcggaaggctaaaacctgcgatcacagcgcgccaaaaatcggatag

SEQ ID NO: 194942 - DNA, 1976 bp, Artificial Sequence
  derived and/or modified sequence
gtgttgacagcggcggcggtggaaccgggcgggcggcgggagtcggcgcctcgggttcctacctcgcgtccctaggcggcggcggccgggcgtcccgggatggccttcatggagaagccgccagccggcaaggtgctgctggacgacacggtgccgctgacagcagccatcgaggcgagccagagcctgcagtcccacacgattgttagaagatacagtgactttgatttgcttaacaacagcttacagattgcaggcctaagtctacctcttcctcccaaaaaattgattggtaacatggatcgtgaattcatagctgaaaggcagaaaggtcttcagaactatctcaacgtgatcacaacaaatcatatcttgtctaattgtgagctggttaagaagtttttagatccaaacaactattccgcaaactatactgagattgccttgcaacaggtttccatgttcttccgatcagaaccaaagtgggaggtggtggaacctttgaaagacataggttggagaataaggaagaaatatttcttgatgaagattaaaaatcagccaaaggaacggctagtgttaagctgggctgaccttggcccagacaagtatttgtcagataaagattttcagtgtctaatcaaacttctgccttcttgtttgcacccttacatctatcgggttacctttgccacagctaatgaatcctcagcgttgctaattaggatgtttaacgaaaagggaacattgaaggatctgatctacaaggcaaaaccaaaagacccatttctaaagaagtactgcaaccctaagaagattcagggcctggaactccagcaaataaaaacatatggacggcaaatattagaggtactgaagtttcttcatgacaagggattcccttatgggcatcttcacgcctccaatgtgatgctcgatggggacacttgccggctgctggaccttgagaattccttattgggcctgccttccttctaccgatcttatttttcacaattcaggaaaatcaatacattggaaagtgtggatgtccactgctttggccacttactgtatgaaatgacttatggacgaccgccagactcggtgcctgtggactccttccctcctgccccgtccatggctgtggtggccgtgttggagtctacgctgtcttgtgaagcctgtaaaaatggcatgcctaccatctcccggctcttacagatgccattattcagcgatgttttactaaccacttctgaaaaaccacagtttaagatccctacaaagttaaaagaggcattgagaattgccaaagaatgtatagagaagagactaattgaggaacagaaacagattcaccagcatcgaagactgacaagagctcagtcccaccatggatctgaggaggaaagaaaaaaaagaaagattttagctcgaaagaagtcaaaacgatctgctcttgaaaatagtgaagagcattcagcgaagtacagcaactccaataattcagcaggatctggggccagctcacctctcacgtccccgtcatcgccaactccaccctctacatcagggatatctgcattacctccacctcctccacctccaccaccaccagcagctcccttgcctcctgcgagcaccgaggcacctgcccagctctcgtctcaggctgtgaatggcatgagccgaggggccttgctcagctccatccagaatttccaaaaaggaactttgaggaaagccaaaacctgtgatcacagtgctccgaagatcggctgaagcttcctgtttacacttggagggaaaagttcttttttattcctactcacccctaccccccaaactaccctcttcctgggaaagtaattgctgagccagtacagccacaaacagtactattttgcagatgctcatgtaagcagcttttcgagagaaataattctttaagcagaataaagttaggctggcat

SEQ ID NO: 194943 - DNA, 2037 bp, Artificial Sequence
  derived and/or modified sequence
ggggcggcgcgtgttgacagcggcggcggtggaaccgggcgggcggcgggagtcggcgcctcgggttcctacctcgcgtccctaggcggcggcggccgggcgtcccgggatggccttcatggagaagccgccagccggcaaggtgctgctggacgacacggtgccgctgacagcagccatcgaggcgagccagagcctgcagtcccacacggaatatattattcgagtgcaaagaggaatttctgtggaaaacagctggcagattgttagaagatacagtgactttgatttgcttaacaacagcttacagattgcaggcctaagtctacctcttcctcccaaaaaattgattggtaacatggatcgtgaattcatagctgaaaggcagaaaggtcttcagaactatctcaacgtgatcacaacaaatcatatcttgtctaattgtgagctggttaagaagtttttagatccaaacaactattccgcaaactatactgagattgccttgcaacaggtttccatgttcttccgatcagaaccaaagtgggaggtggtggaacctttgaaagacataggttggagaataaggaagaaatatttcttgatgaagattaaaaatcagccaaaggaacggctagtgttaagctgggctgaccttggcccagacaagtatttgtcagataaagattttcagtgtctaatcaaacttctgccttcttgtttgcacccttacatctatcgggttacctttgccacagctaatgaatcctcagcgttgctaattaggatgtttaacgaaaagggaacattgaaggatctgatctacaaggcaaaaccaaaagacccatttctaaagaagtactgcaaccctaagaagattcagggcctggaactccagcaaataaaaacatatggacggcaaatattagaggtactgaagtttcttcatgacaagggattcccttatgggcatcttcacgcctccaatgtgatgctcgatggggacacttgccggctgctggaccttgagaattccttattgggcctgccttccttctaccgatcttatttttcacaattcaggaaaatcaatacattggaaagtgtggatgtccactgctttggccacttactgtatgaaatgacttatggacgaccgccagactcggtgcctgtggactccttccctcctgccccgtccatggctgtggtggccgtgttggagtctacgctgtcttgtgaagcctgtaaaaatggcatgcctaccatctcccggctcttacagatgccattattcagcgatgttttactaaccacttctgaaaaaccacagtttaagatccctacaaagttaaaagaggcattgagaattgccaaagaatgtatagagaagagactaattgaggaacagaaacagattcaccagcatcgaagactgacaagagctcagtcccaccatggatctgaggaggaaagaaaaaaaagaaagattttagctcgaaagaagtcaaaacgatctgctcttgaaaatagtgaagagcattcagcgaagtacagcaactccaataattcagcaggatctggggccagctcacctctcacgtccccgtcatcgccaactccaccctctacatcagggatatctgcattacctccacctcctccacctccaccaccaccagcagctcccttgcctcctgcgagcaccgaggcacctgcccagctctcgtctcaggctgtgaatggcatgagccgaggggccttgctcagctccatccagaatttccaaaaaggaactttgaggaaagccaaaacctgtgatcacagtgctccgaagatcggctgaagcttcctgtttacacttggagggaaaagttcttttttattcctactcacccctaccccccaaactaccctcttcctgggaaagtaattgctgagccagtacagccacaaacagtactattttgcagatgctcatgtaagcagcttttcgagagaaataattctttaagcagaataaagttaggctggcat

SEQ ID NO: 194944 - DNA, 1686 bp, Artificial Sequence
  derived and/or modified sequence
atggccttcatggagaagccccccgccggcaaggtgctgctggacgacaccgtgcccctgaccgccgccatcgaggccagccagagcctgcagagccacaccatcgtgagaagatacagcgacttcgacctgctgaacaacagcctgcagatcgccggcctgagcctgcccctgccccccaagaagctgatcggcaacatggacagagagttcatcgccgagagacagaagggcctgcagaactacctgaacgtgatcaccaccaaccacatcctgagcaactgcgagctggtgaagaagttcctggaccccaacaactacagcgccaactacaccgagatcgccctgcagcaggtgagcatgttcttcagaagcgagcccaagtgggaggtggtggagcccctgaaggacatcggctggagaatcagaaagaagtacttcctgatgaagatcaagaaccagcccaaggagagactggtgctgagctgggccgacctgggccccgacaagtacctgagcgacaaggacttccagtgcctgatcaagctgctgcccagctgcctgcacccctacatctacagagtgaccttcgccaccgccaacgagagcagcgccctgctgatcagaatgttcaacgagaagggcaccctgaaggacctgatctacaaggccaagcccaaggaccccttcctgaagaagtactgcaaccccaagaagatccagggcctggagctgcagcagatcaagacctacggcagacagatcctggaggtgctgaagttcctgcacgacaagggcttcccctacggccacctgcacgccagcaacgtgatgctggacggcgacacctgcagactgctggacctggagaacagcctgctgggcctgcccagcttctacagaagctacttcagccagttcagaaagatcaacaccctggagagcgtggacgtgcactgcttcggccacctgctgtacgagatgacctacggcagaccccccgacagcgtgcccgtggacagcttcccccccgcccccagcatggccgtggtggccgtgctggagagcaccctgagctgcgaggcctgcaagaacggcatgcccaccatcagcagactgctgcagatgcccctgttcagcgacgtgctgctgaccaccagcgagaagccccagttcaagatccccaccaagctgaaggaggccctgagaatcgccaaggagtgcatcgagaagagactgatcgaggagcagaagcagatccaccagcacagaagactgaccagagcccagagccaccacggcagcgaggaggagagaaagaagagaaagatcctggccagaaagaagagcaagagaagcgccctggagaacagcgaggagcacagcgccaagtacagcaacagcaacaacagcgccggcagcggcgccagcagccccctgaccagccccagcagccccaccccccccagcaccagcggcatcagcgccctgccccccccccccccccccccccccccccccgccgcccccctgccccccgccagcaccgaggcccccgcccagctgagcagccaggccgtgaacggcatgagcagaggcgccctgctgagcagcatccagaacttccagaagggcaccctgagaaaggccaagacctgcgaccacagcgcccccaagatcggctag

SEQ ID NO: 194945 - DNA, 1737 bp, Artificial Sequence
  derived and/or modified sequence
atggccttcatggagaagccccccgccggcaaggtgctgctggacgacaccgtgcccctgaccgccgccatcgaggccagccagagcctgcagagccacaccgagtacatcatcagagtgcagagaggcatcagcgtggagaacagctggcagatcgtgagaagatacagcgacttcgacctgctgaacaacagcctgcagatcgccggcctgagcctgcccctgccccccaagaagctgatcggcaacatggacagagagttcatcgccgagagacagaagggcctgcagaactacctgaacgtgatcaccaccaaccacatcctgagcaactgcgagctggtgaagaagttcctggaccccaacaactacagcgccaactacaccgagatcgccctgcagcaggtgagcatgttcttcagaagcgagcccaagtgggaggtggtggagcccctgaaggacatcggctggagaatcagaaagaagtacttcctgatgaagatcaagaaccagcccaaggagagactggtgctgagctgggccgacctgggccccgacaagtacctgagcgacaaggacttccagtgcctgatcaagctgctgcccagctgcctgcacccctacatctacagagtgaccttcgccaccgccaacgagagcagcgccctgctgatcagaatgttcaacgagaagggcaccctgaaggacctgatctacaaggccaagcccaaggaccccttcctgaagaagtactgcaaccccaagaagatccagggcctggagctgcagcagatcaagacctacggcagacagatcctggaggtgctgaagttcctgcacgacaagggcttcccctacggccacctgcacgccagcaacgtgatgctggacggcgacacctgcagactgctggacctggagaacagcctgctgggcctgcccagcttctacagaagctacttcagccagttcagaaagatcaacaccctggagagcgtggacgtgcactgcttcggccacctgctgtacgagatgacctacggcagaccccccgacagcgtgcccgtggacagcttcccccccgcccccagcatggccgtggtggccgtgctggagagcaccctgagctgcgaggcctgcaagaacggcatgcccaccatcagcagactgctgcagatgcccctgttcagcgacgtgctgctgaccaccagcgagaagccccagttcaagatccccaccaagctgaaggaggccctgagaatcgccaaggagtgcatcgagaagagactgatcgaggagcagaagcagatccaccagcacagaagactgaccagagcccagagccaccacggcagcgaggaggagagaaagaagagaaagatcctggccagaaagaagagcaagagaagcgccctggagaacagcgaggagcacagcgccaagtacagcaacagcaacaacagcgccggcagcggcgccagcagccccctgaccagccccagcagccccaccccccccagcaccagcggcatcagcgccctgccccccccccccccccccccccccccccccgccgcccccctgccccccgccagcaccgaggcccccgcccagctgagcagccaggccgtgaacggcatgagcagaggcgccctgctgagcagcatccagaacttccagaagggcaccctgagaaaggccaagacctgcgaccacagcgcccccaagatcggctag

SEQ ID NO: 194946 - protein, 505 aa, Artificial Sequence
  derived and/or modified sequence
MAAENSKQFWKRSAKLPGSIQPVYGAQHPPLDPRLTKNFIKERSKVNTVPLKNKKASSFHEFARNTSDAWDIGDDEEEDFSSPSFQTLNSKVALATAAQVLENHSKLRVKPERSQSTTSDVPANYKVIKSSSDAQLSRNSSDTCLRNPLHKQQSLPLRPIIPLVARISDQNASGAPPMTVREKTRLEKFRQLLSSQNTDLDELRKCSWPGVPREVRPITWRLLSGYLPANTERRKLTLQRKREEYFGFIEQYYDSRNEEHHQDTYRQIHIDIPRTNPLIPLFQQPLVQEIFERILFIWAIRHPASGYVQGINDLVTPFFVVFLSEYVEEDVENFDVTNLSQDMLRSIEADSFWCMSKLLDGIQDNYTFAQPGIQKKVKALEELVSRIDEQVHNHFRRYEVEYLQFAFRWMNNLLMRELPLRCTIRLWDTYQSEPEGFSHFHLYVCAAFLIKWRKEILDEEDFQGLLMLLQNLPTIHWGNEEIGLLLAEAYRLKYMFADAPNHYRR

SEQ ID NO: 194947 - DNA, 1518 bp, Artificial Sequence
  derived and/or modified sequence
atggccgccgagaacagcaagcagttctggaagagaagcgccaagctgcccggcagcatccagcccgtgtacggcgcccagcacccccccctggaccccagactgaccaagaacttcatcaaggagagaagcaaggtgaacaccgtgcccctgaagaacaagaaggccagcagcttccacgagttcgccagaaacaccagcgacgcctgggacatcggcgacgacgaggaggaggacttcagcagccccagcttccagaccctgaacagcaaggtggccctggccaccgccgcccaggtgctggagaaccacagcaagctgagagtgaagcccgagagaagccagagcaccaccagcgacgtgcccgccaactacaaggtgatcaagagcagcagcgacgcccagctgagcagaaacagcagcgacacctgcctgagaaaccccctgcacaagcagcagagcctgcccctgagacccatcatccccctggtggccagaatcagcgaccagaacgccagcggcgccccccccatgaccgtgagagagaagaccagactggagaagttcagacagctgctgagcagccagaacaccgacctggacgagctgagaaagtgcagctggcccggcgtgcccagagaggtgagacccatcacctggagactgctgagcggctacctgcccgccaacaccgagagaagaaagctgaccctgcagagaaagagagaggagtacttcggcttcatcgagcagtactacgacagcagaaacgaggagcaccaccaggacacctacagacagatccacatcgacatccccagaaccaaccccctgatccccctgttccagcagcccctggtgcaggagatcttcgagagaatcctgttcatctgggccatcagacaccccgccagcggctacgtgcagggcatcaacgacctggtgacccccttcttcgtggtgttcctgagcgagtacgtggaggaggacgtggagaacttcgacgtgaccaacctgagccaggacatgctgagaagcatcgaggccgacagcttctggtgcatgagcaagctgctggacggcatccaggacaactacaccttcgcccagcccggcatccagaagaaggtgaaggccctggaggagctggtgagcagaatcgacgagcaggtgcacaaccacttcagaagatacgaggtggagtacctgcagttcgccttcagatggatgaacaacctgctgatgagagagctgcccctgagatgcaccatcagactgtgggacacctaccagagcgagcccgagggcttcagccacttccacctgtacgtgtgcgccgccttcctgatcaagtggagaaaggagatcctggacgaggaggacttccagggcctgctgatgctgctgcagaacctgcccaccatccactggggcaacgaggagatcggcctgctgctggccgaggcctacagactgaagtacatgttcgccgacgcccccaaccactacagaagatag

SEQ ID NO: 194948 - DNA, 1518 bp, Artificial Sequence
  derived and/or modified sequence
atggccgccgagaattccaagcaattttggaaacgaagcgccaagttgccaggctccatacaaccagtgtatggcgcccagcatccgccacttgacccccgactgactaagaatttcattaaggagaggagcaaggtgaacacagtacccctcaagaataagaaggcgtcgtcatttcacgagtttgcaagaaatacgagcgatgcatgggacataggagacgacgaagaggaggactttagctctccttcatttcagacactaaacagcaaggttgccctggctacagccgcgcaggtgctggagaaccactcaaagctgcgggtaaaacccgagaggagccagagtacgaccagtgatgttccagccaattataaagtcattaagagcagtagcgacgcacagctttcgagaaacagttccgacacttgcctgagaaacccactacacaagcagcaatccctgcctcttcgacctattattccactggtcgccagaatctccgatcaaaacgcaagcggagctccgccaatgacagtgcgagaaaagaccagactggaaaagttccgccaactgctgtccagtcagaatacagaccttgacgagctccgtaaatgctcttggcctggagtgcctagagaagtgaggcccattacctggaggctgctgagcggctacctgccagcgaacaccgagcgccgtaaattaacgctccagaggaagagagaagagtactttgggtttatcgaacaatattacgacagccgcaacgaggagcatcaccaagacacatacagacaaatccacatagatattccacgcactaatcctttaattccactcttccagcaacccctcgttcaagagattttcgaacggatcctcttcatctgggccatccggcacccagcctccggatacgtgcagggaatcaatgatctggtaactccattcttcgtagtgttcctgtctgaatatgtggaggaggatgtcgagaactttgatgtcacaaatctctcccaggatatgctgagaagcatcgaggcagacagcttttggtgtatgagcaagctcttggatggtatacaagataattataccttcgcacaacccggcatacagaagaaggtgaaagccctggaggagttggtatcacgaatcgatgagcaggttcacaaccactttaggaggtacgaagtggagtaccttcaatttgcgtttcggtggatgaataatctgctgatgcgcgaattgcccctgcgctgtaccatccggttgtgggacacctatcagtctgagcccgagggcttctctcattttcacctgtacgtgtgcgctgcatttctcattaagtggagaaaggagatccttgatgaggaagatttccagggactgctgatgcttcttcagaatctgcctacaattcactggggaaatgaggagatcgggttacttctcgccgaggcctacagattgaagtatatgtttgccgatgctccgaatcactatcgtaggtag

SEQ ID NO: 194949 - DNA, 1518 bp, Artificial Sequence
  derived and/or modified sequence
atggctgctgagaacagcaagcagttctggaagaggtctgccaagctgcccggcagcatccagcctgtgtatggagcccagcacccccccctggacccccggctgaccaagaacttcatcaaggagaggagcaaggtgaacacagtgcccctgaagaacaagaaggccagcagcttccacgagtttgccaggaacaccagtgatgcctgggacattggagatgatgaggaggaggacttcagcagccccagcttccagaccctgaacagcaaggtggccctggccacagctgcccaggtgctggagaaccacagcaagctgcgggtgaagccagagaggagccagagcaccaccagtgatgtgcctgccaactacaaggtgatcaagagcagcagtgatgcccagctgagcaggaacagcagtgacacctgcctgaggaaccccctgcacaagcagcagagcctgcccctgcggcccatcatccccctggtggcccgcatcagtgaccagaatgccagcggggccccacccatgacagtgcgggagaagacccggctggagaagttccggcagctgctgagcagccagaacacagacctggatgagctgaggaaatgttcctggccaggagtgccccgggaggtgcggcccatcacctggaggctgctgagcggctacctgcctgccaacacagaaagaaggaagctgaccctgcagaggaagcgggaggagtacttcggcttcatcgagcagtactatgacagcagaaatgaggagcaccaccaggacacctaccggcagatccacatcgacatccccaggaccaaccccctcatccccctcttccagcagcccctggtgcaggagatctttgagcgcatcctcttcatctgggccatccgccacccagccagcggctacgtgcagggcatcaatgacctggtgacccccttctttgtggtgttcctgtctgaatatgtggaggaggatgtggagaactttgatgtgaccaacctgagccaggacatgctgcggagcattgaagctgacagcttctggtgcatgagcaagctgctggatggcatccaggacaactacacctttgcccagcccggcatccagaagaaggtgaaggccctggaggagctggtgtccagaattgatgagcaggtgcacaaccacttccgccgctatgaggtggagtacctgcagtttgccttccgctggatgaacaacctgctgatgagggagctgcccctgcgctgcaccatccggctgtgggacacctaccagagcgagcctgagggcttcagccacttccacctgtatgtgtgtgccgccttcctgatcaagtggaggaaggagatcctggatgaggaggacttccagggcctgctgatgctgctgcagaacctgcccaccatccactggggcaatgaggagatcggcctgctgctggccgaggcctaccgcctgaagtacatgtttgctgatgcccccaaccactacagaagatag

SEQ ID NO: 194950 - DNA, 1518 bp, Artificial Sequence
  derived and/or modified sequence
atggccgccgagaacagcaagcagttctggaagcggagcgccaagttgccaggcagcatccagcctgtgtacggggcccagcacccacccctggaccctcggcttaccaagaattttatcaaggagcggtcaaaggtgaacactgttccgctgaaaaataaaaaggcaagctcattccacgagttcgcccgaaacacatctgatgcctgggacattggtgatgacgaagaggaggattttagcagcccctcttttcaaaccttgaattcgaaagtcgcgcttgcaacggcagcacaagtgctagagaaccattcaaaactgcgagtgaagcccgaaagatctcagtcgacaaccagcgacgtcccggccaactataaggtcattaagtcgtctagtgacgcccaactgagtaggaactcaagtgatacgtgccttcgcaatcccctccacaagcagcaaagcctccccctcaggccgatcatcccactggtagcacggatctctgaccagaacgccagcggagccccccccatgacagttcgggagaagacccggctggaaaaatttcgccaattactgagctcccagaatacggatttggacgagctccgaaagtgttcctggccaggggtgccacgcgaggtgcgacccatcacttggaggctcctgagtggttatctcccagcaaatacggaacgaagaaaactcaccttacagcgaaagcgtgaggagtactttggcttcatcgagcagtattacgatagtcggaacgaggagcaccatcaagatacttatcgccagatacacattgatatcccaagaaccaatcctctgatccccctgttccagcaacccctggtccaggaaatttttgagcgaattctattcatttgggccattcgacatccagcctcaggctatgtgcaaggcatcaacgatctggtaactcctttttttgtggtgtttctaagtgagtatgtagaagaagacgtggaaaacttcgacgtaaccaatctgagtcaagacatgctgcgatccattgaggcagacagcttctggtgcatgtcgaagctgctggacggtatccaagataactatacctttgcacagccgggcattcagaagaaggtgaaagctttggaagagttagtctccagaatagacgaacaggtgcataaccacttccgaaggtacgaggtggagtatctgcagtttgccttccgttggatgaacaacctattaatgcgagagctgcctctgcggtgcactatccgcctatgggatacatatcaatcagaacccgaggggttctctcactttcacctgtacgtgtgtgccgcgtttctaatcaagtggaggaaagagattttagatgaggaggacttccaaggtctcctcatgctcctccagaacctcccgactatacactggggaaatgaagagatcggcttactcctggccgaggcatacaggttgaagtacatgtttgccgatgcaccaaatcattacagacggtag

SEQ ID NO: 194951 - DNA, 1518 bp, Artificial Sequence
  derived and/or modified sequence
atggcggcagagaattccaagcagttctggaaacgctcggctaagctccctgggagtattcagccagtatatggggctcagcacccaccacttgatccaaggctgaccaaaaatttcatcaaggaacggagcaaagtcaacacggttcccctgaaaaataagaaagcttcgtcgtttcacgagtttgccagaaacacttctgatgcgtgggacatcggcgacgatgaagaggaggacttctctagcccatcttttcaaaccctgaattcaaaagtggcactggctaccgctgctcaagtgctcgaaaatcactcaaagctcagagtgaaacctgagcgctcccagtccaccacctctgacgttcctgctaactacaaagtgatcaagagcagtagcgacgctcaactatccagaaattctagtgacacctgcttaagaaaccctctgcacaaacaacaatcccttcccttgcgccctatcattcccctcgtcgccaggatctcggaccagaatgcttctggcgctccccctatgactgtgcgtgaaaagacccgcttggaaaaatttagacaacttctcagttcacagaacacggaccttgatgaactgaggaagtgctcctggccaggagtacctagagaggtccgccctattacctggcggctgctgtccggttacctgcccgcaaatactgagcgccgtaaattaacactgcagcgcaagcgagaggagtactttggcttcatcgagcagtattacgattccagaaatgaggagcaccatcaggacacgtaccgccagatccatattgatatccccaggacaaacccactcatccctctttttcagcagcctctagtgcaggaaatctttgagcgtatcttgtttatatgggctattcgacatccagcaagcggctatgttcagggtattaacgatttggtgactccttttttcgtcgtctttctcagtgaatatgtggaggaggatgtggaaaacttcgatgtgaccaacctgtctcaagacatgttacggagtatcgaagcggactctttttggtgtatgagcaaactgctggacgggattcaggacaactacacttttgcacagccaggcatccaaaagaaagtgaaggcgctcgaagagttggtgtcaaggatcgacgagcaagtgcacaatcacttcagacggtacgaggtagagtacttgcagtttgcctttagatggatgaataaccttcttatgcgcgaacttccgttgagatgtactatccgcttgtgggacacttaccaatccgagccagaggggttctcccatttccacttgtacgtctgcgccgcattcctgatcaagtggaggaaagaaatcttggacgaggaggacttccaaggattactaatgctgctccaaaacctgccaaccatccactgggggaatgaagaaattggactgttgcttgcggaagcgtaccgcttgaaatatatgttcgccgatgcccctaatcactatcgtaggtag

SEQ ID NO: 194952 - DNA, 3462 bp, Artificial Sequence
  derived and/or modified sequence
acatccaagatggcgtccccaggagctgggagcgggtgaccggcggcggggaagcggcctgggttggccctcagattgcggggtctgggggcatctcgccgggcaaacccttggcccgcctacaaggacttcccccggccagagcaatggccgctgagaacagcaagcagttttggaagaggagcgctaagctgccggggagcattcagcctgtatatggagcacagcatcctcctcttgacccacggctcaccaaaaatttcattaaagaacgatcaaaagtcaacacagttcctctgaagaataagaaggcctccagttttcatgagtttgcacggaataccagtgatgcttgggacattggcgatgatgaggaagaggacttttcctcaccttctttccaaactctgaactcaaaagttgctttggcaactgcagcccaagttctagaaaaccacagcaagctgagagtaaaaccagaacggtcccagtcaacgacatcggacgtccctgccaactacaaggtcataaagtccagcagtgatgcccagctgtccagaaactctagtgatacatgcctgaggaacccactccacaaacagcaatcactccctctccggcccatcatccccctcgttgcccggatctcggatcagaacgcttctggggcccccccaatgactgtccgggagaaaacccgcctagaaaaattccgtcaacttctctccagccagaacactgacttagatgaactgaggaagtgtagctggccaggggttcccagggaggttcgacctataacctggagactcctgtcgggctatctcccagcaaacactgagaggaggaagttgaccctgcagcggaagcgggaggaatattttggcttcattgaacagtattatgactctcgaaacgaggaacatcaccaggatacctacagacagattcacattgacattccaaggacgaatcctctcattccgttgttccagcaaccacttgtacaggagatctttgaaagaattctatttatttgggccatccgccaccctgccagtgggtatgtccagggaattaatgacctggtcactccattctttgtcgtcttcctctcagaatatgtggaagaggatgtggagaactttgacgtgaccaacttgtctcaagacatgctgcgaagcattgaggctgacagcttttggtgcatgagcaagctgctggatggaatccaggataactacacctttgcacaaccaggaatccagaagaaggtgaaggcactggaagagcttgtcagccggattgatgagcaggtacataatcacttcaggaggtacgaggtagaatacctgcagtttgccttccgctggatgaacaacctgcttatgcgggagcttcctcttcgctgcaccatccgcctgtgggacacatatcagtctgaaccagaagggttctcccactttcatctctacgtgtgtgcagccttcttgatcaagtggaggaaagagatcttggatgaggaggattttcagggtctcctcatgctgctacagaacctacctacaatacactggggcaacgaagaaattgggctgcttctcgccgaggcatacagactcaagtacatgtttgccgatgccccaaatcactaccgccgataggtgctgtctcctccggggacccagactgccttcatctctgatggcagtctgatcactgtggccactgtgcgagccgtggaccccggccaggaaccactcctgttgtacaaagctcacacccaccgcccaggtcttaactttctggcatccaccactccatgtctctggatgtgtcacttggaccactgtcagtattccatgccgcgtggatgggcccagttctgggagaggacagaaaaggtggtacagggttgtctgcccctttaaaagaaactggacaaagaaggggaaggctcagggtctcacctcacattgtccctacaaggacaggccccaactgataaccgttgcttttttttttttgtgaacatagtttgatttgatcacaggtcaaaaacgccttatattttcgaaagactcctggcccctcttccctcttcctggtttcctagccgttccccttctgccccagtctgagccagtgaggggtagctttttaaaaccattattctagatggaggaggcactgatgcttgtaactctggaaagaggcctacacccaagggctaggaattttatttttccttttctcaccaggtgtctgcatgtgtgtgtgggtgtgaatgtgtatacatgcccatcagcatttagtcacatgtctgaatttctgtgtccagacgagccccatcaaactagttgggaagggccccagtgaccaagtgtataagcatcccttgaagagggattggggcaggggaggcagaaggggctctccagaccccttttccatgatgacccactccaagatattatgtgtaaattgtgttattatgtatatgggtaaagatgtacaaatatatgtcctctttgtagcagatatgattttatatttataatgtgcatcaacatgtgaaagcaatctaggtcactagcacagaggaagttgccaggaaggtggcttcagcacctccaggttggttctgggtgtcctgctgtgaggggtagaacgggaggctgctgaagtgagtagctgagcagctggagccatcccaagcatcagtgtctcagagtcctcctcgcccctttcttcaccccgccccccaacccccagactttcctggagcatctgccctttgctcctagcagcctccccaggaagggactgcagaggcgggcaagccctctctatgtgtttttatccccaccttccccggaatctggggagggcttttgtttttacgttttcaagttcagcattgtattcggacagaagctgtgactgaagactcagtgccaaggaaaggggcttcttgtgtgtccctcgggtttggggctcttctcagagagcagcactccatatcccttactgtcaccttcactccccacacagctcatgagatgtgtgacccctgtttgagttttggtatttggtagtggagggtggggggatgggggccagcagctgtcatcctcctgggaagccgagcagtgtccctggtgggtaacaccctcaagtctctttgccagtgaggccccaccacatcggtgtgagttaggtttctcatctggagctgtttctcaggcattcttcccaaccctcttccttttccccttcggtgtgcctcagtggtctccttcatagagtgagagggcttgagaccctccctcaaccggactaattaaagaaagacacttgtgttcccaagtggtggttttatttttttagtttttatgtttgtatgggaaattgtggataaagtgaaaagaattgtaaataaatggtgtatttcctcctcca

SEQ ID NO: 194953 - protein, 398 aa, Artificial Sequence
  derived and/or modified sequence
MDGVTPTLSTIRGRTLESSTLHVTPRSLDRNKDQITNIFSGFAGLLAILLVVAVFCILWNWNKRKKRQVPYLRVTVMPLLTLPQTRQRAKNIYDILPWRQEDLGRHESRSMRIFSTESLLSRNSESPEHVPSQAGNAFQEHTAHIHATEYAVGIYDNAMVPQMCGNLTPSAHCINVRASRDCASISSEDSHDYVNVPTAEEIAETLASTKSPSRNLFVLPSTQKLEFTEERDEGCGDAGDCTSLYSPGAEDSDSLSNGEGSSQISNDYVNMTGLDLSAIQERQLWVAFQCCRDYENVPAADPSGSQQQAEKDVPSSNIGHVEDKTDDPGTHVQCVKRTFLASGDYADFQPFTQSEDSQMKHREEMSNEDSSDYENVLTAKLGGRDSEQGPGTQLLPDE

SEQ ID NO: 194954 - DNA, 1197 bp, Artificial Sequence
  derived and/or modified sequence
atggacggcgtgacccccaccctgagcaccatcagaggcagaaccctggagagcagcaccctgcacgtgacccccagaagcctggacagaaacaaggaccagatcaccaacatcttcagcggcttcgccggcctgctggccatcctgctggtggtggccgtgttctgcatcctgtggaactggaacaagagaaagaagagacaggtgccctacctgagagtgaccgtgatgcccctgctgaccctgccccagaccagacagagagccaagaacatctacgacatcctgccctggagacaggaggacctgggcagacacgagagcagaagcatgagaatcttcagcaccgagagcctgctgagcagaaacagcgagagccccgagcacgtgcccagccaggccggcaacgccttccaggagcacaccgcccacatccacgccaccgagtacgccgtgggcatctacgacaacgccatggtgccccagatgtgcggcaacctgacccccagcgcccactgcatcaacgtgagagccagcagagactgcgccagcatcagcagcgaggacagccacgactacgtgaacgtgcccaccgccgaggagatcgccgagaccctggccagcaccaagagccccagcagaaacctgttcgtgctgcccagcacccagaagctggagttcaccgaggagagagacgagggctgcggcgacgccggcgactgcaccagcctgtacagccccggcgccgaggacagcgacagcctgagcaacggcgagggcagcagccagatcagcaacgactacgtgaacatgaccggcctggacctgagcgccatccaggagagacagctgtgggtggccttccagtgctgcagagactacgagaacgtgcccgccgccgaccccagcggcagccagcagcaggccgagaaggacgtgcccagcagcaacatcggccacgtggaggacaagaccgacgaccccggcacccacgtgcagtgcgtgaagagaaccttcctggccagcggcgactacgccgacttccagcccttcacccagagcgaggacagccagatgaagcacagagaggagatgagcaacgaggacagcagcgactacgagaacgtgctgaccgccaagctgggcggcagagacagcgagcagggccccggcacccagctgctgcccgacgagtag

SEQ ID NO: 194955 - DNA, 1197 bp, Artificial Sequence
  derived and/or modified sequence
atggacggcgtgaccccaaccctatccacaattcgcgggcgtacgttagaaagcagcaccttgcacgtgaccccgaggtctcttgaccgaaacaaagatcaaatcaccaatatcttctccggtttcgccggactactcgctatcctgctcgtggtcgccgttttttgcattctttggaattggaataaacgaaaaaagcgacaggtgccatatctgagggtcactgtcatgcctttactgaccctaccgcagacccggcagagagctaaaaacatctatgacatactcccctggcggcaggaagacttagggaggcatgaaagtcggtctatgagaatcttctctactgaatctctccttagccgaaattctgagtctcctgagcatgttccctcccaggctggtaatgcgttccaagagcacaccgcgcatatccacgctacggagtacgctgtgggcatttacgataatgctatggtgcctcagatgtgcggcaacctcacgccaagcgctcattgcatcaacgtccgtgcctctagagactgtgcctccatttctagtgaggattcacacgattacgtgaacgtgcccactgccgaagagatcgcagagaccctagctagcaccaagtccccatcccgcaatctcttcgttctgccatcaactcagaagctagagttcactgaagagagagacgagggatgtggggatgcaggcgactgtacatctctgtattcgcccggggctgaggactctgactctctgtcaaacggcgagggctcatcccaaatcagcaacgactacgtaaatatgacagggcttgacctctccgccatccaggaaagacagctttgggttgccttccaatgctgccgcgactatgagaatgttcctgcagccgacccttccggctcccaacagcaagctgagaaagatgtccccagctctaacatcggtcatgtcgaagataaaactgacgaccctggaacacacgtgcagtgtgtgaagcggacgtttttggccagtggtgactacgctgacttccagccgttcacacaaagcgaggactctcagatgaaacatagggaagagatgtccaatgaggattcaagcgactacgagaacgttctgacggctaagttaggtgggcgcgattcagaacaggggcccgggacacagctgctgccagacgaatag

SEQ ID NO: 194956 - DNA, 3023 bp, Artificial Sequence
  derived and/or modified sequence
tcttttcactctgctttgggtgttgaaggaagacgagcttctcacggagcctctcttgagcctcttggcagtttccccctctgtgcccctcacgtttccaccagaaacgtgaaggcagaggccacagattctccctgagccacctcacttggaagcaccatgtccggatgagatcgcacttcctgcagtgggcattagccacgtccaggtagaaccaaacctgttgcttttgtatgttgggtcaacttggcctgacgtttcagaggtagacacgagatagggagtttgttgcgggggtggggagaagtggtagacatgctggctaactgattatgattaagagaaacttagaagctgaagccagagagcatctcaaaggttcctgatacaatggatggtgtcactccaaccctttcgacaatcagagggaggaccttggagtccagcactctgcatgtgactccccgcagcctggacagaaataaagaccagatcaccaacatcttttccgggtttgcgggactcctcgccatcctcctggtcgttgcggttttctgcatcttgtggaattggaataaacggaagaagcgacaagttccttacctccgagttaccgtcatgcccttgctgactttgccacaaaccagacaaagagccaaaaatatttatgacatcttgccttggcgacaggaagacctggggagacatgagtcgaggagtatgcgcattttcagtactgagagcctcctctccagaaattctgagagcccggagcatgtgccctcccaagcaggcaatgccttccaggagcatacagcccacatccatgccacagagtacgcggtgggtatctatgacaacgccatggtcccccagatgtgtgggaacctcactccctcggcacactgcatcaatgtcagagcttccagagactgcgcaagcatttcttcagaggattcgcatgattatgtcaatgtccccacagcagaagagattgctgagactctagcttctaccaaaagcccttccagaaatctctttgttcttcccagtacccagaagctggagtttactgaggaaagagatgagggctgtggagatgctggtgactgcaccagtttgtattctccaggagctgaggacagtgattcactcagcaatggagaaggttcttctcagatctcaaatgactatgtcaacatgacagggttggatctcagtgccatccaggaaaggcagctctgggtggcttttcagtgctgcagagactatgaaaatgttccagcagcagatcccagtggaagccagcagcaggctgagaaagatgtgccatcctcaaacataggtcatgtcgaggacaagacagatgatcccgggacccatgtccaatgtgtcaaaaggacattccttgcttcaggggattatgcagactttcagccattcacacagagtgaggacagtcagatgaaacatagagaagagatgtcaaatgaggactccagtgactatgaaaatgtgctaactgccaagttaggaggcagggactctgagcaggggcctggcactcagctccttcctgatgaatgaagacccaggtacccagccataaagccacattgagtagtctatcccataggattgactactgcagagtctagtgcagacccgtgatcaccttagtgcttcagtggattcactggttagattaaaaagaggctgagatgagcagtgaactaagaggccacacaaaagcagaggtttgggaattccagaagggaattcttctcaagcagagtgtggttatctcctgtaccagcctaagaatgtttgctgaaactgcttcctagaactgtgaagaaagcaggaaagtagtgcacagtagtctaagattattaccttcattaataccaacaggctgcaaagcaagagtatagattattgtataatccagtcagaggtcaaaaggaaggaagaagttggagtggagtggggtgggcaatttccattttaaagagtgtaggcaggccaggtgcagtggctcatgcctgtaatcccagcattttggtaggccgaggagggcagatcacttggtgccaggagttctagaccagcctggccaacatgacccatctttactaaaaatacaaaaattagccaggcgtggtggtgtgcccctgtaatcccagctactcaggaggctgaagcaggagaatcgcttgaacccgggaggtggaggttgcagcaagccgagattgtgccactgtactccagcctggtgacagagcgagactccctctcaaaaaaaaaaacaaacaaaaaagaagtgtgggcaaccaaatgtaggtaaggatgaagaagaacaggaactctcactggtggctgatgggattgcaaagcgtcagggcagctttgaaaaacttttcagcagtttcttataagcataacttatcatatggcccagccatttcactactagaaattgacgcaagtgaactgaaaacttatgttcacacaaaaactcgcacatgactgtttatagcagcttcattcataattaccaaaaactagaaataacccagatatccttcaacaggtgattggataagctgttgatatccattccttgagtttatccatactcaacagtaaaaaatgaactcttggttcacacaataatatagacatatcttaaatccattttgctaagtgaaagaagctaggcctaaaagtctacatgttgggcgattctatttatatgacattctggaaaaggcaaaactatagggatgaagaacagatcagttgttgtcaggtttgagaaaaggagggaagtttgctacaaaggggctgcaaagggaataggctgatggagctgttctgtatggtactgtgtggtggatacatgacaatatccatttgcaaacacaagaactatacacatggccaggcgcggtggctcacacccgtaatcccagcactttgcggggccgaggcaggggaacacaaggtcaggagatcaagac

SEQ ID NO: 194957 - DNA, 1197 bp, Artificial Sequence
  derived and/or modified sequence
atggatggagtgacccccaccctgagcaccatccggggccgcaccctggagagcagcaccctgcacgtgacccccaggagcctggacaggaacaaggaccagatcaccaacatcttcagcggctttgctggcctgctggccatcctgctggtggtggccgtgttctgcatcctgtggaactggaacaagaggaagaagaggcaggtgccctacctgcgggtgacagtgatgcccctgctgaccctgccccagacccggcagagggccaagaacatctatgacatcctgccctggaggcaggaggacctgggcagacatgagagccgctccatgaggatcttcagcacagagagcctgctgagcaggaacagcgagagccctgagcacgtgcccagccaggccggaaatgccttccaggagcacacagcccacatccacgccacagaatatgctgtgggcatctatgacaatgccatggtgccccagatgtgtggcaacctgacccccagcgcccactgcatcaacgtgcgggccagccgggactgtgccagcatcagcagcgaggacagccatgactatgtgaatgtgcccacagctgaggagattgctgagaccctggccagcaccaagagccccagcaggaacctgtttgtgctgcccagcacccagaagctggagttcacagaggagagagatgagggctgtggagatgctggggactgcaccagcctgtacagccctggagctgaggacagcgacagcctgagcaatggagagggcagcagccagatcagcaatgactatgtgaacatgacaggcctggacctgagcgccatccaggagcggcagctgtgggtggccttccagtgctgccgggactatgaaaatgtgcctgctgctgaccccagcggcagccagcagcaggccgagaaggatgtgcccagcagcaacatcggccacgtggaggacaagacagatgaccccggcacccacgtgcagtgtgtgaagaggaccttcctggccagcggggactatgctgacttccagcccttcacccagagcgaggacagccagatgaagcaccgggaggagatgagcaatgaagacagcagtgactatgaaaatgtgctgacagccaagctgggcggccgggacagcgagcagggccctggcacccagctgctgcctgatgaatag

SEQ ID NO: 194958 - DNA, 1197 bp, Artificial Sequence
  derived and/or modified sequence
atggacggcgtgacccccaccctgagcaccatccggggccggaccctagaatcttctacactgcacgtgaccccacggagtttggataggaataaagaccagattacgaacatattttctggcttcgccggcctgttggcgatcttgctcgtggtagctgttttttgtatcctctggaattggaataaacgaaaaaagcgacaagtgccatatctgagagtgaccgtaatgcccctgctgaccctcccccagacccggcagagggcaaagaatatttatgatattctcccctggaggcaggaggacttggggagacatgaatcgcgaagtatgagaattttcagtaccgagagtctgctgtcacgcaatagcgaaagccctgagcacgttccaagccaggccggcaatgctttccaagagcacacagcacatatacacgcaacagagtacgctgttggcatttacgacaacgccatggtcccgcaaatgtgcggaaacctcacacccagcgcacactgtattaacgtccgcgcatcaagggactgtgcgagcatttcttccgaggattctcacgactatgtcaatgtacccaccgcagaggagatagcagaaaccctggcgagcaccaagtctcccagtcgtaacctgtttgtgctgccctcaacacagaaactcgagttcacagaggaaagagatgaaggctgtggcgacgcaggtgattgtacttccctctacagtcctggggcagaggatagcgacagcctgagtaatggagagggaagtagtcagatctctaatgattatgttaatatgacgggactggatctcagcgctattcaggagcgtcagctgtgggtggcatttcagtgctgcagggactacgaaaacgtgcccgcagccgatccgtccggatcgcagcagcaagctgagaaggacgttccgagctctaacatcggccacgttgaagataaaactgacgatcctggcactcacgtgcaatgcgtgaaaagaacctttctggcatctggtgattatgccgacttccaaccctttactcagtccgaagactcacaaatgaaacacagagaggaaatgagcaatgaagacagctccgactatgaaaatgtcctgacagcgaaacttggggggagggactctgagcagggccccggcacccagctgctgccagacgagtag

SEQ ID NO: 194959 - DNA, 1197 bp, Artificial Sequence
  derived and/or modified sequence
atggatggcgtgactccaaccctctctacaattagaggtaggaccttagaaagtagcaccttacatgtaacaccccgatccctggatagaaacaaggatcaaattacgaatattttttcgggcttcgctggtctgcttgcaattctgttagtggtggcagtgttctgtatcctgtggaactggaacaaacggaagaaaaggcaagtgccttacttgcgcgtgaccgtgatgcctctgcttactctgccgcagacacggcagcgtgcaaaaaatatctacgacatactgccatggagacaggaagacctgggaagacatgagtcccgtagtatgaggatcttttctaccgagagtctgctcagtagaaatagcgagtcaccagaacatgtcccttctcaggccggaaacgcctttcaggagcacactgcacatattcatgccaccgagtacgctgtagggatatatgacaacgcaatggttccgcagatgtgcggtaatctgacaccatctgcccattgtatcaatgtccgggcatctcgcgattgtgcctcaataagcagcgaggacagtcacgattatgtgaatgtgcctactgctgaggagattgccgagaccctggcgtccaccaaaagtccaagccggaatctctttgtgctgccttccacccaaaaactcgaattcacggaggaacgcgatgaaggttgcggtgacgccggtgactgtacgtctctgtactcgccaggtgctgaagactctgatagcttgtcaaacggcgagggctcaagtcaaatctccaatgactatgtgaacatgacagggctggatctttctgcaatccaggagcggcagttgtgggtagcctttcagtgctgcagagactatgaaaacgtgcccgcagccgaccctagcggaagccagcagcaggctgaaaaagatgtgccatctagcaatataggccacgtagaggataaaactgacgatcctggaacccatgtccaatgcgtgaagcgaaccttcctcgcgtcaggagattatgctgatttccagcctttcactcagagcgaggactcccagatgaagcatagggaagagatgtcaaacgaggactccagtgattacgaaaacgtcctgaccgcaaagcttggtggacgggattctgagcagggccctggtacgcagctcctgccggacgagtag

SEQ ID NO: 194960 - protein, 579 aa, Artificial Sequence
  derived and/or modified sequence
MPSASCDTLLDDIEDIVSQEDSKPQDRHFVRKDVVPKVRRRNTQKYLQEEENSPPSDSTIPGIQKIWIRTWGCSHNNSDGEYMAGQLAAYGYKITENASDADLWLLNSCTVKNPAEDHFRNSIKKAQEENKKIVLAGCVPQAQPRQDYLKGLSIIGVQQIDRVVEVVEETIKGHSVRLLGQKKDNGRRLGGARLDLPKIRKNPLIEIISINTGCLNACTYCKTKHARGNLASYPIDELVDRAKQSFQEGVCEIWLTSEDTGAYGRDIGTNLPTLLWKLVEVIPEGAMLRLGMTNPPYILEHLEEMAKILNHPRVYAFLHIPVQSASDSVLMEMKREYCVADFKRVVDFLKEKVPGITIATDIICGFPGETDQDFQETVKLVEEYKFPSLFINQFYPRPGTPAAKMEQVPAQVKKQRTKDLSRVFHSYSPYDHKIGERQQVLVTEESFDSKFYVAHNQFYEQVLVPKNPAFMGKMVEVDIYESGKHFMKGQPVSDAKVYTPSISKPLAKGEVSGLTKDFRNGLGNQLSSGSHTSAASQCDSASSRMVLPMPRLHQDCALRMSVGLALLGLLFAFFVKVYN

SEQ ID NO: 194961 - DNA, 1740 bp, Artificial Sequence
  derived and/or modified sequence
atgcccagtgcctcctgcgatacactactggacgacatcgaggacatcgtatctcaggaggacagtaagcctcaggatcgccatttcgtccgcaaagatgtggttccaaaggttaggcggagaaacacacaaaagtacctccaggaggaggagaattctcccccatctgactctacaattccagggatccagaagatctggattcggacctggggttgtagtcacaacaactccgacggcgaatatatggccggacagttagcagcctacggctataaaattactgagaacgccagcgacgccgatttgtggctcctcaacagttgcaccgtgaagaaccccgccgaggaccacttccggaacagcattaagaaagctcaggaagagaacaaaaagatcgtgctggcaggatgtgtgccacaggcccagccgaggcaagactatctgaagggtttgtctattattggtgtccagcagatagatagggtggttgaggtcgtagaagaaaccataaaaggacacagcgtccgcctgttaggccaaaagaaagataacggccggaggctgggcggagctcggctggatctgccaaagatccgaaaaaacccattaatcgagattatttctatcaataccgggtgcctcaacgcctgcacatattgcaaaaccaaacacgcacggggcaacctcgcttcctatcctatcgatgagttggtagatagagctaaacagagcttccaggagggagtatgtgaaatttggcttacgtccgaggacacaggggcctatggacgtgacatcggtacaaatctacccaccctgctctggaaactggttgaagtgatccccgagggcgccatgctgcgtttgggaatgacaaaccccccctacatactcgaacacctggaagagatggcaaagatactcaaccatccccgagtatacgcattccttcatatccctgtacaatctgccagcgacagcgtactgatggaaatgaaaagggaatactgcgtggcagattttaaaagagtggtcgacttcctgaaggagaaagtgcccggtataacaattgctacagacatcatctgcggatttcctggagaaaccgatcaggattttcaggaaaccgtgaaacttgtagaagaatacaaatttccatccctgttcattaatcagttctatccccgacccggaacacccgcagccaaaatggaacaggtacccgctcaggtgaagaagcaaaggacgaaggacctctcaagagtgttccattcttactctccatatgaccataaaatcggcgagcggcagcaggtcctagtgaccgaggagagtttcgattccaaattttatgtggctcacaaccagttctacgagcaggtcctcgtgcctaaaaatcccgctttcatggggaaaatggttgaggttgacatttacgagtctggcaagcactttatgaaagggcaacctgtgtccgacgccaaagtgtatacacctagcatttctaaacctctggccaagggcgaggtttccggcctgactaaggatttccgtaacggtctcgggaaccagctgtctagcggatctcataccagcgctgcctcacagtgcgatagcgcctcttcaagaatggtcctccccatgccgaggctgcaccaagattgtgccctgcgaatgtctgtgggtcttgccctcctgggcctgctgtttgcgtttttcgtgaaggtttataactag

SEQ ID NO: 194962 - DNA, 1740 bp, Artificial Sequence
  derived and/or modified sequence
atgcccagcgcctcatgcgacaccctgctggatgatatagaggacatcgtgtcacaagaggacagcaaaccacaggacagacacttcgtccggaaggacgtcgtgcccaaagttcggaggaggaatacccaaaaatatttgcaggaggaagagaactcacccccctctgattcgaccatccccggcatccagaagatatggattcgtacttggggctgtagtcataacaatagcgatggcgagtacatggcagggcaacttgcggcttatggctacaagatcactgagaacgcctccgatgccgacttatggctgctgaactcctgtactgtcaagaatcctgcggaagatcatttcaggaattcaattaagaaggcgcaggaggagaacaagaagatcgtgttggctgggtgtgttccacaggcccagcctcggcaagactatttgaagggcctgagtatcatcggtgttcagcagattgatcgggttgtcgaagtggtcgaagaaaccatcaagggacacagtgtgcgactgcttgggcagaaaaaagataacggccgccgcctcggcggtgccaggttggacttacctaagatacggaagaacccacttatcgaaattatatcaatcaatacaggatgtctgaacgcttgtacctattgcaagaccaagcatgctagggggaacctcgcaagctaccccatagatgaactggtcgacagagctaaacagagcttccaagagggagtctgcgagatttggttgacctccgaggatacaggggcttacggtcgcgatatcgggactaacctgcccacattgctatggaagctcgtggaggtgattcctgagggcgcaatgctgcgcctaggaatgacaaaccccccttatatcttggagcatctggaagaaatggccaagattcttaaccaccccagagtttatgcctttctccacattccagtgcagagtgcctctgacagcgtgttgatggagatgaaacgcgagtattgtgtcgctgacttcaaacgggtggtcgattttctgaaagaaaaggtgccagggattacaattgcgacagacatcatatgcggatttcccggggagacggaccaggattttcaggaaaccgtgaagttagttgaggagtataagttccctagtctgtttattaaccagttctacccgagacccgggacccctgcagctaagatggagcaggtgccggcccaggtgaagaagcagcggaccaaggacctttcacgggtctttcacagctactcaccatatgatcacaaaattggcgagcgccagcaagtgttggtgacagaggaaagcttcgattcgaaattctacgtcgcccataaccaattctacgaacaggtgctcgtgcccaaaaatcctgccttcatggggaagatggttgaggtggacatatatgagagtggtaagcactttatgaaggggcaaccggttagcgatgccaaggtgtacacacccagcatttcaaagcctctagcaaaaggcgaggtatccggcctcaccaaggactttcgaaacggactgggcaaccaattgagtagcggctcacacacctccgccgcatcacagtgcgattctgccagctcccgcatggtactgccaatgccccggctacaccaggactgtgctctcagaatgtccgtcggcctagccctcctgggtcttctgttcgcttttttcgtgaaggtgtataattag

SEQ ID NO: 194963 - DNA, 1740 bp, Artificial Sequence
  derived and/or modified sequence
atgcccagcgccagctgtgacaccctgctggatgacatcgaggacatcgtgtcccaggaggacagcaagccccaggacagacactttgtgaggaaggatgtggtgcccaaggtgagaagaagaaacacccagaagtacctgcaggaggaggagaacagcccccccagcgacagcaccatccctggcatccagaagatctggatccgcacctggggctgcagccacaacaacagtgatggagagtacatggccggccagctggccgcctacggctacaagatcacagaaaatgccagtgatgctgacctgtggctgctgaacagctgcaccgtgaagaacccagctgaggaccacttcaggaacagcatcaagaaggcccaggaggagaacaagaagatcgtgctggccggctgtgtgccccaggcccagccccggcaggactacctgaagggcctgagcatcattggagtgcagcagattgacagagtggtggaggtggtggaggagaccatcaagggccacagcgtgcggctgctgggccagaagaaggacaatggaagaaggctgggcggggcccggctggacctgcccaagatcaggaagaaccccctgattgagatcatcagcatcaacacaggctgcctgaatgcctgcacctactgcaagaccaagcacgcccggggcaacctggccagctaccccattgatgagctggtggaccgggccaagcagagcttccaggagggcgtgtgtgagatctggctgaccagcgaggacaccggggcctacggccgggacatcggcaccaacctgcccaccctgctgtggaagctggtggaggtgattcctgagggcgccatgctgcggctgggcatgaccaaccccccctacatcctggagcacctggaggagatggccaagatcctgaaccacccccgggtgtatgccttcctgcacatccctgtgcagagcgccagtgacagcgtgctgatggagatgaagcgggagtactgtgtggccgacttcaagagggtggtggacttcctgaaggagaaggtgcccggcatcaccatcgccacagacatcatctgtggcttccctggagaaacagaccaggacttccaggagaccgtgaagctggtggaggagtacaagttccccagcctcttcatcaaccagttctacccccggcccggcaccccagctgccaagatggagcaggtgcctgcccaggtgaagaagcagaggaccaaggacctgagcagggtcttccacagctacagcccctatgaccacaagatcggggagcggcagcaggtgctggtgacagaggagagctttgacagcaagttctacgtggcccacaaccagttctatgagcaggtgctggtgcccaagaacccagccttcatgggcaagatggtggaggtggacatctatgagagcggcaagcacttcatgaagggccagcctgtgtctgatgccaaggtgtacacccccagcatcagcaagcccctggccaagggggaggtgtctggcctgaccaaggacttcagaaatggcctgggcaaccagctgagcagcggcagccacaccagcgctgccagccagtgtgacagcgccagcagcaggatggtgctgcccatgccccggctgcaccaggactgtgccctgaggatgtctgtgggcctggccctgctgggcctgctgtttgccttctttgtgaaggtgtacaactag

SEQ ID NO: 194964 - DNA, 1740 bp, Artificial Sequence
  derived and/or modified sequence
atgcccagcgccagctgcgacaccctgctggacgacatcgaggacattgtcagccaagaagacagcaagccacaggataggcacttcgtaaggaaagatgtcgtgcccaaggtgaggcggcgtaacacacagaagtatctccaggaagaggagaactcaccaccgtccgacagcacaataccaggcatccagaaaatctggatacgtacctggggatgctcccataacaactcggacggagagtatatggccggacaattggctgcttacggatataaaataactgagaacgcttctgatgctgatctatggctgttaaactcttgcacagtcaaaaaccctgcggaagaccactttcgtaatagcataaaaaaagcccaggaggaaaacaagaaaatcgtgttagcaggttgtgttccacaagctcagcctaggcaggactatctgaaaggcttgagcataattggcgttcagcaaattgatagggtcgtggaagtggtcgaggagaccataaaggggcacagcgtccgtctacttggccagaagaaggacaacgggaggaggttgggtggtgctaggttagatctccctaagatacggaagaacccccttattgagattatatccattaacactggctgtttgaacgcgtgcacttattgcaaaacaaaacacgcccgtggcaacctggcgagttacccaatcgatgaattggtcgatagggccaagcagtcattccaggagggcgtctgtgaaatctggttaacgagtgaagatactggggcatacggtagagatatcggaaccaacctgcctacccttctgtggaaactggtggaggtaatccctgaaggggccatgctgcgcttgggcatgactaatcccccctacatcctggagcatcttgaagagatggctaaaatcttaaaccatccgagagtgtatgcgtttctgcacatccctgtacagtcagccagtgattcggttctgatggaaatgaagcgggaatattgcgtggcagacttcaaaagagtggttgacttcctgaaagaaaaagttcccgggattactatagcaaccgacattatctgtgggtttcctggagagacggatcaggactttcaggagaccgttaagttggtggaagaatataaatttcccagcctctttattaaccaattctatcctcgacctggcaccccggccgccaaaatggagcaggtgccagcccaggtgaaaaaacagcgtaccaaggatctgagccgagtctttcactcttactctccttatgatcacaaaatcggagagcggcaacaagtgctagtgaccgaggaaagcttcgattctaaattctatgttgcccacaaccaattttacgagcaagtgctggttcccaagaaccccgccttcatgggcaagatggttgaggtggacatctacgagtcgggcaagcacttcatgaaaggccagcctgtgagtgacgcaaaggtgtacaccccttccatttccaagcccctcgctaagggtgaggtttcaggtctcaccaaagattttaggaatggactgggaaatcagctatcatctggctcccacacaagcgcagcctcccagtgcgactctgcaagttctagaatggtgctgccgatgccccgcctccatcaagattgtgctcttcgtatgtctgttggactagcattgctgggactgctgtttgcgttcttcgtcaaggtgtacaattag

SEQ ID NO: 194965 - DNA, 1740 bp, Artificial Sequence
  derived and/or modified sequence
atgcccagcgccagctgcgacaccctgctggacgacatcgaggacattgttagccaggaagattcaaagccacaggacagacacttcgtgagaaaagatgtggtgcccaaggtgagacgccggaacacccaaaaatatctacaggaagaggagaatagtcccccctcagattcaaccatcccagggatccagaagatttggatccgcacatgggggtgctcccacaataactcagacggcgagtacatggccggccagctggctgcttatgggtacaagataactgagaatgccagtgacgctgatctgtggcttctaaattcgtgcacagtcaaaaatccggctgaagaccacttcaggaacagcatcaagaaggctcaggaagagaacaaaaagatcgtcctggccggatgcgtgccgcaagcccagcccaggcaggattacctcaaagggctgtcgataatcggagtgcagcaaattgatcgggtggtggaggtggtggaagaaaccatcaaaggacactcagttagactgctaggccagaagaaggacaatggtcggcggctgggcggtgcccgattggacctcccgaagattcggaaaaatcctttaatcgagatcattagcattaatactggctgtctaaatgcatgcacctactgcaagaccaagcatgcaaggggaaatctagccagttatccaattgatgaactagtagacagggctaaacaatcatttcaggagggcgtgtgcgaaatctggctcacatccgaagacaccggcgcatatggcagagacatcgggaccaacctacctactctgctgtggaagctggtggaggtcatcccagagggagccatgttacggctgggcatgaccaaccccccctacattctggagcacctcgaagaaatggccaagatcctgaaccaccccagagtttacgcctttttgcacatcccagttcaaagcgcttccgattctgtgctgatggagatgaaaagagagtactgcgtggctgattttaagcgtgtggtcgattttcttaaagaaaaagttccaggcataactattgccacggatatcatatgcggcttccctggcgagactgatcaggacttccaggagacagttaaactcgtagaagagtacaaattcccttccctgttcatcaatcagttttaccccagaccaggaactcccgcagccaagatggagcaggtcccggcgcaggtcaaaaaacagagaactaaggacctgtcacgtgtgttccacagttactcgccctatgatcacaagatcggggagagacagcaggtgctggtgaccgaagagtctttcgactcaaaattttacgtggcccacaatcagttctacgagcaggtgcttgttccgaaaaatcccgctttcatggggaagatggtggaagtggacatctatgaaagcggtaagcactttatgaaaggccagcccgtgtctgacgccaaagtctacactccatctattagcaaacccttagccaagggcgaagtttctggcctaacgaaggacttcagaaatggcctcggcaaccagctgtcttccggatcccatacaagtgctgcaagccaatgtgactcagcctcatctcgaatggtattgcctatgccccgccttcatcaggactgtgcactgagaatgtctgtgggcctggccctcttaggtctgctgttcgccttcttcgtgaaagtttataactag

SEQ ID NO: 194966 - DNA, 1740 bp, Artificial Sequence
  derived and/or modified sequence
atgccctcagcttcctgcgacacactcctcgatgatattgaggacatcgtttcccaagaagatagtaaaccacaggatcgccacttcgttcggaaggatgtggttccgaaggtccgcaggagaaacacacagaaatatctccaagaggaggagaatagccctccaagtgatagcactataccgggaatacagaagatttggatcagaacatggggatgtagccacaacaatagtgacggggagtatatggccggacagctggctgcctatgggtacaaaataaccgagaatgcgagtgatgccgacctgtggctcctgaatagttgtaccgtgaaaaaccccgctgaagatcactttagaaactctattaaaaaggctcaggaggagaataagaaaatcgtcctggccggttgcgtgccccaagcccagccacgacaggactatctgaaggggctgtctatcatcggcgtacagcagatcgacagagtggttgaggtcgttgaggaaaccattaagggccactcagtccggcttctgggtcagaagaaggataacggcagaagactcggcggtgctagactggacttgcccaaaattaggaagaaccccctcatcgagatcatcagcattaacaccggctgccttaatgcttgcacttactgtaagactaagcatgctcgaggtaatctggcttcctatcccatcgacgagctcgtggatcgcgcaaagcaaagctttcaggagggggtctgcgaaatctggctgacctcagaggatactggcgcttatgggagagacattggaaccaacctacccaccctactgtggaagctcgtggaggtcatcccagagggagctatgctgcgccttggaatgacaaatccaccatacattctcgagcatcttgaggagatggcaaagatactgaatcatcccagggtttacgcgttcttacacataccggtacagtctgcatctgactcagtgctgatggaaatgaaaagagagtattgtgtggccgacttcaaacgagtggtggatttcttaaaagagaaagtccctgggataactatcgccacggacatcatctgcgggtttccaggagagaccgaccaagactttcaggaaacagtcaagctggttgaggaatacaaattcccaagtctgtttattaatcagttttatccgagaccgggtacacccgctgcaaagatggagcaggtgccagcccaggtaaaaaaacagcgtaccaaggatttgagccgagtattccatagttactctccctatgaccacaaaattggagaacgtcagcaggtacttgtcactgaggagagctttgactcaaaattttacgtggcacataaccaattttatgaacaagtgcttgtgcccaaaaatccagccttcatgggaaagatggtggaggttgacatatacgaatctggaaaacattttatgaagggacagccggtctccgatgcgaaggtctacactccttctatatctaagcccctggcaaaaggcgaagtgagcggactcacaaaggattttcgcaatggcctgggcaatcagttgtccagtggctcacacacgtctgccgcaagccagtgcgacagcgcttctagccgcatggtgctccctatgcctcgactacaccaggactgcgcgttgcgaatgagcgtgggactggcattgctggggttgttatttgcatttttcgtcaaggtttacaactag

SEQ ID NO: 194967 - DNA, 1740 bp, Artificial Sequence
  derived and/or modified sequence
atgccaagcgccagctgtgatactttgcttgatgatattgaggatatcgtgtcacaggaggactccaagccccaagacaggcacttcgtgcgaaaagacgttgtccctaaggttagacgacgtaacacgcagaagtatctgcaggaagaggagaatagtcctccatctgattccacaattcccggtatacagaaaatctggatcaggacgtggggctgctcacacaacaactccgacggtgagtacatggcgggtcagctcgccgcatatggctacaaaatcaccgagaacgccagcgacgccgatctctggctgctcaatagttgtaccgtcaagaatcctgcagaggatcacttccgcaattccattaagaaggcacaggaggaaaacaaaaagatcgttttggccggttgcgttcctcaggcccaacctcgccaagattacctgaagggactaagcataattggcgtgcagcaaatcgacagggttgtggaggtcgtcgaagagaccataaagggccactccgttcggctgcttggacaaaaaaaagacaacgggaggaggctgggaggtgcgcgtcttgacttacccaagatacggaagaaccccctgattgagattatttctatcaacaccggctgcctgaacgcctgcacatactgtaagactaaacatgctaggggcaacctagcgagctaccctatcgatgagttggttgatcgcgcaaagcagagcttccaagaaggggtatgcgagatttggctcacttccgaggataccggcgcttatggtcgagatatcgggactaacctgcccaccctcctgtggaagctggtggaagtgatccccgaaggggcaatgctacggctcggcatgacaaatccaccttacattctggaacaccttgaagagatggccaaaattctgaaccaccctcgggtgtacgcctttctccatataccggtgcagagtgccagtgactccgtgttgatggagatgaaaagagagtactgcgttgccgactttaagagggtggtggacttcctgaaggagaaggtacccggaatcactatcgcgaccgacattatctgtggtttccccggagaaacagaccaggatttccaggaaacggtgaagctggtggaggaatacaagtttccctccctctttatcaaccagttttaccccagacctgggaccccggctgctaaaatggagcaggtcccagcacaagtgaaaaagcagaggaccaaggacttgagtcgggttttccattcctactcgccttacgatcacaaaatcggcgagaggcagcaggttctagtgaccgaagaatccttcgacagcaaattctatgtggcccataatcagttctacgaacaagtgctggttcctaaaaatcccgcatttatgggaaaaatggtggaggtggacatctacgagtccggcaagcacttcatgaaaggacagcctgtatctgatgcaaaagtctatactccctctatttctaagcctttggctaaaggtgaagtgtctggtctgacgaaagacttcagaaatggcctcggaaatcagttatcttccggcagccacacttccgcagccagccaatgcgacagtgcaagttctagaatggtactgcccatgccaaggcttcatcaggactgcgctttgcgcatgagcgttggccttgccctcctggggctgttgtttgcgtttttcgtgaaggtgtataattag

SEQ ID NO: 194968 - DNA, 3272 bp, Artificial Sequence
  derived and/or modified sequence
aaataaacgtggcgggacgtatgtgtcatggcgctctccatctaaagtctgtgcagcttccggagagtggcgggttgattttctcactttggactggtttttacttcccgacttctggactcatctttcaagaggactttagactaattgcagataattaagagaatatgccttctgcatcctgtgatacactactggatgacatcgaagatatcgtgtctcaggaagattcaaaaccacaagataggcattttgtaagaaaggatgttgtcccgaaggtacgaaggcgaaatacccaaaaatatttgcaagaggaagaaaacagtccaccaagtgacagcactattccaggcatacagaaaatttggatacgaacatggggttgttctcataataattcagatggagaatatatggctggacagctagctgcttatggctataaaattacagaaaatgcatccgatgcagatttatggctcctgaacagttgcactgtaaaaaacccagctgaagaccactttagaaactcaattaaaaaagctcaagaggagaacaagaaaatcgtactggctggatgcgttcctcaagcccagcctcgccaggactaccttaagggactgagtatcattggggttcagcagatagatcgtgtggtagaagttgtggaggagacaattaaaggtcactctgtgagactgctgggtcagaaaaaggataatggaaggcggcttgggggagcacgattggatttgccgaagattaggaagaatccactgatagaaatcatttccatcaataccgggtgtctcaatgcttgtacctactgcaaaactaaacacgccagaggaaatttggccagttatccaattgatgaactagtagatagagccaaacaatcttttcaagagggtgtttgtgagatatggttgaccagtgaagacacgggggcttatggcagagatattggcaccaatctccccacactcctgtggaaactggttgaagtgattcctgagggagcaatgctgaggcttggcatgacaaatccgccctatattttagagcatctggaggaaatggcaaaaatccttaatcaccccagagtctacgcttttctgcacataccagtccagtctgcctccgacagcgtactcatggaaatgaaaagagaatactgtgtggctgacttcaaaagagtagtggattttctgaaagagaaagttcctggaataactattgctacagatattatctgtggttttcctggagaaacagatcaggattttcaagaaacagtgaaacttgttgaagagtacaaattcccaagcctgtttattaaccaattttacccaagaccaggaactcctgctgcaaaaatggaacaagttccagcacaagtgaaaaagcaaaggacaaaagatctttctcgggtgtttcattcttacagtccatatgatcacaagattggtgaaagacaacaagtgttagtaacagaagaatcttttgattccaagttttatgttgcacacaatcaattctatgagcaggttttagtgccaaagaaccctgcgttcatggggaagatggttgaagtggacatctatgaatcaggcaaacattttatgaaagggcagccagtatctgatgccaaagtgtacacgccctccatcagcaaaccgctagcaaagggagaagtctcgggtttgacaaaggacttcagaaatgggcttgggaaccagctgagttcaggatcccacacctctgctgcatctcagtgtgactcagcgagttccagaatggtgctgcccatgccaaggctacatcaagactgtgcgctgaggatgtccgtgggcttggctctgctgggtcttctttttgctttttttgtcaaggtctataattagaatacaactaatggaaacatctataaagaagaatacatttctaattaaaatcttcaatgaacaggaaagcgacatctccattctccaagggcaataatttgtactggtcatgctgcctccttctcagccactcttcttaatgaggctccccctgtctcacattgagttgggcccattggttatttgacctaaaacctaatcaccgctaccatagcacatccttcaaattaaactgcttttggtttacttttagcaagaaatgcaagcggttgcatttttttctgtttgtttcaatctctaatctttaagtcagaacctaattgtacagtggctctggccatcttttcctcatgtggaagaattttctatctttaataaactttttctttgttttttttttccagatggagtttcgctcttgtcccccaggctggagtggtgcagtggcacgatctcaggtcactgcaacctctgcctcctgggttcaaacgattctcctgcctcagcctcccaagtagctgggattacaggcatgcgccaccaagcccagacaatttttttgtgttttcagtagagacggagtttcaccatgttggccaggctagtctcgaactcctgacctcaagtgatccgcccgcctcggcctcccaaagtgctaggattacaggcgtgagccactgcgcccggcctctttaataaatatttttaagtgcatcttccccttcaggctttgtttggagtcccagtgctacaaacattgtatttttcacagcagatgtgttcctgaaaagtgtatagaaacctgttctgggaacctgaatgcttttggaatgcacggggagagtctgccagctaaaggactcctggcaacattctgtgaaatatgaaactggaaaactggatttgtcgaaaactaattgtgcccattttctcacatttttgatccattggggttttttttttgtttttgtttttttttttttttgagtcaaggtctcactctgtcaccctggctggagtgcaatggcactatcttggctcactgcagccttgacctcctggactcaagcagtcctcctacctcagcctccctaatagccaggggctacaggcatataccaccatgcccaactaattttttaattttttgtagagatgagtgtcactatgttgcccaggcttgcctggaactcctagcctcaagcagtcttcttgcctcagcctcccaaagtgctgggattacaggcgtgagccactccacccagcccagattaaatgtttttatttctacctgccatcattggtctttactaagtgaagtgacttctttctttaacaataaatagaattggtatactaagcaaa

SEQ ID NO: 194969 - DNA, 3115 bp, Artificial Sequence
  derived and/or modified sequence
ggtagagaatatgccttctgcatcctgtgatacactactggatgacatcgaagatatcgtgtctcaggaagattcaaaaccacaagataggcattttgtaagaaaggatgttgtcccgaaggtacgaaggcgaaatacccaaaaatatttgcaagaggaagaaaacagtccaccaagtgacagcactattccaggcatacagaaaatttggatacgaacatggggttgttctcataataattcagatggagaatatatggctggacagctagctgcttatggctataaaattacagaaaatgcatccgatgcagatttatggctcctgaacagttgcactgtaaaaaacccagctgaagaccactttagaaactcaattaaaaaagctcaagaggagaacaagaaaatcgtactggctggatgcgttcctcaagcccagcctcgccaggactaccttaagggactgagtatcattggggttcagcagatagatcgtgtggtagaagttgtggaggagacaattaaaggtcactctgtgagactgctgggtcagaaaaaggataatggaaggcggcttgggggagcacgattggatttgccgaagattaggaagaatccactgatagaaatcatttccatcaataccgggtgtctcaatgcttgtacctactgcaaaactaaacacgccagaggaaatttggccagttatccaattgatgaactagtagatagagccaaacaatcttttcaagagggtgtttgtgagatatggttgaccagtgaagacacgggggcttatggcagagatattggcaccaatctccccacactcctgtggaaactggttgaagtgattcctgagggagcaatgctgaggcttggcatgacaaatccgccctatattttagagcatctggaggaaatggcaaaaatccttaatcaccccagagtctacgcttttctgcacataccagtccagtctgcctccgacagcgtactcatggaaatgaaaagagaatactgtgtggctgacttcaaaagagtagtggattttctgaaagagaaagttcctggaataactattgctacagatattatctgtggttttcctggagaaacagatcaggattttcaagaaacagtgaaacttgttgaagagtacaaattcccaagcctgtttattaaccaattttacccaagaccaggaactcctgctgcaaaaatggaacaagttccagcacaagtgaaaaagcaaaggacaaaagatctttctcgggtgtttcattcttacagtccatatgatcacaagattggtgaaagacaacaagtgttagtaacagaagaatcttttgattccaagttttatgttgcacacaatcaattctatgagcaggttttagtgccaaagaaccctgcgttcatggggaagatggttgaagtggacatctatgaatcaggcaaacattttatgaaagggcagccagtatctgatgccaaagtgtacacgccctccatcagcaaaccgctagcaaagggagaagtctcgggtttgacaaaggacttcagaaatgggcttgggaaccagctgagttcaggatcccacacctctgctgcatctcagtgtgactcagcgagttccagaatggtgctgcccatgccaaggctacatcaagactgtgcgctgaggatgtccgtgggcttggctctgctgggtcttctttttgctttttttgtcaaggtctataattagaatacaactaatggaaacatctataaagaagaatacatttctaattaaaatcttcaatgaacaggaaagcgacatctccattctccaagggcaataatttgtactggtcatgctgcctccttctcagccactcttcttaatgaggctccccctgtctcacattgagttgggcccattggttatttgacctaaaacctaatcaccgctaccatagcacatccttcaaattaaactgcttttggtttacttttagcaagaaatgcaagcggttgcatttttttctgtttgtttcaatctctaatctttaagtcagaacctaattgtacagtggctctggccatcttttcctcatgtggaagaattttctatctttaataaactttttctttgttttttttttccagatggagtttcgctcttgtcccccaggctggagtggtgcagtggcacgatctcaggtcactgcaacctctgcctcctgggttcaaacgattctcctgcctcagcctcccaagtagctgggattacaggcatgcgccaccaagcccagacaatttttttgtgttttcagtagagacggagtttcaccatgttggccaggctagtctcgaactcctgacctcaagtgatccgcccgcctcggcctcccaaagtgctaggattacaggcgtgagccactgcgcccggcctctttaataaatatttttaagtgcatcttccccttcaggctttgtttggagtcccagtgctacaaacattgtatttttcacagcagatgtgttcctgaaaagtgtatagaaacctgttctgggaacctgaatgcttttggaatgcacggggagagtctgccagctaaaggactcctggcaacattctgtgaaatatgaaactggaaaactggatttgtcgaaaactaattgtgcccattttctcacatttttgatccattggggttttttttttgtttttgtttttttttttttttgagtcaaggtctcactctgtcaccctggctggagtgcaatggcactatcttggctcactgcagccttgacctcctggactcaagcagtcctcctacctcagcctccctaatagccaggggctacaggcatataccaccatgcccaactaattttttaattttttgtagagatgagtgtcactatgttgcccaggcttgcctggaactcctagcctcaagcagtcttcttgcctcagcctcccaaagtgctgggattacaggcgtgagccactccacccagcccagattaaatgtttttatttctacctgccatcattggtctttactaagtgaagtgacttctttctttaacaataaatagaattggtatactaagcaaa

SEQ ID NO: 194970 - DNA, 1740 bp, Artificial Sequence
  derived and/or modified sequence
atgcccagcgccagctgcgacaccctgctggacgacatcgaggacatcgtgagccaggaggacagcaagccccaggacagacacttcgtgagaaaggacgtggtgcccaaggtgagaagaagaaacacccagaagtacctgcaggaggaggagaacagcccccccagcgacagcaccatccccggcatccagaagatctggatcagaacctggggctgcagccacaacaacagcgacggcgagtacatggccggccagctggccgcctacggctacaagatcaccgagaacgccagcgacgccgacctgtggctgctgaacagctgcaccgtgaagaaccccgccgaggaccacttcagaaacagcatcaagaaggcccaggaggagaacaagaagatcgtgctggccggctgcgtgccccaggcccagcccagacaggactacctgaagggcctgagcatcatcggcgtgcagcagatcgacagagtggtggaggtggtggaggagaccatcaagggccacagcgtgagactgctgggccagaagaaggacaacggcagaagactgggcggcgccagactggacctgcccaagatcagaaagaaccccctgatcgagatcatcagcatcaacaccggctgcctgaacgcctgcacctactgcaagaccaagcacgccagaggcaacctggccagctaccccatcgacgagctggtggacagagccaagcagagcttccaggagggcgtgtgcgagatctggctgaccagcgaggacaccggcgcctacggcagagacatcggcaccaacctgcccaccctgctgtggaagctggtggaggtgatccccgagggcgccatgctgagactgggcatgaccaaccccccctacatcctggagcacctggaggagatggccaagatcctgaaccaccccagagtgtacgccttcctgcacatccccgtgcagagcgccagcgacagcgtgctgatggagatgaagagagagtactgcgtggccgacttcaagagagtggtggacttcctgaaggagaaggtgcccggcatcaccatcgccaccgacatcatctgcggcttccccggcgagaccgaccaggacttccaggagaccgtgaagctggtggaggagtacaagttccccagcctgttcatcaaccagttctaccccagacccggcacccccgccgccaagatggagcaggtgcccgcccaggtgaagaagcagagaaccaaggacctgagcagagtgttccacagctacagcccctacgaccacaagatcggcgagagacagcaggtgctggtgaccgaggagagcttcgacagcaagttctacgtggcccacaaccagttctacgagcaggtgctggtgcccaagaaccccgccttcatgggcaagatggtggaggtggacatctacgagagcggcaagcacttcatgaagggccagcccgtgagcgacgccaaggtgtacacccccagcatcagcaagcccctggccaagggcgaggtgagcggcctgaccaaggacttcagaaacggcctgggcaaccagctgagcagcggcagccacaccagcgccgccagccagtgcgacagcgccagcagcagaatggtgctgcccatgcccagactgcaccaggactgcgccctgagaatgagcgtgggcctggccctgctgggcctgctgttcgccttcttcgtgaaggtgtacaactag

SEQ ID NO: 194971 - protein, 380 aa, Artificial Sequence
  derived and/or modified sequence
MFRLLSWSLGRGFLRAAGRRCRGCSARLLPGLAGGPGPEVQVPPSRVAPHGRGPGLLPLLAALAWFSRPAAAEEEEQQGADGAAAEDGADEAEAEIIQLLKRAKLSIMKDEPEEAELILHDALRLAYQTDNKKAITYTYDLMANLAFIRGQLENAEQLFKATMSYLLGGGMKQEDNAIIEISLKLASIYAAQNRQEFAVAGYEFCISTLEEKIEREKELAEDIMSVEEKANTHLLLGMCLDACARYLLFSKQPSQAQRMYEKALQISEEIQGERHPQTIVLMSDLATTLDAQGRFDEAYIYMQRASDLARQINHPELHMVLSNLAAVLMHRERYTQAKEIYQEALKQAKLKKDEISVQHIREELAELSKKSRPLTNSVKL

SEQ ID NO: 194972 - protein, 501 aa, Artificial Sequence
  derived and/or modified sequence
MAQPHTTSVPYFARSPAPPPPSRSGAPPQPPATLRPSRRRTRPPRPADRRDAPADCAYLWRILTPRRGRARRSDVGARHRACGRRDVLLSRQGPANPEGARRVVGGQERVWPAVRRGRGGSMFRLLSWSLGRGFLRAAGRRCRGCSARLLPGLAGGPGPEVQVPPSRVAPHGRGPGLLPLLAALAWFSRPAAAEEEEQQGADGAAAEDGADEAEAEIIQLLKRAKLSIMKDEPEEAELILHDALRLAYQTDNKKAITYTYDLMANLAFIRGQLENAEQLFKATMSYLLGGGMKQEDNAIIEISLKLASIYAAQNRQEFAVAGYEFCISTLEEKIEREKELAEDIMSVEEKANTHLLLGMCLDACARYLLFSKQPSQAQRMYEKALQISEEIQGERHPQTIVLMSDLATTLDAQGRFDEAYIYMQRASDLARQINHPELHMVLSNLAAVLMHRERYTQAKEIYQEALKQAKLKKDEISVQHIREELAELSKKSRPLTNSVKL

SEQ ID NO: 194973 - protein, 166 aa, Artificial Sequence
  derived and/or modified sequence
  misc_feature (1)..(1): Xaa can be any naturally occurring amino acid
XQERVWPAVRRGRGGSMFRLLSWSLGRGFLRAAGRRCRGCSARLLPGLAGGPGPEVQVPPSRVAPHGRGPGLLPLLAALAWFSRPAAAEEEEQQGADGAAAEDGADEAEAEIIQLLKRAKVRRLRALRPAERGSLCERGLGVAAHYSLRLAEEWMEAPRVKLPRMS

SEQ ID NO: 194974 - DNA, 1143 bp, Artificial Sequence
  derived and/or modified sequence
atgttcagactgctgagctggagcctgggcagaggcttcctgagagccgccggcagaagatgcagaggctgcagcgccagactgctgcccggcctggccggcggccccggccccgaggtgcaggtgccccccagcagagtggccccccacggcagaggccccggcctgctgcccctgctggccgccctggcctggttcagcagacccgccgccgccgaggaggaggagcagcagggcgccgacggcgccgccgccgaggacggcgccgacgaggccgaggccgagatcatccagctgctgaagagagccaagctgagcatcatgaaggacgagcccgaggaggccgagctgatcctgcacgacgccctgagactggcctaccagaccgacaacaagaaggccatcacctacacctacgacctgatggccaacctggccttcatcagaggccagctggagaacgccgagcagctgttcaaggccaccatgagctacctgctgggcggcggcatgaagcaggaggacaacgccatcatcgagatcagcctgaagctggccagcatctacgccgcccagaacagacaggagttcgccgtggccggctacgagttctgcatcagcaccctggaggagaagatcgagagagagaaggagctggccgaggacatcatgagcgtggaggagaaggccaacacccacctgctgctgggcatgtgcctggacgcctgcgccagatacctgctgttcagcaagcagcccagccaggcccagagaatgtacgagaaggccctgcagatcagcgaggagatccagggcgagagacacccccagaccatcgtgctgatgagcgacctggccaccaccctggacgcccagggcagattcgacgaggcctacatctacatgcagagagccagcgacctggccagacagatcaaccaccccgagctgcacatggtgctgagcaacctggccgccgtgctgatgcacagagagagatacacccaggccaaggagatctaccaggaggccctgaagcaggccaagctgaagaaggacgagatcagcgtgcagcacatcagagaggagctggccgagctgagcaagaagagcagacccctgaccaacagcgtgaagctgtag

SEQ ID NO: 194975 - DNA, 1506 bp, Artificial Sequence
  derived and/or modified sequence
atggcccagccccacaccaccagcgtgccctacttcgccagaagccccgccccccccccccccagcagaagcggcgcccccccccagccccccgccaccctgagacccagcagaagaagaaccagaccccccagacccgccgacagaagagacgcccccgccgactgcgcctacctgtggagaatcctgacccccagaagaggcagagccagaagaagcgacgtgggcgccagacacagagcctgcggcagaagagacgtgctgctgagcagacagggccccgccaaccccgagggcgccagaagagtggtgggcggccaggagagagtgtggcccgccgtgagaagaggcagaggcggcagcatgttcagactgctgagctggagcctgggcagaggcttcctgagagccgccggcagaagatgcagaggctgcagcgccagactgctgcccggcctggccggcggccccggccccgaggtgcaggtgccccccagcagagtggccccccacggcagaggccccggcctgctgcccctgctggccgccctggcctggttcagcagacccgccgccgccgaggaggaggagcagcagggcgccgacggcgccgccgccgaggacggcgccgacgaggccgaggccgagatcatccagctgctgaagagagccaagctgagcatcatgaaggacgagcccgaggaggccgagctgatcctgcacgacgccctgagactggcctaccagaccgacaacaagaaggccatcacctacacctacgacctgatggccaacctggccttcatcagaggccagctggagaacgccgagcagctgttcaaggccaccatgagctacctgctgggcggcggcatgaagcaggaggacaacgccatcatcgagatcagcctgaagctggccagcatctacgccgcccagaacagacaggagttcgccgtggccggctacgagttctgcatcagcaccctggaggagaagatcgagagagagaaggagctggccgaggacatcatgagcgtggaggagaaggccaacacccacctgctgctgggcatgtgcctggacgcctgcgccagatacctgctgttcagcaagcagcccagccaggcccagagaatgtacgagaaggccctgcagatcagcgaggagatccagggcgagagacacccccagaccatcgtgctgatgagcgacctggccaccaccctggacgcccagggcagattcgacgaggcctacatctacatgcagagagccagcgacctggccagacagatcaaccaccccgagctgcacatggtgctgagcaacctggccgccgtgctgatgcacagagagagatacacccaggccaaggagatctaccaggaggccctgaagcaggccaagctgaagaaggacgagatcagcgtgcagcacatcagagaggagctggccgagctgagcaagaagagcagacccctgaccaacagcgtgaagctgtag

SEQ ID NO: 194976 - DNA, 1143 bp, Artificial Sequence
  derived and/or modified sequence
atgttcaggttgcttagctggtctcttggccggggcttcctcagagccgccggccggcgatgcagaggatgttcggctagattgctgcctggactggcgggcgggcccggcccagaggtccaagttccaccttcccgggtggcacctcacggcagaggcccaggactgcttcccctcctcgcagctttggcctggttctcccggccggcagcggccgaagaggaagaacagcagggcgccgacggggcagcagcagaggacggcgcagacgaagcggaggccgaaattatacagctgctaaagagggctaagctatccatcatgaaagatgagccagaggaggctgagctgatattgcacgatgcactgcgacttgcctaccagacagacaataagaaggcaatcacctacacatatgatctcatggccaatttggcctttatccgaggtcagttggaaaacgccgagcaactcttcaaggctaccatgtcttatctgctgggcggtggcatgaagcaggaggataacgcgataattgaaataagtctaaagttagccagtatttacgccgcccagaatcggcaggagttcgccgttgctggttacgagttctgtatcagcacactcgaggagaagatcgagagggagaaagagctggcggaggacatcatgtccgtcgaagaaaaggccaatacccacctgctgctaggaatgtgcttggacgcctgtgcccgatatttactttttagtaagcagccctcacaagcacaacggatgtacgagaaggccctccaaatatcagaggaaatacaaggcgagaggcatccccagacaatcgtgctcatgagcgacctggcaaccacactggacgcgcaaggacgatttgacgaggcatatatatatatgcagagagccagtgacctggcccgccagatcaatcacccagaactccacatggtcctttcaaacctggctgccgtgttgatgcatagagaacgatacactcaggccaaggaaatttaccaggaggcgctgaaacaggcgaaactcaaaaaagatgaaatcagcgttcagcacataagggaggagctggccgagctatccaagaaatctcggcctcttaccaactccgtgaaactgtag

SEQ ID NO: 194977 - DNA, 1143 bp, Artificial Sequence
  derived and/or modified sequence
atgttcagactcctgagctggtcccttggacgcggattcctgagagccgccggacggcggtgccgcggttgctcagccaggcttctccctggacttgctggcggaccaggacctgaggtgcaggtgccaccctctcgggtcgccccacacggccgaggaccaggcctgctgcctctgctagctgctctggcttggttctcacgtcctgccgcggcagaagaagaagagcagcagggcgctgacggcgctgctgccgaggacggggccgacgaagctgaggcagagattatccagctgttgaaaagagccaagcttagcatcatgaaggatgaacccgaagaagcggagctgatcctgcatgatgctctgaggctggcctatcagacagataataaaaaggccattacttacacatatgacctgatggccaacctggcctttataaggggacagttagagaatgctgagcagctctttaaggctaccatgtcatacctgctcggcggcgggatgaaacaggaggacaatgcgataatagagatcagccttaagctggcatccatctacgctgcgcagaacagacaagagtttgctgtcgccgggtacgagttctgcatctcaaccctcgaggagaaaattgagagagaaaaagagctggccgaagacattatgtcagtggaggagaaagccaatacgcatctccttctggggatgtgcctggacgcttgcgctcgctatctcctgtttagcaaacagccctcacaggcacagcggatgtacgaaaaagctttacaaataagtgaagaaatccaaggcgagcgccatccccaaacaatcgtattgatgagcgacctagccaccacccttgacgcgcagggacggttcgatgaggcttacatttacatgcaaagagcttccgatctggcccgacagattaatcatccagagctacatatggtcctatcaaacctggcggcggtgttaatgcaccgcgagagatacacccaagctaaggaaatatatcaggaagccctgaaacaggctaagcttaagaaagatgagatctctgtacagcacatccgagaggagctggctgaactctcaaaaaagagtcgccctttgacgaattcagtgaaactctag

SEQ ID NO: 194978 - DNA, 1506 bp, Artificial Sequence
  derived and/or modified sequence
atggctcagccccatacgacctctgtgccatattttgcaaggtcaccagcacccccgcccccaagccggagcggcgccccccctcaaccccccgcaacactgcgcccgagcaggcgacgaactagacctcctagacccgctgacagacgtgacgctcctgctgattgtgcatacctctggcgcatactgacacctcggagggggagagctcgccgaagtgacgtgggagccaggcacagggcatgtggcagacgagacgtgctgctgtccaggcaggggcctgcgaaccccgaaggcgcccggcgcgtagtgggagggcaggagagagtgtggccagctgtgcgaagggggcgcggcggatcaatgttccggctgctgagctggtctctgggccgcggattcctgagggccgccggaagacggtgcaggggatgcagcgcccgtttattaccagggttggcaggcggaccagggcctgaggtgcaggtgcctcctagccgagtcgcccctcacggacgaggtccaggactgctgcccttactagccgcgcttgcttggttttcaaggcccgctgcagcagaagaagaggagcagcaaggggccgatggtgcagcagccgaagacggtgcagacgaggcagaggccgaaatcattcagctgctcaagagagccaaactaagtattatgaaggacgaaccagaagaggcggagttgattttacacgatgccctcagactcgcgtatcagaccgacaacaaaaaagctattacctacacctatgatttgatggccaacctcgcttttatcagaggacaattagaaaacgctgagcagttgttcaaagccactatgtcctacttactcggcggcgggatgaagcaggaggacaacgccataattgagatttccctgaagctggctagcatctatgcagctcagaaccgccaggaattcgccgtggccggttacgagttctgtatctccaccctcgaagaaaaaatagaacgcgagaaagagctcgccgaggatattatgagcgtggaagagaaggcaaatacgcatctacttttgggtatgtgtttagatgcctgcgcgaggtacctgttattttccaagcaaccatcccaagcccagcgtatgtacgaaaaggcgcttcagatctcggaggaaatacaaggcgagaggcatcctcaaactatcgtgctgatgtccgacctcgcaaccaccctggacgcccaagggagattcgacgaggcctatatttacatgcaacgtgctagcgatctcgcccggcagattaaccacccagagctgcatatggttctgtctaacctggctgctgtcctaatgcaccgggagaggtacacgcaagccaaagagatatatcaagaggctctgaagcaagcaaagctgaaaaaggatgaaatcagcgttcaacatatcagagaagagctagctgagttgtcgaaaaaatcccggccgttgacaaacagcgtgaaactgtag

SEQ ID NO: 194979 - DNA, 1143 bp, Artificial Sequence
  derived and/or modified sequence
atgttccggctgctgtcctggagcctgggccggggcttcctgcgggctgctggaagacgctgccggggctgcagcgcccggctgctgcccggcctggccggcggccctggccctgaggtgcaggtgccccccagccgggtggccccccacggccggggccctggcctgctgcccctgctggccgccctggcctggttcagcaggcctgctgctgctgaggaggaggagcagcagggcgcagatggagctgctgctgaagatggagcagatgaggccgaggccgagatcatccagctgctgaagagggccaagctgagcatcatgaaggatgagcctgaggaggccgagctgatcctgcatgatgccctgcggctggcctaccagacagacaacaagaaggccatcacctacacctatgacctgatggccaacctggccttcatccggggccagctggagaatgctgagcagctgttcaaggccaccatgagctacctgctgggcggcggcatgaagcaggaggacaatgccatcatcgagatcagcctgaagctggccagcatctatgctgcccagaaccggcaggagtttgctgtggccggctatgagttctgcatcagcaccctggaggagaagattgagcgggagaaggagctggccgaggacatcatgtctgtggaggagaaggccaacacccacctgctgctgggcatgtgcctggatgcctgtgcccgctacctgctcttcagcaagcagcccagccaggcccagaggatgtatgagaaggccctgcagatcagcgaggagatccagggcgagcggcacccccagaccatcgtgctgatgtctgacctggccaccaccctggatgcccagggccgctttgatgaggcctacatctacatgcagagggccagtgacctggcccggcagatcaaccaccctgagctgcacatggtgctgagcaacctggccgctgtgctgatgcaccgggagcgctacacccaggccaaggagatctaccaggaggccctgaagcaggccaagctgaagaaggatgagatctctgtgcagcacatccgggaggagctggccgagctgagcaagaagagccggcccctgaccaacagcgtgaagctgtag

SEQ ID NO: 194980 - DNA, 1506 bp, Artificial Sequence
  derived and/or modified sequence
atggcccagccccacaccacctctgtgccctactttgcccggagccctgcccctcctccacccagccgcagcggggccccaccccagcccccagccaccctgcggcccagcagaagaaggaccaggcctcccaggcctgctgacagaagagatgccccagctgactgtgcctacctgtggaggatcctgaccccccggcggggccgggccaggagaagtgatgtgggcgcccggcaccgggcctgtggcagaagagatgtgctgctgagccggcagggccctgccaaccctgagggcgccaggagagtggtgggcggccaggagcgggtgtggccagctgtgagaagaggccggggcggctccatgttccggctgctgtcctggagcctgggccggggcttcctgcgggccgccggccgccgctgccggggctgcagcgcccggctgctgcccggcctggccggcggccctggccctgaggtgcaggtgccccccagccgggtggcccctcatggccggggccctggcctgctgcccctgctggccgccctggcctggttcagcaggcctgctgctgctgaggaggaggagcagcagggcgcagatggagctgctgctgaagatggagcagatgaagctgaggccgagatcatccagctgctgaagagggccaagctgagcatcatgaaggatgagcctgaggaggccgagctgatcctgcatgatgccctgcggctggcctaccagacagacaacaagaaggccatcacctacacctatgacctgatggccaacctggccttcatccggggccagctggagaatgctgagcagctgttcaaggccaccatgagctacctgctgggcggcggcatgaagcaggaggacaatgccatcatcgagatcagcctgaagctggccagcatctatgctgcccagaaccggcaggagtttgctgtggccggctatgagttctgcatcagcaccctggaggagaagattgaaagagagaaggagctggccgaggacatcatgtctgtggaggagaaggccaacacccacctgctgctgggcatgtgcctggatgcctgtgcccgctacctgctcttcagcaagcagcccagccaggcccagaggatgtatgagaaggccctgcagatcagcgaggagatccagggcgagcggcacccccagaccatcgtgctgatgtctgacctggccaccaccctggatgcccagggccgctttgatgaggcctacatctacatgcagagggccagtgacctggcccggcagatcaaccaccctgagctgcacatggtgctgagcaacctggccgctgtgctgatgcaccgggagcgctacacccaggccaaggagatctaccaggaggccctgaagcaggccaagctgaagaaggatgagatctctgtgcagcacatccgggaggagctggccgagctgagcaagaagagccggcccctgaccaacagcgtgaagctgtag

SEQ ID NO: 194981 - DNA, 1143 bp, Artificial Sequence
  derived and/or modified sequence
atgttccggctgctgagctggagcctgggccggggcttcctgcgggctgctggcagacgttgcaggggatgttccgccaggcttctccctggcttggcaggcggtcctggacctgaggtgcaggtgccgccctcacgcgtggcccctcatggccgaggccctgggctgttgcccttgctggctgcactcgcttggttcagcaggcctgctgctgctgaggaggaagaacagcagggcgccgatggagcggctgctgaagacggagcagacgaggctgaggccgagatcatacagctgctgaagcgggccaaactcagtattatgaaagacgagccggaggaggccgagttaatccttcacgatgccctgcgcctagcttaccaaaccgataacaagaaagccattacgtatacatacgacctgatggcgaatctggcctttatccggggacagctggagaacgccgaacagctcttcaaggccactatgagctacttattgggggggggcatgaagcaggaagataatgcgattattgagatcagcctgaaactcgcatcgatctatgccgcccagaaccggcaagagtttgcagtggcgggttacgaattttgtatttcaaccctggaggaaaagattgagcgcgaaaaagaactcgctgaagacatcatgtccgttgaggagaaggccaatactcacttgctcctgggcatgtgtctcgatgcctgtgctcggtacctgctcttctctaaacagccctcccaagcccagcggatgtatgaaaaagcccttcagatctctgaggagatccaaggagaacgtcatccacaaacaatcgttctcatgagcgacctggccacaacgctcgacgcgcaggggcgcttcgacgaggcctatatctatatgcaaagggccagcgatctcgcaaggcagatcaatcaccctgaactgcacatggttctaagcaacctggcagcagtcctgatgcatcgagaacggtatacgcaagcaaaagagatataccaggaagcattgaaacaggcaaaactgaaaaaggatgaaatatcagtgcagcacatccgcgaagagctggccgaactcagtaagaaatcaagaccactgacaaacagcgtgaaactgtag

SEQ ID NO: 194982 - DNA, 1143 bp, Artificial Sequence
  derived and/or modified sequence
atgttccggctgctgagctggagcctgggccggggcttcctgcgggcagctggaaggcggtgtcgaggctgcagtgccagattgctgcccggactggctggcgggcccggtcccgaagtccaggtacccccaagccgggtggctccacatggccgggggcctggtctgctccccttgttggccgcgctggcctggttcagtcgacccgctgcggcggaggaggaagaacagcagggcgccgatggcgccgccgccgaggatggtgccgatgaggccgaggccgaaataattcagctcttgaagcgggctaaacttagcataatgaaggatgagcctgaagaagcggagttgatcctacatgatgccctgcgcttggcatatcagacagacaacaaaaaggctatcacatatacatacgacttaatggcgaatctggcattcattaggggccagctggagaacgccgagcaattgttcaaggcaaccatgagctatttactaggaggggggatgaagcaggaagataacgccattatcgagatctccctgaagctggcgtcaatctatgctgcacaaaatcggcaagagtttgctgtggctggttacgagttctgtatctctactctcgaagaaaagatcgagcgtgagaaggagctggccgaagacatcatgtccgtcgaagaaaaagccaacacccacctgcttttaggcatgtgtctggatgcatgtgctaggtacttgcttttcagtaaacaaccttctcaggcccagcgaatgtacgaaaaggcccttcaaattagcgaagaaatccagggcgagaggcatcctcagaccatcgtgctgatgtcagacctggctacgaccctagacgcccagggacgattcgacgaagcctatatttatatgcagcgggcgtcagatcttgccagacagatcaatcaccctgagttacatatggtcttaagcaatttggctgcagtgctgatgcatagagagcgctatactcaggctaaggaaatttatcaggaagccttaaaacaggctaaactgaagaaggatgaaatctccgttcaacatatcagggaggagctagctgagctctcgaagaagagccgcccactgacgaactctgtgaagttgtag

SEQ ID NO: 194983 - DNA, 1506 bp, Artificial Sequence
  derived and/or modified sequence
atggcccagccccacaccaccagcgtgccctacttcgcccggagccccgctccacctccacctagcagaagcggcgcccctccccagccgccggccacactgcggccgtccaggagaagaacgagacccccacgtccggccgatcggcgagatgcccctgcagattgtgcgtacctctggcggatcttgacacctaggagaggacgagcgcggagatccgatgtgggtgctcggcatagggcttgcggcagacgggatgtcctacttagcaggcaagggcctgcaaacccagagggggctaggcgggttgtcgggggccaggaaagggtctggcctgccgtgcgccgcgggcggggaggatcaatgttccggcttctgtcgtggtccttaggcagggggttcctgcgggcagccggccgaaggtgccgaggctgctcagctagactgttgccaggcctcgccggcggacccggccctgaggtgcaggtccctccgtccagagtggccccacatggaagaggtccgggactgttacctctgttagctgcactggcctggttttcccgcccggcagctgctgaagaagaggaacaacaaggagcggatggggcagctgccgaagatggagccgatgaggctgaggccgaaataatccagctcctgaagcgggcaaagctcagcataatgaaggatgaaccggaggaggcggaactgatactgcatgacgcacttaggctggcataccaaacagataacaagaaggctatcacgtacacttacgatctgatggccaaccttgctttcattcggggccaactggagaacgctgagcagctgttcaaggcaaccatgtcttatttattagggggaggcatgaaacaggaggataatgcaatcatagagatcagtttgaaactcgcctcaatctatgcggcccagaaccggcaggaattcgccgtagcagggtacgaattttgtatctctacccttgaagaaaaaatcgagcgcgagaaggagctcgccgaagatattatgagcgtggaggagaaagctaatacacacctcctcctgggaatgtgccttgacgcttgcgccaggtatctgttattctccaaacagcctagtcaggcccagcgaatgtatgagaaagcgcttcagatttcagaggagatacagggtgaaaggcacccccagacaatcgtactaatgtccgatctggcaactacattagacgcccaggggagatttgacgaggcctatatctatatgcagcgggcatcagacctggcgaggcagataaaccaccctgagcttcatatggtactttccaacctcgcggctgtgttaatgcatcgtgaacgatacacgcaagctaaggagatctaccaggaagccctaaaacaggccaagctcaagaaagatgagatcagcgtgcagcacattagggaggagctggcggaattgagcaagaagtctcgcccgctgaccaattccgttaagctgtag

SEQ ID NO: 194984 - DNA, 1143 bp, Artificial Sequence
  derived and/or modified sequence
atgttccgtctactctcatggagcttgggtagaggcttcctgcgtgctgcagggaggcgctgccgcggttgttcggcacgtttgctccctggactcgccggaggccctggaccagaagtacaggtccctccatctcgggtagcaccacacggcaggggcccaggcctgctgcctctgctcgccgcactcgcttggttttcacgccctgccgctgcggaggaagaagaacagcaaggagctgacggtgcggcagccgaagatggggcagacgaagccgaggctgaaattatacagctgctcaagcgcgcaaagctcagtatcatgaaagacgagcctgaggaagcagagctcatcctgcatgatgctttacggttagcctaccagacagataataaaaaagccatcacttatacctatgaccttatggccaaccttgccttcattcgcggacaactggagaatgcagagcaactattcaaggcaacaatgtcatacctccttgggggaggcatgaagcaagaagataatgctatcatcgaaatcagcttgaagcttgcgtccatatatgctgcacagaacaggcaggaattcgccgtcgcaggatatgaattttgtattagtacacttgaagagaaaatcgaacgtgaaaaagagttagccgaggatattatgtctgtcgaggaaaaggcaaatacacacctgctcctcggtatgtgcctcgacgcctgcgcaagatatttactgttcagcaagcaacctagccaggcccagcggatgtatgagaaggcactgcaaatctccgaggagatccaaggggagaggcatccccagaccattgtactgatgagcgatctcgccactactctggacgcccagggcaggtttgacgaggcatacatctacatgcaacgcgcaagcgacctggcgcgacagatcaaccaccctgagctccacatggttctgtccaacctcgccgctgtgctcatgcatagagagcgctacacccaagcaaaagaaatttaccaggaggcactgaaacaggctaagctcaaaaaggatgaaatctcagttcagcatatacgcgaggaactggccgaattgtccaagaagagcagacccctaaccaactctgtgaagttatag

SEQ ID NO: 194985 - DNA, 1143 bp, Artificial Sequence
  derived and/or modified sequence
atgttcagacttctgtcctggtccctgggccgtggatttttgcgcgctgccggaagacgatgtcgtggatgctccgcaagactccttcccggactggccggaggtccaggccctgaagtgcaggtccctccttcgcgtgtggccccacatggtcggggacctggccttctccctctcctggctgcgctggcctggttctctagacctgccgcagctgaggaggaggagcagcagggagctgatggcgctgcggctgaagacggcgctgatgaggccgaagctgagataatccagttgctcaaacgggctaaattgagcattatgaaggacgagcctgaggaggcagaactcattttgcatgacgcgctccgactggcctaccagaccgacaacaaaaaagccataacctatacctatgacctcatggcaaatctggccttcattaggggacagctcgaaaacgcagaacagctattcaaagctactatgtcctacctgctgggcggaggcatgaagcaagaagataatgccattattgaaatctccttaaaacttgcttccatttatgccgcacagaatagacaagagtttgccgtagccggatacgaattttgtatctcaacactggaggaaaagatcgagcgggagaaagagctggcagaggatataatgagtgtggaggaaaaggctaacacacacctgttactggggatgtgcttagatgcatgcgctaggtacttgttgttttcaaagcaaccttctcaggcgcagcggatgtacgagaaagccctgcagatttctgaggaaatccagggggaaaggcacccgcagactattgtcctcatgtcagaccttgccactaccctggatgcccaggggaggtttgacgaggcctacatttacatgcagcgagcatctgatttagccagacagatcaaccatcctgagttgcacatggtgctcagcaatttagccgctgtgctgatgcatcgggagagatatacacaggccaaggaaatatatcaggaggccctgaagcaggcaaaactaaaaaaggacgagattagcgtgcagcacattagggaagagctggcagagttgagcaaaaaatcgcgcccactgaccaattctgttaagctctag

SEQ ID NO: 194986 - DNA, 1506 bp, Artificial Sequence
  derived and/or modified sequence
atggcacagccccacacgaccagcgtaccttattttgcccgatcacccgcaccacccccacctagcaggagtggtgcccctcctcagccaccggctaccttgaggccaagcaggcgcaggaccaggccaccccgtccggctgaccgacgggatgcccctgccgactgtgcctacctgtggcggattctgactccaagaagggggagagccaggaggagcgacgttggtgccaggcatcgggcttgtgggagacgcgatgtgctgctctcccggcagggtccagctaaccctgagggagcgcgaagggtggttggcggtcaagaaagagtgtggccagctgtgcggcgaggccgaggcggttcaatgttcagactgctgagttggagcctgggaaggggattcctgagagccgctggccgtcgctgtcggggatgttctgccagactccttccaggtctcgccggaggtcccggacctgaagtgcaggttcctccttcccgggtggcaccccatgggagggggcctggactgctgcctctcctggccgcattagcgtggttttcccgccctgctgcggcagaggaagaagagcagcagggagctgatggagcagccgctgaagatggcgcagacgaagctgaagcggaaattatccagctgctgaagagggcaaaattatctatcatgaaggatgagcctgaggaagcagagctgatcttgcacgacgctttgcggctggcttatcagacggacaataaaaaagcaatcacctacacatatgatcttatggctaatctcgcgttcatccggggacagttggaaaacgccgaacagctgttcaaggcaaccatgagctacctgttggggggagggatgaaacaggaggataatgccattatcgagattagtctgaaactggctagcatctacgccgcacaaaataggcaggagtttgccgtggcgggttacgaattctgcattagtaccctggaggaaaagatcgagagagaaaaagagctggccgaagatatcatgtcagtcgaagagaaagcaaacactcacctgctgctcgggatgtgtctggatgcctgcgccaggtacctgctgttcagcaaacaacctagtcaagctcaaaggatgtacgaaaaggccttgcagattagtgaggagatccaaggcgagcggcatcctcaaactatagtgctcatgtctgatctggcaaccactctggacgcacagggcagatttgacgaagcctacatctatatgcagagggcctccgaccttgcacgccagatcaaccatccagagcttcatatggtgctcagtaacctggccgcagttttgatgcatcgcgaacgctacactcaggccaaagagatttatcaggaagccctgaagcaggctaaactcaaaaaagacgagatttccgtccagcatattcgcgaagaattggccgagctgagtaagaagtcaaggcccctgacaaatagcgtgaagctttag

SEQ ID NO: 194987 - DNA, 2788 bp, Artificial Sequence
  derived and/or modified sequence
gatgccccgcccgcgcccatggcgcagccacacacgacctcggtcccgtacttcgcgcgctctcctgcaccgccgccgccatctcgctcaggagctcctccacaaccgccggcaacactacggccatcgcgccgcaggacacgccctccacgaccggcggaccgccgcgacgctccagctgactgcgcctacctgtggaggatcctgaccccccgccggggcagggcgagacggagtgacgtcggggcgcgtcatcgcgcgtgcggacgcagggatgtcctgctcagtcgtcagggcccggccaatccggagggcgctcggcgcgtggtcgggggccaggagcgcgtctggcctgcagtgcgcagaggacgcggcgggagcatgttccggctcctgagctggagcctgggccgaggcttcctgcgggccgcggggcggcggtgccggggctgctccgcgcgcctgctcccggggctggcaggaggtccggggcccgaggtgcaggtgccgccatcccgagtcgcgccgcacggccggggcccaggcctgctgccgctgctggcagcgctcgcctggttctcgaggcccgctgcggcagaggaggaggagcagcagggagccgacggggccgctgccgaggacggggcggacgaggccgaggcagagatcatccagctgctgaagcgagccaagttgagcattatgaaagatgagccagaagaggctgagttaattttgcatgacgctcttcgtctcgcctatcagactgataacaagaaggccatcacttacacttatgatttgatggccaacttagcatttatacggggtcagcttgaaaatgctgaacaactttttaaagcaacaatgagttacctccttggagggggcatgaagcaggaggacaatgcaataattgaaatttccctaaagctggccagtatctatgctgcgcagaacagacaggaatttgctgttgctggctatgaattctgcatttcaactctagaggaaaaaattgaaagagaaaaggaattagcagaagacattatgtcagtggaagagaaagccaatacccacctcctcttgggcatgtgcttagacgcctgtgctcgctaccttctgttctccaagcagccgtcacaggcacaaaggatgtatgaaaaagctctgcagatttctgaagaaatacaaggagaaagacacccacagaccattgtgctgatgagtgacctggctactaccctggatgcacagggccgctttgatgaggcctatatttatatgcaaagggcatcagatctggcaagacagataaatcatcctgagctacacatggtactcagtaatctagctgcagttttgatgcacagagaacgatatacacaagcaaaagagatctaccaggaagcactgaagcaagcaaagctgaaaaaagatgaaatttctgtacaacacatcagggaagagttggctgagctgtcaaagaaaagtagacctttgacaaattctgtcaagctctaaatccatttttgtgtagggagaataatgtctagtaatgtggaagaatagctatcattcctgtctctgtggcacccgatcaatggcttaaatctgtcgtttttgatattcaggtttcctcaatttagccttagtgaaggaggggttgtacacactgccatttttgtattttaaaggaaaaatgactttcattcccaactgattatgacctttcaggatgtcgtcaagtgatgctttcagttgtaacacgtgacttggtgctgtccctgctggtctaagtagaactgtagattcatatgggctggtgttcctgtgcgctgtgggtgtggtgattcagcctggcatttctaccataagtttttggtctgctgatttgctgccctgtcttctcttactttactttatcaatacctggcaaactgaccagaattaccttcctcatggcaaagggggattatggtgaattgttgttcttatagtctgtttcatgaagcacaagtggaatttaatacataaaagagaaaaatatcttagtttgctaccagcatccagcatgaagttgtaaagtggggattaggcacgtgacagtatagcacccatttgaatttaaataaaagtgaaccatatttatctggttatataaaactaaaaatgggggtgtttatataaaactaaaaactaagaatgatgtaaccttttgtctgtgttatctgaacactctacttcctttgcagccttagtcacacaactgagtcatctcaagtactctttaaggacacacagcccaggctgttctgagtcagaataggcccctacaggtatattttaaaactcttcgtaattctaatgtgtactgctggtatagctgaactactgacctggatcttagtcctagcctttttgcttttgcaatttcagtatcttcatctctaaactagggaaacactgggattctttcttagctgtgggggaaggtatttggttagatgactttgaatgaatagactgctgtgctgaaagagctttatcacactgtctcaaagtatgtaaagatacataggtggatgctcttactgcagcagtcatgaatacatttttagccatttacctaaggaaaaagacagtttttctaggtaccatgaaggaagattgaccctgttggtatgcctgtgggggtgggatgtgagtgggactgataaactgatacttttggttcgtatgtacatactggaagaatcttcataataaatgagactacacaacaata

SEQ ID NO: 194988 - DNA, 1662 bp, Artificial Sequence
  derived and/or modified sequence
cgcagggatgtcctgctcagtcgtcagggcccggccaatccggagggcgctcggcgcgtggtcgggggccaggagcgcgtctggcctgcagtgcgcagaggacgcggcgggagcatgttccggctcctgagctggagcctgggccgaggcttcctgcgggccgcggggcggcggtgccggggctgctccgcgcgcctgctcccggggctggcaggaggtccggggcccgaggtgcaggtgccgccatcccgagtcgcgccgcacggccggggcccaggcctgctgccgctgctggcagcgctcgcctggttctcgaggcccgctgcggcagaggaggaggagcagcagggagccgacggggccgctgccgaggacggggcggacgaggccgaggcagagatcatccagctgctgaagcgagccaagttgagcattatgaaagatgagccagaagaggctgagttaattttgcatgacgctcttcgtctcgcctatcagactgataacaagaaggccatcacttacacttatgatttgatggccaacttagcatttatacggggtcagcttgaaaatgctgaacaactttttaaagcaacaatgagttacctccttggagggggcatgaagcaggaggacaatgcaataattgaaatttccctaaagctggccagtatctatgctgcgcagaacagacaggaatttgctgttgctggctatgaattctgcatttcaactctagaggaaaaaattgaaagagaaaaggaattagcagaagacattatgtcagtggaagagaaagccaatacccacctcctcttgggcatgtgcttagacgcctgtgctcgctaccttctgttctccaagcagccgtcacaggcacaaaggatgtatgaaaaagctctgcagatttctgaagaaatacaaggagaaagacacccacagaccattgtgctgatgagtgacctggctactaccctggatgcacagggccgctttgatgaggcctatatttatatgcaaagggcatcagatctggcaagacagataaatcatcctgagctacacatggtactcagtaatctagctgcagttttgatgcacagagaacgatatacacaagcaaaagagatctaccaggaagcactgaagcaagcaaagctgaaaaaagatgaaatttctgtacaacacatcagggaagagttggctgagctgtcaaagaaaagtagacctttgacaaattctgtcaagctctaaatccatttttgtgtagggagaataatgtctagtaatgtggaagaatagctatcattcctgtctctgtggcacccgatcaatggcttaaatctgtcgtttttgatattcaggtttcctcaatttagccttagtgaaggaggggttgtacacactgccatttttgtattttaaaggaaaaatgactttcattcccaactgattatgacctttcaggatgtcgtcaagtgatgctttcagttgtaacacgtgacttggtgctgtccctgctggtctaagtagaactgtagattcatatgggctggtgttcctgtgcgctgtgggtgtgtgggactgataaactgatacttttggttcgtatgtacatactggaagaatcttcataataaatgagactacacaacaata

SEQ ID NO: 194989 - DNA, 2784 bp, Artificial Sequence
  derived and/or modified sequence
gatgccccgcccgcgcccatggcgcagccacacacgacctcggtcccgtacttcgcgcgctctcctgcaccgccgccgccatctcgctcaggagctcctccacaaccgccggcaacactacggccatcgcgccgcaggacacgccctccacgaccggcggaccgccgcgacgctccagctgactgcgcctacctgtggaggatcctgaccccccgccggggcagggcgagacggagtgacgtcggggcgcgtcatcgcgcgtgcggacgcagggatgtcctgctcagtcgtcagggcccggccaatccggagggcgctcggcgcgtggtcgggggccaggagcgcgtctggcctgcagtgcgcagaggacgcggcgggagcatgttccggctcctgagctggagcctgggccgaggcttcctgcgggccgcggggcggcggtgccggggctgctccgcgcgcctgctcccggggctggcaggaggtccggggcccgaggtgcaggtgccgccatcccgagtcgcgccgcacggccggggcccaggcctgctgccgctgctggcagcgctcgcctggttctcgaggcccgctgcggcagaggaggaggagcagcagggagccgacggggccgctgccgaggacggggcggacgaggccgaggcagagatcatccagctgctgaagcgagccaagttgagcattatgaaagatgagccagaagaggctgagttaattttgcatgacgctcttcgtctcgcctatcagactgataacaagaaggccatcacttacacttatgatttgatggccaacttagcatttatacggggtcagcttgaaaatgctgaacaactttttaaagcaacaatgagttacctccttggagggggcatgaagcaggaggacaatgcaataattgaaatttccctaaagctggccagtatctatgctgcgcagaacagacaggaatttgctgttgctggctatgaattctgcatttcaactctagaggaaaaaattgaaagagaaaaggaattagcagaagacattatgtcagtggaagagaaagccaatacccacctcctcttgggcatgtgcttagacgcctgtgctcgctaccttctgttctccaagcagccgtcacaggcacaaaggatgtatgaaaaagctctgcagatttctgaagaaatacaaggagaaagacacccacagaccattgtgctgatgagtgacctggctactaccctggatgcacagggccgctttgatgaggcctatatttatatgcaaagggcatcagatctggcaagacagataaatcatcctgagctacacatggtactcagtaatctagctgcagttttgatgcacagagaacgatatacacaagcaaaagagatctaccaggaagcactgaagcaagcaaagctgaaaaaagatgaaatttctgtacaacacatcagggaagagttggctgagctgtcaaagaaaagtagacctttgacaaattctgtcaagctctaaatccatttttgtgtagggagaataatgtctagtaatgtggaagaatagctatcattcctgtctctgtggcacccgatcaatggcttaaatctgtcgtttttgatattcaggtttcctcaatttagccttagtgaaggaggggttgtacacactgccatttttgtattttaaaggaaaaatgactttcattcccaactgattatgacctttcaggatgtcgtcaagtgatgctttcagttgtaacacgtgacttggtgctgtccctgctggtctaagtagaactgtagattcatatgggctggtgttcctgtgcgctgtgggtgtggtgattcagcctggcatttctaccataagtttttggtctgctgatttgctgccctgtcttctcttactttactttatcaatacctggcaaactgaccagaattaccttcctcatggcaaagggggattatggtgaattgttgttcttatagtctgtttcatgaagcacaagtggaatttaatacataaaagagaaaaatatcttagtttgctaccagcatccagcatgaagttgtaaagtggggattaggcacgtgacagtatagcacccatttgaatttaaataaaagtgaaccatatttatctggttatataaaactaaaaatgggggtgtttatataaaactaaaaactaagaatgatgtaaccttttgtctgtgttatctgaacactctacttcctttgcagccttagtcacacaactgagtcatctcaagtactctttaaggacacacagcccaggctgttctgagtcagaataggcccctacaggtatattttaaaactcttcgtaattctaatgtgtactgctggtatagctgaactactgacctggatcttagtcctagcctttttgcttttgcaatttcagtatcttcatctctaaactagggaaacactgggattctttcttagctgtgggggaaggtatttggttagatgactttgaatgaatagactgctgtgctgaaagagctttatcacactgtctcaaagtatgtaaagatacataggtggatgctcttactgcagcagtcatgaatacatttttagccatttacctaaggaaaaagacagtttttctaggtaccatgaaggaagattgaccctgttggtatgcctgtgggggtgggatgtgagtgggactgataaactgatacttttggttcgtatgtacatactggaagaatcttcataataaatgagactacacaac

SEQ ID NO: 194990 - DNA, 2591 bp, Artificial Sequence
  derived and/or modified sequence
gccaggagcgcgtctggcctgcagtgcgcagaggacgcggcgggagcatgttccggctcctgagctggagcctgggccgaggcttcctgcgggccgcggggcggcggtgccggggctgctccgcgcgcctgctcccggggctggcaggaggtccggggcccgaggtgcaggtgccgccatcccgagtcgcgccgcacggccggggcccaggcctgctgccgctgctggcagcgctcgcctggttctcgaggcccgctgcggcagaggaggaggagcagcagggagccgacggggccgctgccgaggacggggcggacgaggccgaggcagagatcatccagctgctgaagcgagccaaggtgaggcggctccgggccctgcgcccggccgagcgcggtagcctttgtgagcggggtcttggcgttgctgcgcattactctctccgcctcgccgaagagtggatggaggctccgcgggtaaaattgccgagaatgagttgagcattatgaaagatgagccagaagaggctgagttaattttgcatgacgctcttcgtctcgcctatcagactgataacaagaaggccatcacttacacttatgatttgatggccaacttagcatttatacggggtcagcttgaaaatgctgaacaactttttaaagcaacaatgagttacctccttggagggggcatgaagcaggaggacaatgcaataattgaaatttccctaaagctggccagtatctatgctgcgcagaacagacaggaatttgctgttgctggctatgaattctgcatttcaactctagaggaaaaaattgaaagagaaaaggaattagcagaagacattatgtcagtggaagagaaagccaatacccacctcctcttgggcatgtgcttagacgcctgtgctcgctaccttctgttctccaagcagccgtcacaggcacaaaggatgtatgaaaaagctctgcagatttctgaagaaatacaaggagaaagacacccacagaccattgtgctgatgagtgacctggctactaccctggatgcacagggccgctttgatgaggcctatatttatatgcaaagggcatcagatctggcaagacagataaatcatcctgagctacacatggtactcagtaatctagctgcagttttgatgcacagagaacgatatacacaagcaaaagagatctaccaggaagcactgaagcaagcaaagctgaaaaaagatgaaatttctgtacaacacatcagggaagagttggctgagctgtcaaagaaaagtagacctttgacaaattctgtcaagctctaaatccatttttgtgtagggagaataatgtctagtaatgtggaagaatagctatcattcctgtctctgtggcacccgatcaatggcttaaatctgtcgtttttgatattcaggtttcctcaatttagccttagtgaaggaggggttgtacacactgccatttttgtattttaaaggaaaaatgactttcattcccaactgattatgacctttcaggatgtcgtcaagtgatgctttcagttgtaacacgtgacttggtgctgtccctgctggtctaagtagaactgtagattcatatgggctggtgttcctgtgcgctgtgggtgtggtgattcagcctggcatttctaccataagtttttggtctgctgatttgctgccctgtcttctcttactttactttatcaatacctggcaaactgaccagaattaccttcctcatggcaaagggggattatggtgaattgttgttcttatagtctgtttcatgaagcacaagtggaatttaatacataaaagagaaaaatatcttagtttgctaccagcatccagcatgaagttgtaaagtggggattaggcacgtgacagtatagcacccatttgaatttaaataaaagtgaaccatatttatctggttatataaaactaaaaatgggggtgtttatataaaactaaaaactaagaatgatgtaaccttttgtctgtgttatctgaacactctacttcctttgcagccttagtcacacaactgagtcatctcaagtactctttaaggacacacagcccaggctgttctgagtcagaataggcccctacaggtatattttaaaactcttcgtaattctaatgtgtactgctggtatagctgaactactgacctggatcttagtcctagcctttttgcttttgcaatttcagtatcttcatctctaaactagggaaacactgggattctttcttagctgtgggggaaggtatttggttagatgactttgaatgaatagactgctgtgctgaaagagctttatcacactgtctcaaagtatgtaaagatacataggtggatgctcttactgcagcagtcatgaatacatttttagccatttacctaaggaaaaagacagtttttctaggtaccatgaaggaagattgaccctgttggtatgcctgtgggggtgggatgtgagtgggactgataaactgatacttttggttcgtatgtacatactggaagaatcttcataataaatgagactacacaacaata

SEQ ID NO: 194991 - protein, 166 aa, Artificial Sequence
  derived and/or modified sequence
MAMSQESLTFKDVFVDFTLEEWQQLDSAQKNLYRDVMLENYSHLVSVGYLVAKPDVIFRLGPGEESWMADGGTPVRTCAEVWQVDEQIDHYKESQDKLPWQAAFIGKETLKDESGQESRTCRKSIYLSTEFDSVRQRLPKYYSWEKAFKTSFKLSWSKWKLCKKER

SEQ ID NO: 194992 - DNA, 501 bp, Artificial Sequence
  derived and/or modified sequence
atggccatgagccaggagagcctgaccttcaaggacgtgttcgtggacttcaccctggaggagtggcagcagctggacagcgcccagaagaacctgtacagagacgtgatgctggagaactacagccacctggtgagcgtgggctacctggtggccaagcccgacgtgatcttcagactgggccccggcgaggagagctggatggccgacggcggcacccccgtgagaacctgcgccgaggtgtggcaggtggacgagcagatcgaccactacaaggagagccaggacaagctgccctggcaggccgccttcatcggcaaggagaccctgaaggacgagagcggccaggagagcagaacctgcagaaagagcatctacctgagcaccgagttcgacagcgtgagacagagactgcccaagtactacagctgggagaaggccttcaagaccagcttcaagctgagctggagcaagtggaagctgtgcaagaaggagagatag

SEQ ID NO: 194993 - DNA, 501 bp, Artificial Sequence
  derived and/or modified sequence
atggccatgtctcaagagtctttgacgtttaaggacgttttcgttgacttcacgctcgaagagtggcagcagctcgacagtgcacagaagaatctctacagagacgtgatgctggagaattacagtcacctcgtatccgtcgggtatctggtcgcgaaacctgacgtgatttttagactgggccctggcgaggagagctggatggccgacggcgggacacctgtcaggacttgcgccgaggtgtggcaggtggacgagcagattgatcactataaggagtctcaggacaagctgccatggcaggccgcctttatcggcaaagagaccttgaaggacgagagcggacaggaaagccgaacatgcaggaaaagcatttacctgagtacggaatttgactctgttcggcaaagattgcccaagtactacagttgggaaaaagccttcaagacgtcttttaaactgtcttggagtaaatggaaactctgtaaaaaggaacggtag

SEQ ID NO: 194994 - DNA, 501 bp, Artificial Sequence
  derived and/or modified sequence
atggccatgagccaggagagcctgaccttcaaggatgtgtttgtggacttcaccctggaggagtggcagcagctggacagcgcccagaagaacctgtacagagatgtgatgctggagaactacagccacctggtgtctgtgggctacctggtggccaagccagatgtgatcttccggctgggccctggagaggagagctggatggctgatggcggcacccctgtgaggacctgtgccgaggtgtggcaggtggatgagcagattgaccactacaaggagagccaggacaagctgccctggcaggccgccttcatcggcaaggagaccctgaaggatgagagcggccaggagagcaggacctgcaggaagagcatctacctgagcacagaatttgattctgtgcggcagaggctgcccaagtactacagctgggagaaggccttcaagaccagcttcaagctgtcctggagcaagtggaagctgtgcaagaaggagaggtag

SEQ ID NO: 194995 - DNA, 501 bp, Artificial Sequence
  derived and/or modified sequence
atggccatgagccaggagagcctgaccttcaaggacgtgttcgtggactttacactagaggagtggcagcagttggacagcgcccaaaagaacctatacagagatgtcatgctggagaattactctcacttggtgtcagtgggctatttagtggctaaacccgatgtcatattccgtcttggtcccggggaggagagctggatggccgatggagggacgcccgttcgcacctgcgctgaggtttggcaggtagatgaacagatcgatcattataaggagtcccaggacaagctaccctggcaagccgctttcatcggcaaagagacattgaaggacgaatctggacaggaaagtcggacctgtaggaagtccatatatctctccaccgaatttgactctgtgcggcagcggttgcccaagtattactcttgggaaaaggcttttaaaaccagcttcaagctcagttggagtaaatggaaactgtgtaaaaaggaaaggtag

SEQ ID NO: 194996 - DNA, 501 bp, Artificial Sequence
  derived and/or modified sequence
atggctatgtctcaggaaagccttactttcaaagatgtgttcgttgacttcaccctggaggagtggcagcagctggattcagcacagaaaaatctctatcgcgatgtcatgttagagaattacagccacctagtttccgtgggttacttagtggctaaacccgatgtgatttttaggctgggtccgggtgaagaaagctggatggcagatggtgggacgccagtgcgcacctgcgcggaggtgtggcaggttgacgagcagatcgaccactacaaagagtcccaggacaaactcccgtggcaggcagcttttatcggaaaagagaccctgaaagacgaatccggacaggaaagtcgcacgtgccggaagtccatttatctatccactgaattcgatagtgtgcggcagagactgccaaagtactatagttgggaaaaagccttcaaaacttctttcaagttgtcctggagcaaatggaagctttgcaaaaaggagagatag

SEQ ID NO: 194997 - protein, 521 aa, Artificial Sequence
  derived and/or modified sequence
MAETVWSTDTGEAVYRSRDPVRNLRLRVHLQRITSSNFLHYQPAAELGKDLIDLATFRPQPTASGHRPEEDEEEEIVIGWQEKLFSQFEVDLYQNETACQSPLDYQYRQEILKLENSGGKKNRRIFTYTDSDRYTNLEEHCQRMTTAASEVPSFLVERMANVRRRRQDRRGMEGGILKSRIVTWEPSEEFVRNNHVINTPLQTMHIMADLGPYKKLGYKKYEHVLCTLKVDSNGVITVKPDFTGLKGPYRIETEGEKQELWKYTIDNVSPHAQPEEEERERRVFKDLYGRHKEYLSSLVGTDFEMTVPGALRLFVNGEVVSAQGYEYDNLYVHFFVELPTAHWSSPAFQQLSGVTQTCTTKSLAMDKVAHFSYPFTFEAFFLHEDESSDALPEWPVLYCEVLSLDFWQRYRVEGYGAVVLPATPGSHTLTVSTWRPVELGTVAELRRFFIGGSLELEDLSYVRIPGSFKALLSSSKTKEGRKVDGERVLNPQPVSLSLFPGKPHSTAWGLLRLRYELFLSK

SEQ ID NO: 194998 - protein, 559 aa, Artificial Sequence
  derived and/or modified sequence
MAETVWSTDTGEAVYRSRDPVRNLRLRVHLQRITSSNFLHYQPAAELGKDLIDLATFRPQPTASGHRPEEDEEEEIVIGWQEKLFSQFEVDLYQNETACQSPLDYQYRQEILKLENSGGKKNRRIFTYTDSDRYTNLEEHCQRMTTAASEVPSFLVERMANVRRRRQDRRGMEGGILKSRIVTWEPSEEFVRNNHVINTPLQTMHIMADLGPYKKLGYKKYEHVLCTLKVDSNGVITVKPDFTGLKGPYRIETEGEKQELWKYTIDNVSPHAQPEEEERERRVFKDLYGRHKEYLSSLVGTDFEMTVPGALRLFVNGEVVSAQGYEYDNLYVHFFVELPTAHWSSPAFQQLSGVTQTCTTKSLAMDKVAHFSYPFTFEAFFLHEDESSDALPEWPVLYCEVLSLDFWQRYRVEGYGAVVLPATPGSHTLTVSTWRPVELGTVAELRRFFIGGSLELEDLSYVRIPGSFKGERLSRFGLRTETTGTVTFRLHCLQQSRAFMESSSLQKRMRSVLDRLEGFSQQSSIHNVLEAFRRARRRMQEARESLPQDLVSPSGTLVS

SEQ ID NO: 194999 - protein, 520 aa, Artificial Sequence
  derived and/or modified sequence
MAETVWSTDTGEAVYRSRDPVRNLRLRVHLQRITSSNFLHYQPAAELGKDLIDLATFRPQPTASGHRPEEDEEEEIVIGWQEKLFSQFEVDLYQNETACQSPLDYQYRQEILKLENSGGKKNRRIFTYTDSDRYTNLEEHCQRMTTAASEVPSFLVERMANVRRRRQDRRGMEGGILKSRIVTWEPSEEFVRNNHVINTPLQTMHIMADLGPYKKLGYKKYEHVLCTLKVDSNGVITVKPDFTGLKGPYRIETEGEKQELWKYTIDNVSPHAQPEEEERERRVFKDLYGRHKEYLSSLVGTDFEMTVPGALRLFVNGEVVSAQGYEYDNLYVHFFVELPTAHWSSPAFQQLSGVTQTCTTKSLAMDKVAHFSYPFTFEAFFLHEDESSDALPEWPVLYCEVLSLDFWQRYRVEGYGAVVLPATPGSHTLTVSTWRPVELGTVAELRRFFIGGSLELEDLSYVRIPGSFKGLSSSKTKEGRKVDGERVLNPQPVSLSLFPGKPHSTAWGLLRLRYELFLSK

SEQ ID NO: 195000 - DNA, 1680 bp, Artificial Sequence
  derived and/or modified sequence
atggcagaaaccgtttggtctaccgataccggagaagccgtgtacaggtccagggacccagtgaggaatctccgcctccgagtccacctacagcgcataacgtcctccaattttctacactaccaacctgcagctgaactggggaaagatctcattgacctagctaccttccgtcctcaaccaacagcctccggccatcgcccagaagaggatgaagaagaggaaattgttatcggatggcaagaaaagctattttctcaattcgaggtggacctttaccagaatgagaccgcgtgtcaaagccctctggattaccagtaccgacaagagatcctgaagctggagaacagcggaggaaaaaagaaccgtcggatctttacctatacagatagtgataggtacacgaacctggaggagcattgccagcgaatgactacggctgcatcagaggtgccctcctttctggttgaaagaatggcgaacgtgagaagaaggcgacaagaccggcgtgggatggaaggaggtatccttaaatcccggattgtgacttgggaaccatcagaagagttcgttcgtaataaccacgtgattaacacgcctctgcagactatgcacataatggccgatctgggaccatacaaaaaactcgggtacaagaaatatgagcatgtcctttgtactctgaaggtcgactcaaatggcgtgattactgtgaaacctgatttcactgggttaaaggggccttatcgcatagaaactgagggcgaaaagcaggagctgtggaaatatactatcgacaacgttagccctcatgcccagcctgaagaggaggagcgggagaggagagttttcaaagacctctatggaagacataaggaatatcttagttccctggtggggactgacttcgaaatgacggtccctggagccctgcgcctgtttgtgaatggcgaagtggtgagtgcccagggatacgagtatgataatctgtatgtgcatttcttcgtggagcttcctaccgcgcactggtcctcacctgcattccagcagctgagcggtgtcactcagacctgtactacaaagagtctggcgatggacaaggtggcacacttttcctacccattcacatttgaagccttctttctacacgaggacgagtcctctgacgccctccccgagtggcctgtgctgtactgcgaggtgctgtccctggatttttggcagcggtatagggtcgaaggctatggcgccgtcgttcttcccgccaccccgggctcgcacactttgaccgtgtccacatggagaccagttgaactgggcacagtcgccgaactgagaagattttttatcggcggctcccttgagttggaggatctgtcatatgtgaggatcccaggctcctttaaaggcgagagactgtctcgattcgggctgcgaaccgagacaaccggcaccgttacttttcggttgcattgcctgcagcagtcgcgggcattcatggagtctagctcccttcagaagaggatgcgcagcgtcttagatcggctggagggcttcagtcagcaatcctctatccacaatgtacttgaggcctttcgaagagcgcggcgacggatgcaggaggcacgtgagagcctgccacaagaccttgtttctccatctggtaccctggtgagctag

SEQ ID NO: 195001 - DNA, 1680 bp, Artificial Sequence
  derived and/or modified sequence
atggccgagaccgtgtggagcacagacaccggggaggccgtgtaccgcagccgggaccctgtgaggaacctgcggctgcgggtgcacctgcagaggatcaccagcagcaacttcctgcactaccagcctgctgctgagctgggcaaggacctgattgacctggccaccttccggccccagcccacagccagcggccacaggcctgaggaggatgaggaggaggagatcgtcatcggctggcaggagaagctgttcagccagtttgaggtggacctgtaccagaatgaaacagcctgccagagccccctggactaccagtaccggcaggagatcctgaagctggagaacagcggcggcaagaagaacagacgcatcttcacctacacagacagcgaccgctacaccaacctggaggagcactgccagaggatgaccacagctgccagcgaggtgcccagcttcctggtggagaggatggccaacgtgagaagaagacggcaggacagaagaggcatggagggcggcatcctgaagagcagaattgtgacctgggagcccagcgaggagtttgtgaggaacaaccacgtgatcaacacccccctgcagaccatgcacatcatggctgacctgggcccctacaagaagctgggctacaagaagtatgaacatgtgctgtgcaccctgaaggtggacagcaatggagtcatcaccgtgaagccagacttcaccggcctgaagggcccctacagaattgaaacagaaggagagaagcaggagctgtggaagtacaccatcgacaacgtgagcccccacgcccagcctgaggaggaggagcgggagaggagggtcttcaaggacctgtatggccgccacaaggagtacctgagcagcctggtgggcacagactttgagatgacagtgcctggggccctgcggctgtttgtgaatggagaggtggtgtctgcccagggctatgaatatgacaacctgtatgtgcacttctttgtggagctgcccacagcccactggagcagccctgccttccagcagctgagcggcgtgacccagacctgcaccaccaagagcctggccatggacaaggtggcccacttctcctaccccttcacctttgaggccttcttcctgcatgaagatgagagcagtgatgccctgcctgagtggcctgtgctgtactgtgaggtgctgagcctggacttctggcagcgctacagagtggagggctatggagctgtggtgctgcctgccaccccaggcagccacaccctgactgtgtccacctggaggcctgtggagctgggcaccgtggccgagctgcggcgcttcttcatcggcggcagcctggagctggaggacctgtcctatgtgcgcatccctggcagcttcaagggggagcggctgagccgcttcggcctgaggacagagaccactggaacagtgaccttccggctgcactgcctgcagcagagccgggccttcatggagagcagcagcctgcagaagaggatgaggtctgtgctggaccggctggagggcttcagccagcagagcagcatccacaacgtgctggaggccttcagaagagcccggcggaggatgcaggaggcccgggagagcctgccccaggacctggtgagccccagcggcaccctggtgtcctag

SEQ ID NO: 195002 - DNA, 2392 bp, Artificial Sequence
  derived and/or modified sequence
ccgatccagcgtctccgttgccaggaaaacagagcggcgcgctttccggcgcagtcgcggcgcgtcgcagctgtcatggcggagaccgtctggagcactgacaccggggaggcagtgtatcgctcccgggaccccgtgcgcaacttgcgcctccgagtccacctgcaaagaatcacatcaagcaactttcttcattatcagcctgctgccgagctcgggaaggacctcatagacttggccacttttaggcctcagccaactgccagtggacaccgcccagaggaagacgaagaggaggagattgtgattgggtggcaggagaagctctttagccagtttgaagtagatctgtaccaaaatgaaacagcctgtcagagtcctttggattatcagtaccgtcaggagatcctgaagctggagaattcgggtggcaagaaaaaccgacgaatctttacctacactgactctgatagatacaccaatttggaggagcactgtcagagaatgaccactgcagccagcgaggtgccttcattcttggtcgagcgaatggcaaatgtcaggcgtcgccggcaggacaggcgagggatggagggcggcatcctcaagtcacgcatcgtcacctgggagccctcagaagagtttgtcaggaacaaccacgtcattaacacccctcttcagacaatgcacatcatggcagacctggggccctataaaaagcttggctataagaagtatgaacatgtcctgtgtactctgaaggtggatagcaatggtgtgatcacagtaaagcctgacttcacgggcctcaaaggaccctacaggattgagacggagggggagaagcaggagctgtggaaatatacgatcgacaatgtttccccccacgcacagccggaggaggaggagcgggaacggcgagtgttcaaggatctttatggccggcacaaggagtatctcagcagcctcgtaggcaccgactttgagatgactgtcccaggtgccctccggctctttgtaaatggagaggtcgtttcagcccaaggctatgagtatgacaatctctacgtccacttctttgtagaattgccaactgctcactggtcaagcccagcattccagcagctctcaggagtaacacagacctgcaccaccaagtccctggcaatggacaaggtggctcacttctcctacccattcacgtttgaagccttcttcctccatgaggatgaatcttctgatgcactcccggagtggcctgtgctctactgtgaggtcctctcgctggacttctggcagaggtaccgtgtggaaggctatggggctgtggtgctgcctgccactccaggctcacacaccctgacagtctccacgtggagacctgtggagcttggcacggtggctgagctgaggaggtttttcattggcggttctctggaactggaggacctctcctatgtacggataccaggatccttcaagggggaacgcctgagccgctttggactccgcacagagaccacaggcactgtcaccttccgcttgcactgtctgcagcagtccagggccttcatggaatcgagctcccttcagaaaaggatgcggagtgtgttggaccgtctggaagggttcagccagcagagttccattcacaatgtgctagaggccttccgtcgagcccggcgccgcatgcaggaggcccgggaaagcctcccgcaggacctagtgagcccctctggaaccctggtctcctagctcacagcagccctggcccacagtgcaagaggacaagatgggggatatctgaggccagtgctctcctgcctcttcgtctttctgattagagaccacgttggtctgctgagaaccagaaaagctgggaaattcccggctggcccctctgcctagccttctgcagggtcttctccctaccctgtggaaataaagccagagaccctgtggccccccctttatatttgcagccactgtcaatgggcatcacagcaaggcaggctttttgatctgaagctgtttggggtgaccccatagtgagtctggccttgactcacttttctggcttgtctcacagtagcaggggatctgctgttctccaccctttaaaaatggagcctttcatcttccaagaccaaagaaggaaggaaggtggacggtgagagggtcttaaatccccagcctgtgagtctcagcctctttccagggaagcctcattctactgcttggggcttgctgaggttgagatatgagttatttctgagtaagtgaaggctgaaggcagtgctgagtcctttctgctagctgggtggtatcttttactgtgtttttttgtttgtttgtttttttgttttttgttacataaaccccttttattttg

SEQ ID NO: 195003 - DNA, 1926 bp, Artificial Sequence
  derived and/or modified sequence
gctgtcatggcggagaccgtctggagcactgacaccggggaggcagtgtatcgctcccgggaccccgtgcgcaacttgcgcctccgagtccacctgcaaagaatcacatcaagcaactttcttcattatcagcctgctgccgagctcgggaaggacctcatagacttggccacttttaggcctcagccaactgccagtggacaccgcccagaggaagacgaagaggaggagattgtgattgggtggcaggagaagctctttagccagtttgaagtagatctgtaccaaaatgaaacagcctgtcagagtcctttggattatcagtaccgtcaggagatcctgaagctggagaattcgggtggcaagaaaaaccgacgaatctttacctacactgactctgatagatacaccaatttggaggagggagggcggcatcctcaagtcacgcatcgtcacctgggagccctcagaagagtttgtcaggaacaaccacgtcattaacacccctcttcagacaatgcacatcatggcagacctggggccctataaaaagcttggctataagaagtatgaacatgtcctgtgtactctgaaggtggatagcaatggtgtgatcacagtaaagcctgacttcacgggcctcaaaggaccctacaggattgagacggagggggagaagcaggagctgtggaaatatacgatcgacaatgtttccccccacgcacagccggaggaggaggagcgggaacggcgagtgttcaaggatctttatggccggcacaaggagtatctcagcagcctcgtaggcaccgactttgagatgactgtcccaggtgccctccggctctttgtaaatggagaggtcgtttcagcccaaggctatgagtatgacaatctctacgtccacttctttgtagaattgccaactgctcactggtcaagcccagcattccagcagctctcaggagtaacacagacctgcaccaccaagtccctggcaatggacaaggtggctcacttctcctacccattcacgtttgaagccttcttcctccatgaggatgaatcttctgatgcactcccggagtggcctgtgctctactgtgaggtcctctcgctggacttctggcagaggtaccgtgtggaaggctatggggctgtggtgctgcctgccactccaggctcacacaccctgacagtctccacgtggagacctgtggagcttggcacggtggctgagctgaggaggtttttcattggcggttctctggaactggaggacctctcctatgtacggataccaggatccttcaagggggaacgcctgagccgctttggactccgcacagagaccacaggcactgtcaccttccgcttgcactgtctgcagcagtccagggccttcatggaatcgagctcccttcagaaaaggatgcggagtgtgttggaccgtctggaagggttcagccagcagagttccattcacaatgtgctagaggccttccgtcgagcccggcgccgcatgcaggaggcccgggaaagcctcccgcaggacctagtgagcccctctggaaccctggtctcctagctcacagcagccctggcccacagtgcaagaggacaagatgggggatatctgaggccagtgctctcctgcctcttcgtctttctgattagagaccacgttggtctgctgagaaccagaaaagctgggaaattcccggctggcccctctgcctagccttctgcagggtcttctccctaccctgtggaaataaagccagagaccctgtggccccccctttatatttgcagccactgtcaatgggcatcacagcaaggcaggctttttgatctgaagctgtttggggtgaccccatagtgagtctggccttgactcacttttctggcttgtctcacagtagc

SEQ ID NO: 195004 - DNA, 1680 bp, Artificial Sequence
  derived and/or modified sequence
atggccgagaccgtgtggagcaccgacaccggcgaggccgtgtaccggtctagagacccagttaggaatttacgactacgcgtgcacctacagagaataacttcttctaactttctccactaccagcccgcagccgagcttggtaaagacctcattgacctcgccacctttcggcctcagcccacagcaagcggtcacaggccagaggaggacgaagaagaggaaattgtcattggttggcaggagaagttgtttagtcagtttgaagtcgacctgtaccagaatgagaccgcatgccagtcacccttggattatcagtaccggcaggagattctgaaactggaaaacagcggagggaagaaaaacaggcgaatattcacgtacacagacagcgaccggtacacgaacctggaagagcactgtcagcgtatgactaccgcagcttccgaggtccccagctttttggtcgagaggatggcgaatgtcagaagaagacggcaagatagacggggaatggaaggcggcatactaaaaagtagaattgtgacctgggagccaagtgaagagtttgtccgcaacaaccacgttataaacacaccactgcagactatgcacattatggcagacttgggcccttataagaagttagggtataaaaaatatgaacatgtgctttgcaccctcaaagtggacagcaatggtgtcatcactgttaaaccagactttacgggtcttaaaggcccgtaccggatagaaaccgagggcgagaagcaagaactttggaaatacaccatagataacgtgtctccccacgctcagcccgaggaggaggagcgcgaacgccgcgtctttaaagacctctatggtcgccacaaggagtatttatcatccctggtgggcacagatttcgaaatgaccgtgcctggggcactccgactcttcgttaacggcgaggtggtgagcgcgcagggctacgaatacgataatctgtacgtccattttttcgttgagctgcctaccgcccactggtcctcgccagcattccagcagctctctggtgtgacacagacgtgcaccacgaaaagtctggctatggacaaggtcgctcacttttcataccccttcacctttgaagccttctttctccacgaggatgagagcagcgacgcactccccgagtggccagtgctttactgtgaagtcctgagccttgacttctggcagagatacagagtagagggatacggagccgtggtcctgcccgcaactcccggttcacacaccctgaccgtgtcgacgtggcggcccgtggaactcgggacggtagctgagttgcgaagattttttatcggggggtccctggaactggaggacttaagctacgtgaggataccaggttcttttaaaggtgaaaggctaagccggtttggcctgcggaccgagacaacagggactgtcacattccgcctgcactgcttgcagcagtcacgcgcctttatggagtcaagttccttgcagaagagaatgcgtagcgtcctggaccggctggaaggcttttcccaacagtcaagcatccataacgttctggaggcattccgtagagcccgccggagaatgcaggaggctcgggagtccctcccccaggacctggtctcgcctagcggtactctcgtatcctag

SEQ ID NO: 195005 - DNA, 1680 bp, Artificial Sequence
  derived and/or modified sequence
atggcagagaccgtctggtctacagataccggagaggctgtgtatagaagtcgagatcctgtgcgtaacctaaggctaagagttcacctacaaagaataactagttcaaattttctgcattaccagcctgcagccgaattaggcaaagacttgatagatttggccactttccgtccccagcctacggcgtcaggccaccgaccggaagaagacgaagaagaggagatagttattggctggcaggaaaaacttttcagccaatttgaagtggatctgtaccagaatgagacggcttgccagtcccctctcgactaccagtacaggcaggagatacttaaattggaaaatagcgggggaaaaaagaatagaaggattttcacatataccgactctgaccgctacactaacttggaagagcactgtcaacgtatgactaccgctgccagcgaggtgccgtccttcctcgtggaacggatggccaacgtccggagacgacggcaagaccgcagggggatggaggggggaatccttaagagtagaattgtgacttgggagcctagcgaagaattcgtgcgcaataaccatgtcatcaacactcctctgcaaactatgcacatcatggctgacctcgggccttataaaaaactcggatacaaaaaatatgagcacgttctctgcactctcaaagttgattcaaatggcgttattacagtgaagccagacttcacgggacttaaaggtccttaccggatagaaaccgaaggcgaaaaacaggagttgtggaagtataccatcgataacgttagcccacatgctcagcccgaggaagaagagagagagcgacgcgtttttaaagatctctatggacgtcataaagaatacttaagcagcctggttggaactgattttgagatgacggtgccgggagctcttcggctcttcgttaacggagaagtggtgagcgctcaaggctacgaatatgataacctctacgttcatttcttcgttgagttaccaaccgcacattggagcagtcctgcatttcagcagctgtccggcgtgacacagacatgtacaacaaagagcctggccatggacaaggttgcccatttcagttacccttttactttcgaagctttctttctccatgaggatgagtctagtgacgccctacctgaatggcccgtcctctattgtgaggtgctgagcttggatttttggcagaggtatcgggtggaaggttatggagcagtagtgctacctgcaaccccagggtcgcacacactgaccgtctctacttggcgaccagttgagttgggtacagttgcggagctccggagattcttcattggcggaagcttggagctggaagatctgtcatatgtgcggatacccggaagtttcaagggagagcgactgtcccggttcggacttaggaccgagactaccggaaccgtgactttcagattgcactgcctgcaacagtcccgagcctttatggaatcgagctcgctgcagaagcgtatgcgtagcgtcttggatcgtctggaagggttctcccagcaaagttccatccacaacgtactggaggcttttcgtagagccagaaggcggatgcaagaggcgagggagtctctgcctcaggatctggtcagcccttcaggcacactggtctcatag

SEQ ID NO: 195006 - DNA, 1680 bp, Artificial Sequence
  derived and/or modified sequence
atggccgagaccgtgtggagcaccgacaccggcgaggccgtgtacagaagcagagaccccgtgagaaacctgagactgagagtgcacctgcagagaatcaccagcagcaacttcctgcactaccagcccgccgccgagctgggcaaggacctgatcgacctggccaccttcagaccccagcccaccgccagcggccacagacccgaggaggacgaggaggaggagatcgtgatcggctggcaggagaagctgttcagccagttcgaggtggacctgtaccagaacgagaccgcctgccagagccccctggactaccagtacagacaggagatcctgaagctggagaacagcggcggcaagaagaacagaagaatcttcacctacaccgacagcgacagatacaccaacctggaggagcactgccagagaatgaccaccgccgccagcgaggtgcccagcttcctggtggagagaatggccaacgtgagaagaagaagacaggacagaagaggcatggagggcggcatcctgaagagcagaatcgtgacctgggagcccagcgaggagttcgtgagaaacaaccacgtgatcaacacccccctgcagaccatgcacatcatggccgacctgggcccctacaagaagctgggctacaagaagtacgagcacgtgctgtgcaccctgaaggtggacagcaacggcgtgatcaccgtgaagcccgacttcaccggcctgaagggcccctacagaatcgagaccgagggcgagaagcaggagctgtggaagtacaccatcgacaacgtgagcccccacgcccagcccgaggaggaggagagagagagaagagtgttcaaggacctgtacggcagacacaaggagtacctgagcagcctggtgggcaccgacttcgagatgaccgtgcccggcgccctgagactgttcgtgaacggcgaggtggtgagcgcccagggctacgagtacgacaacctgtacgtgcacttcttcgtggagctgcccaccgcccactggagcagccccgccttccagcagctgagcggcgtgacccagacctgcaccaccaagagcctggccatggacaaggtggcccacttcagctaccccttcaccttcgaggccttcttcctgcacgaggacgagagcagcgacgccctgcccgagtggcccgtgctgtactgcgaggtgctgagcctggacttctggcagagatacagagtggagggctacggcgccgtggtgctgcccgccacccccggcagccacaccctgaccgtgagcacctggagacccgtggagctgggcaccgtggccgagctgagaagattcttcatcggcggcagcctggagctggaggacctgagctacgtgagaatccccggcagcttcaagggcgagagactgagcagattcggcctgagaaccgagaccaccggcaccgtgaccttcagactgcactgcctgcagcagagcagagccttcatggagagcagcagcctgcagaagagaatgagaagcgtgctggacagactggagggcttcagccagcagagcagcatccacaacgtgctggaggccttcagaagagccagaagaagaatgcaggaggccagagagagcctgccccaggacctggtgagccccagcggcaccctggtgagctag

SEQ ID NO: 195007 - protein, 645 aa, Artificial Sequence
  derived and/or modified sequence
MDFSFSFMQGIMGNTIQQPPQLIDSANIRQEDAFDNNSDIAEDGGQTPYEATLQQGFQYPATTEDLPPLTNGYPSSISVYETQTKYQSYNQYPNGSANGFGAVRNFSPTDYYHSEIPNTRPHEILEKPSPPQPPPPPSVPQTVIPKKTGSPEIKLKITKTIQNGRELFESSLCGDLLNEVQASEHTKSKHESRKEKRKKSNKHDSSRSEERKSHKIPKLEPEEQNRPNERVDTVSEKPREEPVLKEEAPVQPILSSVPTTEVSTGVKFQVGDLVWSKVGTYPWWPCMVSSDPQLEVHTKINTRGAREYHVQFFSNQPERAWVHEKRVREYKGHKQYEELLAEATKQASNHSEKQKIRKPRPQRERAQWDIGIAHAEKALKMTREERIEQYTFIYIDKQPEEALSQAKKSVASKTEVKKTRRPRSVLNTQPEQTNAGEVASSLSSTEIRRHSQRRHTSAEEEEPPPVKIAWKTAAARKSLPASITMHKGSLDLQKCNMSPVVKIEQVFALQNATGDGKFIDQFVYSTKGIGNKTEISVRGQDRLIISTPNQRNEKPTQSVSSPEATSGSTGSVEKKQQRRSIRTRSESEKSTEVVPKKKIKKEQVETVPQATVKTGLQKGSADRGVQGSVRFSDSSVSAAIEETVD

SEQ ID NO: 195008 - protein, 15 aa, Artificial Sequence
  derived and/or modified sequence
MDFSFSFMQGIMGNT

SEQ ID NO: 195009 - DNA, 1938 bp, Artificial Sequence
  derived and/or modified sequence
atggacttcagcttcagcttcatgcagggcatcatgggcaacaccatccagcagcccccccagctgatcgacagcgccaacatcagacaggaggacgccttcgacaacaacagcgacatcgccgaggacggcggccagaccccctacgaggccaccctgcagcagggcttccagtaccccgccaccaccgaggacctgccccccctgaccaacggctaccccagcagcatcagcgtgtacgagacccagaccaagtaccagagctacaaccagtaccccaacggcagcgccaacggcttcggcgccgtgagaaacttcagccccaccgactactaccacagcgagatccccaacaccagaccccacgagatcctggagaagcccagccccccccagcccccccccccccccagcgtgccccagaccgtgatccccaagaagaccggcagccccgagatcaagctgaagatcaccaagaccatccagaacggcagagagctgttcgagagcagcctgtgcggcgacctgctgaacgaggtgcaggccagcgagcacaccaagagcaagcacgagagcagaaaggagaagagaaagaagagcaacaagcacgacagcagcagaagcgaggagagaaagagccacaagatccccaagctggagcccgaggagcagaacagacccaacgagagagtggacaccgtgagcgagaagcccagagaggagcccgtgctgaaggaggaggcccccgtgcagcccatcctgagcagcgtgcccaccaccgaggtgagcaccggcgtgaagttccaggtgggcgacctggtgtggagcaaggtgggcacctacccctggtggccctgcatggtgagcagcgacccccagctggaggtgcacaccaagatcaacaccagaggcgccagagagtaccacgtgcagttcttcagcaaccagcccgagagagcctgggtgcacgagaagagagtgagagagtacaagggccacaagcagtacgaggagctgctggccgaggccaccaagcaggccagcaaccacagcgagaagcagaagatcagaaagcccagaccccagagagagagagcccagtgggacatcggcatcgcccacgccgagaaggccctgaagatgaccagagaggagagaatcgagcagtacaccttcatctacatcgacaagcagcccgaggaggccctgagccaggccaagaagagcgtggccagcaagaccgaggtgaagaagaccagaagacccagaagcgtgctgaacacccagcccgagcagaccaacgccggcgaggtggccagcagcctgagcagcaccgagatcagaagacacagccagagaagacacaccagcgccgaggaggaggagcccccccccgtgaagatcgcctggaagaccgccgccgccagaaagagcctgcccgccagcatcaccatgcacaagggcagcctggacctgcagaagtgcaacatgagccccgtggtgaagatcgagcaggtgttcgccctgcagaacgccaccggcgacggcaagttcatcgaccagttcgtgtacagcaccaagggcatcggcaacaagaccgagatcagcgtgagaggccaggacagactgatcatcagcacccccaaccagagaaacgagaagcccacccagagcgtgagcagccccgaggccaccagcggcagcaccggcagcgtggagaagaagcagcagagaagaagcatcagaaccagaagcgagagcgagaagagcaccgaggtggtgcccaagaagaagatcaagaaggagcaggtggagaccgtgccccaggccaccgtgaagaccggcctgcagaagggcagcgccgacagaggcgtgcagggcagcgtgagattcagcgacagcagcgtgagcgccgccatcgaggagaccgtggactag

SEQ ID NO: 195010 - DNA, 849 bp, Artificial Sequence
  derived and/or modified sequence
atggacttcagcttcagcttcatgcagggcatcatgggcaacaccatccagcagcccccccagctgatcgacagcgccaacatcagacaggaggacgccttcgacaacaacagcgacatcgccgaggacggcggccagaccccctacgaggccaccctgcagcagggcttccagtaccccgccaccaccgaggacctgccccccctgaccaacggctaccccagcagcatcagcgtgtacgagacccagaccaagtaccagagctacaaccagtaccccaacggcagcgccaacggcttcggcgccgtgagaaacttcagccccaccgactactaccacagcgagatccccaacaccagaccccacgagatcctggagaagcccagccccccccagcccccccccccccccagcgtgccccagaccgtgatccccaagaagaccggcagccccgagatcaagctgaagatcaccaagaccatccagaacggcagagagctgttcgagagcagcctgtgcggcgacctgctgaacgaggtgcaggccagcgagcacaccaagagcaagcacgagagcagaaaggagaagagaaagaagagcaacaagcacgacagcagcagaagcgaggagagaaagagccacaagatccccaagctggagcccgaggagcagaacagacccaacgagagagtggacaccgtgagcgagaagcccagagaggagcccgtgctgaaggaggaggcccccgtgcagcccatcctgagcagcgtgcccaccaccgaggtgagcaccggcgtgaagttccaggtgggcgacctggtgtggagcaaggtgggcacctacccctag

SEQ ID NO: 195011 - DNA, 1938 bp, Artificial Sequence
  derived and/or modified sequence
atggacttctcgttttccttcatgcaaggtattatgggtaataccattcagcagccgccccaactgatagatagcgcaaatatccggcaggaagacgcctttgataacaacagcgacatagctgaggacggaggtcagactccgtacgaggctaccctccagcagggttttcagtacccagccaccacggaggatctcccgccactcaccaacggctaccccagctcgatctctgtttatgagacccaaactaagtaccaaagctataaccagtatccaaatggaagtgctaacgggtttggagcagtgcgtaatttctccccaaccgactactaccacagcgagattcccaacacacgtcctcatgaaatactcgaaaagcccagtccccctcagcctcccccgccaccatctgtgcctcagaccgtaatcccgaaaaagaccggaagtcctgaaatcaaactaaagatcaccaagaccatccagaatggacgcgagttgtttgagagcagcctgtgcggagacctactgaatgaagtgcaggcctcagagcacaccaagagcaaacacgaatcgaggaaagaaaagaggaaaaagagcaataaacatgactcaagcaggagcgaagaaagaaaatctcacaaaatccctaaactagaaccagaagagcaaaatcgacccaatgagcgggtcgacaccgtgtccgaaaaaccgagggaggagccggtgttgaaagaagaggcccctgtgcagccaatcctgtcttcggtccccacgacggaagtgtcgaccggggtgaagtttcaggtcggagatttggtgtggagtaaggttggcacatatccctggtggccttgtatggtttccagtgatccacagctcgaggtgcatacaaaaatcaacacgagaggggcccgggagtaccacgtccagttttttagcaatcagcccgagagagcctgggtgcatgaaaaaagagttcgggaatacaaaggacacaaacagtacgaagagttgttggcggaggcgaccaaacaggcctctaaccattctgagaagcaaaaaatcagaaaaccccggcctcagcgagaaagggcacagtgggacatcggcatcgcgcacgccgaaaaagcgctgaaaatgacgagagaggagcgaattgagcagtacaccttcatttacatagataagcagcctgaggaggctttgagtcaagctaaaaagtcagtggcgtccaagacagaagtcaaaaaaacacgccgcccccgcagcgtgctgaatacacagccagagcagaccaacgcgggcgaggtggcttcatccctgtctagcaccgagatcagacgccacagtcagaggcgccatacaagtgcagaagaggaggaaccgcctcccgttaaaatcgcatggaagacggctgcagcacggaagagcttgcccgcgagtattacaatgcacaagggcagcctcgacttgcagaagtgcaacatgtctccagtggtcaagattgaacaggtgtttgcgctgcagaacgcaaccggagacggcaagtttattgaccagtttgtttactcaaccaaaggaattgggaacaaaactgaaatctcagtgcggggacaggaccggctgataattagcaccccaaatcagaggaacgagaaacccacacagagtgtgagttcacccgaggctacctctggctctaccggatctgtggaaaaaaaacagcagcgccgtagtattcggacccggagcgagagtgagaaaagtacagaggtggtcccaaaaaaaaagattaagaaagaacaggttgaaactgtgccccaggccaccgtgaaaaccggtttgcagaaaggaagcgccgaccgaggcgtgcagggaagcgtgcgcttttccgacagttccgtcagcgctgcaatcgaagagactgtggactag

SEQ ID NO: 195012 - DNA, 849 bp, Artificial Sequence
  derived and/or modified sequence
atggacttttccttctcttttatgcagggaatcatggggaatacaatccaacagcccccacagctgattgacagtgctaacatccgccaggaagacgcttttgataacaactctgacattgccgaggacggcggccaaactccgtatgaggctacacttcaacagggtttccagtatcccgccaccacggaagatttgccaccccttaccaatggctatccgagctctatatcagtctacgagactcagactaaatatcagagctacaatcagtatccgaatggatccgctaatggctttggggctgttcgcaatttctcgccaaccgattattatcattcagaaattccaaatactcggcctcatgagatcctggaaaagccctctcccccccaacccccgccccccccgtccgtcccccagacagtgatccccaagaagacgggaagtccagagatcaagctgaagatcacaaaaactatccagaatggacgcgaactgtttgaatcgtcactgtgcggcgatctgttaaatgaggtacaggcttccgaacataccaagtcaaagcatgaaagccgcaaagagaagaggaagaagtcaaataaacatgacagctccagaagtgaggaacgaaaatctcacaaaattcctaagctggagcctgaggagcagaaccgcccaaatgagagggttgacaccgtttccgagaagcctagggaggagcccgtgctcaaagaagaggcccctgtgcagccaattttgtcctccgtgcctactactgaggtgtcgacgggggtcaagtttcaagtgggtgatctagtgtggtccaaggtcgggacgtacccctag

SEQ ID NO: 195013 - DNA, 1938 bp, Artificial Sequence
  derived and/or modified sequence
atggacttctccttctccttcatgcagggcatcatgggcaacaccatccagcagcccccccagctgattgattctgccaacatccggcaggaggatgcctttgacaacaacagcgacattgctgaagatggcggccagaccccctatgaggccaccctgcagcagggcttccagtacccagccaccacagaggacctgccccccctgaccaacggctaccccagcagcatctctgtgtatgagacccagaccaagtaccagagctacaaccagtaccccaacggcagcgccaacggctttggagctgtgaggaacttcagccccacagactactaccacagcgagatccccaacacccggccccatgagatcctggagaagcccagccccccccagcccccacctccacccagcgtgccccagaccgtcatccccaagaagacaggcagccctgagatcaagctgaagatcaccaagaccatccagaatggccgggagctgtttgagagcagcctgtgtggggacctgctgaatgaggtgcaggccagcgagcacaccaagagcaagcatgagagcaggaaggagaagaggaagaagagcaacaagcatgacagcagccgctctgaggagaggaagagccacaagatccccaagctggagcctgaggagcagaaccggcccaatgaaagagtggacacagtgtctgagaagccccgggaggagcctgtgctgaaggaggaggcccctgtgcagcccatcctgagctctgtgcccaccacagaggtgtccactggagtgaagttccaggtgggggacctggtgtggagcaaggtgggcacctacccctggtggccctgcatggtgtccagtgacccccagctggaggtgcacaccaagatcaacaccaggggggcccgggagtaccacgtgcagttcttcagcaaccagcctgagcgggcctgggtgcatgagaagagggtgcgggagtacaagggccacaagcagtatgaggagctgctggccgaggccaccaagcaggccagcaaccacagcgagaagcagaagatcaggaagccccggccccagcgggagcgggcccagtgggacatcggcatcgcccatgctgagaaggccctgaagatgacccgggaggagagaattgagcagtacaccttcatctacatcgacaagcagcctgaggaggccctgagccaggccaagaagtctgtggccagcaagacagaggtgaagaagacccggcggcccaggtctgtgctgaacacccagcctgagcagaccaatgctggggaggtggccagcagcctgagcagcacagagatccgccgccacagccagaggaggcacaccagcgctgaggaggaggagcccccacctgtgaagatcgcctggaagacagctgctgccaggaagagcctgcctgccagcatcaccatgcacaagggcagcctggacctgcagaagtgcaacatgagccctgtggtgaagattgagcaggtgtttgccctgcagaatgccactggagatggcaagttcatcgaccagtttgtgtacagcaccaagggcatcggcaacaagacagagatctctgtgcggggccaggacaggctcatcatcagcacccccaaccagagaaatgagaagcccacccagagcgtgagcagccctgaggccaccagcggcagcactggatctgtggagaagaagcagcagaggaggagcatccgcaccaggtctgagagcgagaagagcacagaggtggtgcccaagaagaagatcaagaaggagcaggtggagaccgtgccccaggccaccgtgaagacaggcctgcagaagggcagcgctgaccggggcgtgcagggctctgtgcgcttcagtgacagctctgtgtctgctgccatcgaggagaccgtggactag

SEQ ID NO: 195014 - DNA, 849 bp, Artificial Sequence
  derived and/or modified sequence
atggacttctccttctccttcatgcagggcatcatgggcaacaccatccagcagcccccccagctgattgattctgccaacatccggcaggaggatgcctttgacaacaacagcgacattgctgaagatggcggccagaccccctatgaggccaccctgcagcagggcttccagtacccagccaccacagaggacctgccccccctgaccaacggctaccccagcagcatctctgtgtatgagacccagaccaagtaccagagctacaaccagtaccccaacggcagcgccaacggctttggagctgtgaggaacttcagccccacagactactaccacagcgagatccccaacacccggccccatgagatcctggagaagcccagccccccccagcccccacctccacccagcgtgccccagaccgtcatccccaagaagacaggcagccctgagatcaagctgaagatcaccaagaccatccagaatggccgggagctgtttgagagcagcctgtgtggggacctgctgaatgaggtgcaggccagcgagcacaccaagagcaagcatgagagcaggaaggagaagaggaagaagagcaacaagcatgacagcagccgctctgaggagaggaagagccacaagatccccaagctggagcctgaggagcagaaccggcccaatgaaagagtggacacagtgtctgagaagccccgggaggagcctgtgctgaaggaggaggcccctgtgcagcccatcctgagctctgtgcccaccacagaggtgtccactggagtgaagttccaggtgggggacctggtgtggagcaaggtgggcacctacccctag

SEQ ID NO: 195015 - DNA, 1938 bp, Artificial Sequence
  derived and/or modified sequence
atggacttcagcttcagcttcatgcagggcatcatgggcaacaccatacagcagccccctcagctgatagactctgcaaacatccgccaggaggatgcatttgacaataactccgacattgcggaggacggcggccagacaccctacgaggctaccctacaacagggttttcagtaccccgctactaccgaagacctgccaccgcttaccaacggttacccttccagcatctcagtctatgaaacacagacaaagtaccagtcctacaaccagtacccaaacgggagtgctaacgggtttggagcggtgaggaatttctcacccaccgactattatcattccgagattcctaatacccggccacatgagattttagagaagcctagcccccctcagcccccccctcccccatcggttccccaaaccgtcatacctaagaagacagggtcacctgagatcaaactgaaaattacaaagacaatacagaatgggagagagctgtttgagtcctcgctttgtggagacctacttaatgaagtgcaagcatcagagcacactaagtctaagcacgagagtagaaaggagaagagaaagaagagtaacaaacacgattcttcacggtcagaggaaaggaagagtcacaagatcccaaagctggaacccgaagaacagaaccggcctaatgaacgagtggatacagtttccgagaagccccgggaagagcctgtcctgaaagaggaggcacccgtacagccgatcctttccagtgtgccaaccacagaagtcagcaccggtgtcaaattccaggtgggggatctcgtgtggtcaaaggtggggacgtacccttggtggccatgtatggtctccagcgacccgcaactcgaggttcatacaaagatcaatacaaggggggcccgcgaataccacgtgcaattcttcagcaaccagccggagagagcttgggtgcatgagaagcgtgtgcgagaatacaaaggacacaagcagtacgaagaactgctggctgaggctacaaagcaggccagcaaccactcggagaagcagaagattcggaagccgagaccacaaagagagcgcgctcagtgggacatcggcatcgcacacgccgagaaggccttaaaaatgactcgggaggaacgcattgaacagtatacattcatctacattgataaacagcccgaagaggccctgagtcaggctaagaaatcagtagccagcaagacggaagtgaagaaaacccgaagaccccggtctgttctgaacacacagccggaacagacaaacgccggagaagtggcctcttccttgagttctactgagattagacgtcacagccagagacgccacacaagcgccgaggaggaagagccgccccctgtcaagattgcttggaaaaccgcagcagcccggaaaagccttccagcttcgattactatgcataagggctccctggacttgcagaaatgcaacatgtcgccagtagtgaaaattgaacaagttttcgcgctccagaacgctaccggagacggtaagttcattgaccagtttgtgtactcaacaaagggcatcggcaacaagactgaaattagtgttcggggccaggaccggctgattatatcaactccaaaccagagaaacgaaaagcctactcaatcggtttctagcccagaggcaaccagtggtagcacagggtccgttgaaaagaagcagcaacggcggtccattcgaacgagaagcgaatctgaaaagtcaactgaggtggtgcctaaaaaaaaaatcaaaaaggaacaagttgaaacagtaccccaagccaccgttaagaccggcctccaaaagggttctgcagataggggcgtccagggatccgtccgcttctccgacagctccgtctccgcagctattgaagaaacagttgactag

SEQ ID NO: 195016 - DNA, 849 bp, Artificial Sequence
  derived and/or modified sequence
atggacttcagcttcagcttcatgcagggcatcatgggcaacaccattcaacagcctccccagctgatcgattcagcaaacatacggcaggaggatgcatttgacaataattctgatattgcggaggatggcggccaaacaccctacgaggctacactccagcagggatttcagtacccagctacgaccgaagacctcccacccctgaccaacggatatccaagttcaatttctgtgtacgaaacgcagacaaaataccagagttataatcagtatccaaatggctctgccaatggcttcggggctgttcggaacttttctccaactgattattaccattcagagattcccaacacccgtcctcatgaaatcctcgaaaagcccagcccacctcagccgcctcccccaccatctgtaccccagacagtgataccaaaaaaaactggtagtcctgagatcaaactgaaaattacaaagacgattcaaaacggacgagaactgtttgagtcttctttatgtggggatctgttgaatgaggtccaagcgtcagaacacacaaaatccaagcacgagtctcggaaggagaagcgcaagaaatctaataagcacgactcctcccgctcagaggagcgaaaatctcacaaaatcccaaaactggaacccgaggaacagaatcggccaaacgagcgggtggatacagtcagtgaaaaacccagagaggaacccgttctcaaggaagaggccccagtacagcccattctgtctagcgtaccaactacagaagtctccacaggagttaaatttcaggtcggagacttggtgtggtcaaaggttgggacgtacccatag

SEQ ID NO: 195017 - DNA, 1938 bp, Artificial Sequence
  derived and/or modified sequence
atggatttctcgtttagcttcatgcaaggcatcatgggcaataccattcaacagcctccgcagttgatcgacagtgcaaatattcgccaagaagacgcttttgacaacaacagcgacatagcagaggacggaggtcagaccccatacgaagcaacattgcagcaggggtttcaataccctgccaccactgaggatctgccaccactgacgaacggctacccttccagcatctcagtgtatgaaactcagacaaagtatcagtcctataaccagtatcctaacggctctgccaatggcttcggtgccgtgcgcaacttttcgcccacagactactatcacagtgagatcccaaatacgcgcccacacgaaattctcgagaagccaagtcctccacagccccctccgcctccatctgtgccccagaccgtgattcccaaaaagactggttctcccgaaattaagctcaagatcacaaagacaatacaaaacgggagggagttattcgaaagctcactctgcggagacctcttgaatgaagtgcaggccagcgaacacaccaagagcaagcatgagagccggaaggaaaagagaaagaaatccaacaagcacgactcaagccggagcgaagagcgaaaatcacacaaaatccccaagcttgagcctgaggagcagaaccggccaaatgagcgggtggacactgttagcgaaaaacctagggaggagcccgtgctgaaagaagaggcccctgtgcaaccaattctgtccagcgtccctacaaccgaagtgagcaccggggtcaagtttcaggtgggcgatttggtctggagtaaggttggaacttacccatggtggccgtgtatggtttcctccgacccgcaactggaagtgcacactaaaattaatacaaggggggctcgggagtaccatgttcaattctttagcaatcaacccgagagggcgtgggtgcacgagaagcgagtgagggaatacaaaggacacaaacagtatgaagagcttcttgccgaggctacgaaacaggctagtaaccatagtgaaaaacagaagatccgaaaacctcgaccccaacgcgaaagagcacagtgggacatcgggattgctcatgcagaaaaggcactcaagatgactcgcgaggaaaggatcgagcagtacacatttatctacattgataagcaacccgaagaggcactcagccaagccaagaagtccgtcgcctcaaaaaccgaggtgaaaaagacaagacgacctcgttctgttcttaacacccaacccgaacagacaaacgccggtgaggttgctagctctctgagttcaacagagattaggcgccacagccaaaggcgccatacctctgctgaggaggaagaaccgcctccggtaaagatagcctggaagaccgctgctgcgagaaagagtcttcccgcaagtatcaccatgcataaaggatccttggacctgcagaaatgcaatatgtcacccgtggttaagatcgagcaggtctttgccctccagaacgcgacgggagacggtaagttcatcgatcagttcgtctactcaacaaaaggaattggaaacaaaaccgaaatctccgtccgcggtcaagacaggctcatcatttccacccccaatcagcggaatgagaaacccacccagtccgtctcctcccctgaagcaacatccgggtctacagggagtgtcgagaagaaacaacagcggaggagcattcgtactcgcagcgagtccgagaaatccaccgaagttgtgccgaaaaaaaaaatcaaaaaagagcaggtggagaccgttccccaagcaacggtcaaaacgggacttcaaaaaggcagtgccgacaggggagtgcaaggctcggtccggttttctgattcgtccgtgtcagccgctatcgaggagactgtcgactag

SEQ ID NO: 195018 - DNA, 849 bp, Artificial Sequence
  derived and/or modified sequence
atggatttctcatttagctttatgcaaggtataatgggcaataccattcagcagccccctcagctgattgacagcgctaatatcagacaagaagatgcattcgataacaattctgacattgcagaagatggcggacagaccccatatgaagcaacactgcaacagggctttcagtatcccgcaaccacagaagatctgccccctctcacaaacgggtacccatcctccattagtgtgtatgagacgcagacaaagtaccagtcctacaaccaatacccaaatggatctgcaaatggcttcggagcagtgcgaaatttcagccccacagactactatcactcagagataccaaacacacgccctcatgagatactggagaaaccgagccctccccaacctccaccccctccctctgttcctcagaccgtgattcccaagaaaacggggtcccccgaaataaagctcaagatcactaaaaccattcagaatggtagagagttgtttgaatcatcgttatgcggggatctcctgaatgaagtccaagccagcgagcacactaaatctaagcacgagtccaggaaggaaaagcgtaaaaaatcaaacaaacatgactcatccaggtctgaagagcgaaaaagtcacaagatcccaaagttggagccagaagagcaaaatagaccgaacgagagggtcgacaccgtgtccgagaagcctagagaagaacccgtgctgaaagaggaagcccctgtccagcctatcttgagcagcgtgccaaccactgaggtgagtaccggtgtgaagttccaagtgggagacttggtgtggtctaaagtcgggacatatccctag

SEQ ID NO: 195019 - DNA, 3995 bp, Artificial Sequence
  derived and/or modified sequence
gggggctttgtgcgcggcggcggcgggagaggcggcggcggcggccagcacggaggcggaggccgagggggctgtgcacaggtcgccgcggagaggcgtgcgaattccgagccgagcgccgaggaccgtgctacccaggccgggctgccagccgcaggctcctctctggcagcagcggcggcgcggcgacccccgtccctcggcctccccttcccatcccacctcccgagccttcctcttcccgcagcacgcccggcccggcccggccgtggccctcctcagtgccggccgccatggcagaggcgtccggcgcggggaaaatctagcccggggatttcatgcggcctagctcggttccgcctcctcctcgcgcggccccagcggctgcccgcaccccagccccactccgggcctccgtgtctctcctgtgatcgcactgacacggccggggggttagaatggaacaaactgaaggcccgatgagagaaagggaaagttaaggatgctggagcagaacaatggatttctctttctctttcatgcaagggatcatgggaaacacaattcagcaaccacctcaactcattgactccgccaacatccgtcaggaggatgcctttgataacaacagtgacattgctgaagatggtggccagacaccatatgaagctactttgcagcaaggctttcagtacccagctacaacagaagatcttcctccactcacaaatgggtatccatcatcaatcagtgtgtatgaaactcaaaccaaataccagtcatataatcagtatcctaatgggtcagccaatggctttggtgcagttagaaactttagccccactgactattatcattcagaaattccaaacacaagaccacatgaaattctggaaaaaccttcccctccacagccaccacctcctccttcggtaccacaaactgtgattccaaagaagactggctcacctgaaattaaactaaaaataaccaaaactatccagaatggcagggaattgtttgagtcttccctttgtggagaccttttaaatgaagtacaggcaagtgagcacacgaaatcaaagcatgaaagcagaaaagaaaagaggaaaaaaagcaacaagcatgactcatcaagatctgaagagcgcaagtcacacaaaatccccaaattagaaccagaggaacaaaatagaccaaatgagagggttgacactgtatcagaaaaaccaagggaagaaccagtactaaaagaggaagccccagttcagccaatactatcttctgttccaacaacggaagtgtccactggtgttaagtttcaggttggcgatcttgtgtggtccaaggtgggaacctatccttggtggccttgtatggtttcaagtgatccccagcttgaggttcatactaaaattaacacaagaggtgcccgagaatatcatgtccagttttttagcaaccagccagagagggcgtgggttcatgaaaaacgggtacgagagtataaaggtcataaacagtatgaagaattactggctgaggcaaccaaacaagccagcaatcactctgagaaacaaaagattcggaaaccccgacctcagagagaacgtgctcagtgggatattggcattgcccatgcagagaaagcattgaaaatgactcgagaagaaagaatagaacagtatacttttatttacattgataaacagcctgaagaggctttatcccaagcaaaaaagagtgttgcctccaaaaccgaagttaaaaaaacccgacgaccaagatctgtgctgaatactcagccagaacagaccaatgcaggggaggtggcctcctcactctcaagtactgaaattcggagacatagccagaggcggcacacaagtgcggaagaggaagagccaccgcctgttaaaatagcctggaaaactgcggcagcaaggaaatccttaccagcttccattacgatgcacaaagggagcctggatttgcagaagtgtaacatgtctccagttgtgaaaattgaacaagtgtttgctcttcagaatgctacaggggatgggaaatttatcgatcaatttgtttattcaacaaagggaattggtaacaaaacagaaataagtgtcagggggcaagacaggcttataatttctacaccaaaccagagaaatgaaaagccaacgcagagtgtatcatctcctgaagcaacatctggttctacaggctcagtagaaaagaagcaacagagaagatcaattagaactcgttctgaatcagagaaatccactgaggttgtgccaaagaagaagatcaaaaaggagcaggttgaaacagttcctcaggctacagtgaagactggattacagaaagggtcggcggaccggggagtgcagggctctgtcagattcagtgacagctccgtctccgcagcgattgaggaaactgtggactgagattcctgtacaatttcatcccagaaactccagacttgtagtctccatgcaagatttctttgtcggcggcttgataaacagtttctttgttttcgattttgatttcgccaatcatcattattggcattttcctgcctggtttcttcttcaagactctgaacaattgctttaacagtcaaatgatttttttttttcggtttgagctggatgggtacagcttaaatcatgggtccagcctaaaaaccaccatttaacttacactgatcaatttcaacatggactgtttttggttttttgtttttaaataaagcatcattaatgcacatctgcaggggtttgccaaacagcccaaactgtatacattacaatcattaaaagttcttattttttttaatattagtgccgttatcatggagaacagcatgacagctgtctttggcagtctgtcatttttctagcattttcagaaactcatcggaaatggcggtacctgtgtttcccttcgaaagcctctcagtacagcactcctgttcctctgttaaaactccttgttaatccagtgatcttttaggccaaggaaatattttgtgatggtgttctgggtccatacaccagcaatgaaggagatagatttgtgtacttgtgttttttaatcagcattaacatgggcaggcaccctcatttatagatgtcaggaaacattcagtgaaaaacttgtagaatgggatgtgataacgaggttccagtaatctgagcagtctaacgaggcccacctcctccaccacagaacgtggctatgttccaagtgctactctcactcagcctgttgcggatcttcatggcctcaggagacttgtttctccatgggctcttctggactgcacacttccaccatagcttgctgggttgatctagatgtctgtttgttgtatggaaattttgggggaaaaaatccaaaacacaaactgtgggttgaaatattaaccgtctccttggttccttggtattcaccgtgcctgatctgcacatttcatcgtggctgtttctgtatagcctatactgcattagcccaagagattgttgctttgtaactttttgcactattgttttggctggatttgtattacacacagttttaaaaaaaacaattccacactattctctgccttttttttcctatttatttcttcccgcacaaattccacatagaggccttcccatccagctctacgtgatttggctgcacttgaacactgattgtccatttacagccctcagcaatgtgccttctaaatggcatgacatatgtagatgtgctgcagcgcttgttaatggtcacaataaatgccacttcaccaaggaagtctcagatgaacaattatgaacatccaaattttattggggggcaataatcaactgaattgcaaaatttgggggaaaatggcactatccgtgtacgaatcgaatacaaatcaaagatttgtcacatccctaataaaaacaagatggagatgtctctgcaaccatatttgtaagcta

SEQ ID NO: 195020 - DNA, 1032 bp, Artificial Sequence
  derived and/or modified sequence
gtagtgctaggaagggctgaggagggaacgacggggagggggcgacctagggatggagcgccagaccccaggaggaatggaaggggaagcgggtggcctgaaagggctcgaggggagtcctgacggaggagcagatggcaaggcccgatgagagaaagggaaagttaaggatgctggagcagaacaatggatttctctttctctttcatgcaagggatcatgggaaacacaattcagcaaccacctcaactcattgactccgccaacatccgtcaggaggatgcctttgataacaacagtgacattgctgaagatggtggccagacaccatatgaagctactttgcagcaaggctttcagtacccagctacaacagaagatcttcctccactcacaaatgggtatccatcatcaatcagtgtgtatgaaactcaaaccaaataccagtcatataatcagtatcctaatgggtcagccaatggctttggtgcagttagaaactttagccccactgactattatcattcagaaattccaaacacaagaccacatgaaattctggaaaaaccttcccctccacagccaccacctcctccttcggtaccacaaactgtgattccaaagaagactggctcacctgaaattaaactaaaaataaccaaaactatccagaatggcagggaattgtttgagtcttccctttgtggagaccttttaaatgaagtacaggcaagtgagcacacgaaatcaaagcatgaaagcagaaaagaaaagaggaaaaaaagcaacaagcatgactcatcaagatctgaagagcgcaagtcacacaaaatccccaaattagaaccagaggaacaaaatagaccaaatgagagggttgacactgtatcagaaaaaccaagggaagaaccagtactaaaagaggaagccccagttcagccaatactatcttctgttccaacaacggaagtgtccactggtgttaagtttcaggttggcgatcttgtgtggtccaaggtgggaacctatcct

SEQ ID NO: 195021 - DNA, 577 bp, Artificial Sequence
  derived and/or modified sequence
cagcacggaggcggaggccgagggggctgtgcacaggtcgccgcggagaggcgtgcgaattccgagccgagcgccgaggaccgtgctacccaggccgggctgccagccgcaggctcctctctggcagcagcggcggcgcggcgacccccgtccctcggcctccccttcccatcccacctcccgagccttcctcttcccgcagcacgcccggcccggcccggccgtggccctcctcagtgccggccgccatggcagaggcgtccggcgcggggaaaatctagcccggggatttcatgcggcctagctcggttccgcctcctcctcgcgcggccccagcggctgcccgcaccccagccccactccgggcctccgtgtctctcctgtgatcgcactgacacggccggggggttagaatggaacaaactgaagggatgctcctgaaactgaagacaaccaagcccgatgagagaaagggaaagttaaggatgctggagcagaacaatggatttctctttctctttcatgcaagggatcatgggaaacacaattcagcaaccacctcaactcattgactccg

SEQ ID NO: 195022 - DNA, 301 bp, Artificial Sequence
  derived and/or modified sequence
ttccttttcctctccgacatcagtatgaatctggaaggggccaattcagactgttagccccctttctttctattcatgaactcttttccccttacgtcttgggtcattttaaattattcataaccgccaaaggaggtagtgatgttttccatcactacctttttgatgcttttctccctctctttaccctcttccttctggttgcaaacaaggcccgatgagagaaagggaaagttaaggatgctggagcagaacaatggatttctctttctctttcatgcaagggatcatgggaaacaca

SEQ ID NO: 195023 - protein, 2997 aa, Artificial Sequence
  derived and/or modified sequence
MADPGMMSLFGEDGNIFSEGLEGLGECGYPENPVNPMGQQMPIDQGFASLQPSLHHPSTNQNQTKLTHFDHYNQYEQQKMHLMDQPNRMMSNTPGNGLASPHSQYHTPPVPQVPHGGSGGGQMGVYPGMQNERHGQSFVDSSSMWGPRAVQVPDQIRAPYQQQQPQPQPPQPAPSGPPAQGHPQHMQQMGSYMARGDFSMQQHGQPQQRMSQFSQGQEGLNQGNPFIATSGPGHLSHVPQQSPSMAPSLRHSVQQFHHHPSTALHGESVAHSPRFSPNPPQQGAVRPQTLNFSSRSQTVPSPTINNSGQYSRYPYSNLNQGLVNNTGMNQNLGLTNNTPMNQSVPRYPNAVGFPSNSGQGLMHQQPIHPSGSLNQMNTQTMHPSQPQGTYASPPPMSPMKAMSNPAGTPPPQVRPGSAGIPMEVGSYPNMPHPQPSHQPPGAMGIGQRNMGPRNMQQSRPFIGMSSAPRELTGHMRPNGCPGVGLGDPQAIQERLIPGQQHPGQQPSFQQLPTCPPLQPHPGLHHQSSPPHPHHQPWAQLHPSPQNTPQKVPVHQHSPSEPFLEKPVPDMTQVSGPNAQLVKSDDYLPSIEQQPQQKKKKKKNNHIVAEDPSKGFGKDDFPGGVDNQELNRNSLDGSQEEKKKKKRSKAKKDPKEPKEPKEKKEPKEPKTPKAPKIPKEPKEKKAKTATPKPKSSKKSSNKKPDSEASALKKKVNKGKTEGSENSDLDKTPPPSPPPEEDEDPGVQKRRSSRQVKRKRYTEDLEFKISDEEADDADAAGRDSPSNTSQSEQQESVDAEGPVVEKIMSSRSVKKQKESGEEVEIEEFYVKYKNFSYLHCQWASIEDLEKDKRIQQKIKRFKAKQGQNKFLSEIEDELFNPDYVEVDRIMDFARSTDDRGEPVTHYLVKWCSLPYEDSTWERRQDIDQAKIEEFEKLMSREPETERVERPPADDWKKSESSREYKNNNKLREYQLEGVNWLLFNWYNMRNCILADEMGLGKTIQSITFLYEIYLKGIHGPFLVIAPLSTIPNWEREFRTWTELNVVVYHGSQASRRTIQLYEMYFKDPQGRVIKGSYKFHAIITTFEMILTDCPELRNIPWRCVVIDEAHRLKNRNCKLLEGLKMMDLEHKVLLTGTPLQNTVEELFSLLHFLEPSRFPSETTFMQEFGDLKTEEQVQKLQAILKPMMLRRLKEDVEKNLAPKEETIIEVELTNIQKKYYRAILEKNFTFLSKGGGQANVPNLLNTMMELRKCCNHPYLINGAEEKILEEFKETHNAESPDFQLQAMIQAAGKLVLIDKLLPKLKAGGHRVLIFSQMVRCLDILEDYLIQRRYPYERIDGRVRGNLRQAAIDRFSKPDSDRFVFLLCTRAGGLGINLTAADTCIIFDSDWNPQNDLQAQARCHRIGQSKSVKIYRLITRNSYEREMFDKASLKLGLDKAVLQSMSGRENATNGVQQLSKKEIEDLLRKGAYGALMDEEDEGSKFCEEDIDQILLRRTHTITIESEGKGSTFAKASFVASGNRTDISLDDPNFWQKWAKKAELDIDALNGRNNLVIDTPRVRKQTRLYSAVKEDELMEFSDLESDSEEKPCAKPRRPQDKSQGYARSECFRVEKNLLVYGWGRWTDILSHGRYKRQLTEQDVETICRTILVYCLNHYKGDENIKSFIWDLITPTADGQTRALVNHSGLSAPVPRGRKGKKVKAQSTQPVVQDADWLASCNPDALFQEDSYKKHLKHHCNKVLLRVRMLYYLRQEVIGDQADKILEGADSSEADVWIPEPFHAEVPADWWDKEADKSLLIGVFKHGYEKYNSMRADPALCFLERVGMPDAKAIAAEQRGTDMLADGGDGGEFDREDEDPEYKPTRTPFKDEIDEFANSPSEDKEESMEIHATGKHSESNAELGQLYWPNTSTLTTRLRRLITAYQRSYKRQQMRQEALMKTDRRRRRPREEVRALEAEREAIISEKRQKWTRREEADFYRVVSTFGVIFDPVKQQFDWNQFRAFARLDKKSDESLEKYFSCFVAMCRRVCRMPVKPDDEPPDLSSIIEPITEERASRTLYRIELLRKIREQVLHHPQLGERLKLCQPSLDLPEWWECGRHDRDLLVGAAKHGVSRTDYHILNDPELSFLDAHKNFAQNRGAGNTSSLNPLAVGFVQTPPVISSAHIQDERVLEQAEGKVEEPENPAAKEKCEGKEEEEETDGSGKESKQECEAEASSVKNELKGVEVGADTGSKSISEKGSEEDEEEKLEDDDKSEESSQPEAGAVSRGKNFDEESNASMSTARDETRDGFYMEDGDPSVAQLLHERTFAFSFWPKDRVMINRLDNICEAVLKGKWPVNRRQMFDFQGLIPGYTPTTVDSPLQKRSFAELSMVGQASISGSEDITTSPQLSKEDALNLSVPRQRRRRRRKIEIEAERAAKRRNLMEMVAQLRESQVVSENGQEKVVDLSKASREATSSTSNFSSLSSKFILPNVSTPVSDAFKTQMELLQAGLSRTPTRHLLNGSLVDGEPPMKRRRGRRKNVEGLDLLFMSHKRTSLSAEDAEVTKAFEEDIETPPTRNIPSPGQLDPDTRIPVINLEDGTRLVGEDAPKNKDLVEWLKLHPTYTVDMPSYVPKNADVLFSSFQKPKQKRHRCRNPNKLDINTLTGEERVPVVNKRNGKKMGGAMAPPMKDLPRWLEENPEFAVAPDWTDIVKQSGFVPESMFDRLLTGPVVRGEGASRRGRRPKSEIARAAAAAAAVASTSGINPLLVNSLFAGMDLTSLQNLQNLQSLQLAGLMGFPPGLATAATAGGDAKNPAAVLPLMLPGMAGLPNVFGLGGLLNNPLSAATGNTTTASSQGEPEDSTSKGEEKGNENEDENKDSEKSTDAVSAADSANGSVGAATAPAGLPSNPLAFNPFLLSTMAPGLFYPSMFLPPGLGGLTLPGFPALAGLQNAVGSSEEKAADKAEGGPFKDGETLEGSDAEESLDKTAESSLLEDEIAQGEELDSLDGGDEIENNENDE

SEQ ID NO: 195024 - DNA, 8994 bp, Artificial Sequence
  derived and/or modified sequence
atggccgaccctggaatgatgtccttgtttggcgaagacgggaacatcttctccgaaggcctcgaaggcttaggggagtgcggctatcctgagaatcccgttaatcctatgggccagcaaatgcctattgaccaggggtttgcctcccttcagcctagcctacaccatccttcaacaaatcagaatcagacgaagcttacccacttcgaccactacaaccaatatgagcaacaaaagatgcaccttatggaccaacctaatcgtatgatgtccaacaccccgggcaatggacttgcgagtccacatagccagtatcacaccccccctgtgccgcaggtgccccatgggggctcaggcggaggacaaatgggcgtgtacccaggtatgcagaacgagagacacgggcagtcatttgtcgatagctctagcatgtggggccctagggcagttcaagtgcccgaccagatccgggcaccatatcaacagcaacaacctcagccccagccgccacagcccgcgccttccggaccaccagcacagggacaccctcagcatatgcagcagatgggatcatatatggcccgcggggacttcagtatgcaacaacacggacagcctcagcaaagaatgtcccaattttcgcagggccaggaagggctcaaccagggaaacccatttatcgccacgagcggccctggccatctgagtcacgtgccccagcaatcaccctctatggctccctctctaaggcattccgtgcagcaattccatcaccacccatcaacagcactgcatggggagtctgtcgcacacagtccccgcttttcacctaatcctcctcaacagggggctgtgagaccacaaacccttaatttttcctctcggtcacaaacggtgccttctcccaccattaacaactcggggcaatactctcgatatccgtattcaaaccttaaccagggtctagtcaacaacactggtatgaaccagaatctgggtctcacaaataacacacctatgaatcagtctgtccctcgctatccgaacgctgtgggctttccttccaattccggtcagggtctcatgcatcaacaacctatccacccgtcagggagcttgaatcagatgaacacacaaacaatgcacccctcccagccccagggcacttacgcctcgcctcctcccatgtcccccatgaaagcgatgtcaaatccggccggcactcccccacctcaggtgagacccggctcagcaggtatccctatggaagtgggttcatatccaaatatgccacatccgcagcccagtcaccaaccccccggcgctatgggtattgggcagcgtaacatggggccaagaaatatgcagcaaagcaggccgttcattgggatgagtagtgcacccagagagctcacaggccatatgagaccaaatggttgtcctggtgtcggactgggggacccccaggcaatccaggagcggctcatccccgggcagcagcaccctgggcagcagcctagctttcagcagctaccaacatgtccaccactgcagccccatcctgggctccaccaccagtcctctcctccacacccacatcatcagccctgggcccagctccatcccagcccccaaaatacccctcaaaaggttcccgtgcatcagcactcgcctagcgaaccgtttctggaaaaacccgtgccagacatgacccaggtatcgggccctaatgcccagttggtaaagtccgacgattacctcccaagtatcgaacagcagcctcagcagaaaaaaaaaaagaagaagaacaaccacattgttgcggaagatcccagtaagggattcgggaaggatgacttccctggcggcgttgacaatcaagagctaaatagaaattcgttagacgggtcacaggaagagaagaagaaaaaaaagagaagcaaggccaagaaggaccccaaggagccaaaagaaccaaaagaaaaaaaggaacccaaagaaccaaaaactccaaaggcccctaagattcctaaagagcctaaagagaaaaaagcaaagaccgccacccccaaacctaaatcgtcaaagaagtcctccaacaaaaagcctgattcggaagcgtctgcgttaaagaaaaaagtgaataaaggtaagacagagggtagcgagaactctgatctggacaaaaccccgcccccctcaccaccccctgaagaagacgaggacccgggtgtgcagaagcgtcgctcgtctcggcaggtgaagagaaagcggtacacggaggatctagaattcaagatcagcgacgaggaggcagatgacgccgatgcagcaggcagagactccccgtcaaacacttcacagagtgaacaacaggaaagtgtggacgcggaaggccccgtggtcgagaagatcatgagttctcgatctgttaaaaaacagaaagagagcggcgaggaagtggaaatcgaggagttttacgttaaatataagaacttttcttacctgcactgccagtgggcctctatagaggaccttgaaaaagataaaagaattcagcaaaagattaagaggttcaaggccaaacagggacagaacaagtttctctcagagatcgaggatgagttattcaaccctgattatgtggaggtcgacagaattatggacttcgcccgatcaacagacgatcgcggagagcctgttacccactatcttgtgaaatggtgcagtctgccatacgaggattccacgtgggagcggagacaagatattgatcaagctaagatagaggagttcgaaaagttgatgtctagagaacccgaaaccgaaagggtggagcgtcctcccgcagatgattggaaaaagtctgagtccagtagagagtataagaataacaataaactgcgcgaataccaactagagggggttaattggcttctgttcaattggtacaacatgagaaactgcatcctggcagatgaaatgggcctggggaaaactatccagagcataactttcctgtacgaaatttaccttaaggggatccatggcccattcttagtgatcgctccccttagcaccatcccaaactgggagagagaatttcgcacctggactgaacttaatgtagttgtgtaccacggcagccaggctagccggcggacgatccagctatatgagatgtattttaaagatcctcagggcagagtcattaagggttcttataagttccacgccattatcaccactttcgaaatgatactcacagactgccccgaactgaggaatattccctggcgctgcgtggtgatcgatgaggctcatagattaaaaaacagaaattgtaaactcctagagggacttaagatgatggatctcgagcacaaggtgctcctgaccggcaccccactgcagaataccgtagaggagctgtttagccttcttcacttcctggaacccagtcgcttcccatccgaaaccacttttatgcaggaatttggagacctgaagaccgaagagcaggtccagaaactccaggccattttgaagccaatgatgctccgaagattgaaagaggacgtagagaaaaaccttgctccaaaagaagagacaatcatcgaagtggagctcaccaacattcagaagaagtactacagagccattttggagaagaactttacattcttgagtaaaggtgggggccaggcgaatgtcccaaacctgctaaacaccatgatggaattgagaaaatgttgtaaccatccatacttgatcaacggagccgaggagaagatccttgaggagttcaaagagacacataatgctgagtctcctgactttcagctgcaagccatgattcaggccgcagggaaattggtcctaatcgacaaactgctccccaagctgaaggcggggggacatagggtactgatctttagccagatggttcggtgcttggatatcctggaggactacctaattcagaggcgctacccttatgagcggattgacggccgcgtgcggggcaacttaaggcaagccgctattgatcgcttctcgaaacccgattccgaccgcttcgtatttctgctgtgcacccgggctggtggcctgggaatcaatctgactgctgccgacacatgtataatcttcgacagcgactggaatccccagaacgacctgcaggcacaggcaagatgtcaccggattggacagagtaagagtgtgaagatctacagactcatcaccaggaatagttatgagcgtgagatgttcgacaaagcctctctgaagctaggactcgataaagccgtgctgcagagcatgagtggaagggagaatgctaccaacggcgtccagcagttgtcgaaaaaggaaatcgaggatctgctgcgaaagggagcttatggtgcgctgatggacgaagaagacgaggggagtaaattctgcgaagaagatattgatcagattctactcagacgcacacacacgataacaattgagtcggaagggaaaggtagcacttttgccaaggcctcatttgtggccagtggcaataggactgatatctccctggacgaccccaatttctggcagaaatgggccaagaaggccgaattggacattgacgctttgaacggacggaacaatctggtgatagacaccccgagggtgcgcaaacagaccaggctatattccgctgttaaagaagatgagctgatggagttttctgatttggagtctgattctgaggaaaagccctgcgctaagccccgaaggcctcaggataagagccagggctacgccaggtctgaatgcttcagagtggaaaaaaacttactggtctacggctggggccggtggactgatatactgagccacggaagatacaagcgccagctaacagaacaggacgtggaaacaatatgtcgcaccatcctggtgtattgcctcaaccactacaagggggacgagaacatcaaatcgtttatttgggacctgatcactcccaccgcagatggccagacaagagcacttgtcaatcactcaggtctgagtgcccccgttcctcggggtcggaagggaaaaaaagtcaaggcacaatccactcagcctgtggtccaggatgctgactggctcgcaagctgtaatccggacgctctgtttcaggaagacagttacaagaaacatctgaaacatcactgcaacaaagttttgttgagagtgcgaatgctctactatctcaggcaagaggtcatcggcgaccaggctgataaaatcttggaaggagctgacagctcagaggccgatgtgtggatcccagagccgttccacgcagaggtgccagctgattggtgggacaaggaggcagacaagagtttgctgattggggtttttaagcatggatatgagaagtataattccatgcgtgccgacccagctctgtgctttctggaaagagtaggtatgcccgatgctaaggccatcgctgcggagcagcgggggacagatatgctggccgacggcggcgacggcggagagtttgatcgagaagatgaagatcctgaatataaacctactaggacgccctttaaagatgaaatagacgaatttgccaattcaccgagcgaggataaggaggagtccatggagatccatgctactggcaagcattctgagagcaatgctgaattgggccaactgtattggccaaatacctctaccctgactacccgactccggcgcctcattacagcctaccagcggagctacaaacgacagcagatgcggcaagaagcacttatgaagactgaccggaggcgtcgcaggccacgcgaagaggttcgagctctggaggctgagcgcgaagccattataagcgaaaaacgccagaagtggactagacgagaggaagcagacttctaccgagtagtgtcaaccttcggagttatattcgatccggtgaagcagcagtttgattggaaccagttccgggcctttgcacgactggataaaaagtcagatgaatccctcgagaaatatttcagttgtttcgtggccatgtgccgccgagtctgtcggatgcccgtgaaaccagacgacgaaccacccgatctgagcagcattatcgagccaattactgaggagcgggcatctcgcaccctctacaggattgagctcctgcggaagatccgcgagcaggtgctgcatcatccgcagctgggtgaaagactaaaactgtgccaacccagtctcgacttacccgaatggtgggagtgtggcagacatgaccgcgacctgttggtcggtgcagctaagcacggtgttagtaggactgattatcatattctgaacgaccctgaactgtcttttctggatgctcataagaattttgcacagaataggggcgcgggaaatacgagctccctgaatccactggccgttgggttcgtccagaccccccccgtgatttccagcgcacatatccaagacgagcgcgttcttgaacaggctgagggtaaagtggaggagcccgagaatccagcagcaaaggagaaatgtgaagggaaggaagaggaggaagagacagatggctcagggaaggagagtaagcaggagtgcgaggctgaggcaagctcagtgaagaacgaactcaaaggggtagaggtgggggcggacaccggttccaagagcattagcgaaaaaggctccgaagaagacgaggaagaaaaactcgaggacgatgacaagtctgaggagtctagtcagccagaagctggggctgtaagccgtgggaaaaacttcgatgaagaaagtaatgcgtccatgtcgacagccagggatgaaacacgtgacgggttctatatggaagatggagatccaagcgttgcacagcttctgcacgagcggaccttcgcttttagcttttggccaaaggaccgtgtcatgattaatcgactggacaatatttgcgaggccgtgctcaagggaaaatggccagtgaatagacgccaaatgttcgatttccaaggccttatccctggatatactcccacaaccgtggattctcctctccagaagcgttctttcgccgagctctcaatggtaggacaggcttctatcagcggcagcgaggatattaccacatctccacagctctctaaagaggatgccctgaatctgagcgttccccgccagaggaggaggcgccgccggaaaattgagatcgaagcggaacgtgccgctaagcgccggaatctcatggagatggtggcgcagttgcgcgaatctcaggtagtgagtgagaacggtcaagaaaaagtggtggacctgtccaaggcctctagagaagcaactagttcaacctctaacttctcttccctgagcagcaaattcattcttcctaacgtgagcacacccgtctccgacgcttttaaaacccaaatggagctcttgcaggccggtctgtcgcggactccaacgcggcatctcctaaatggttctctggtcgatggagagccacctatgaagaggcggcgcgggcgcaggaagaacgtggagggcctggacttattatttatgagtcacaagaggacttccctgagcgcggaagacgcagaggtgacgaaggcttttgaagaggacatcgaaacacccccaactcgaaacatccccagtcccgggcaacttgatcctgacacccggattcccgtcatcaacctagaagacgggaccagactggtgggtgaggatgcccccaagaataaggatttagtggagtggttgaaactgcatcctacctatactgtagacatgccatcatatgtaccaaaaaacgcagacgtattattcagctcctttcagaagcccaagcagaaaaggcatcggtgcagaaatcccaataagcttgatatcaatacactgacaggcgaggaaagggttccagtggtgaataaacgcaacggcaaaaaaatggggggggcaatggctcctcccatgaaggatttgcctagatggttggaggaaaatccagagttcgcagttgctcccgactggacagatattgtcaaacagtccggtttcgtgcctgagagtatgttcgaccgactcctcacagggcccgtggtacgtggtgaaggcgcgagccgtagaggtaggcgacccaagtccgaaatcgctcgcgcagccgctgcggctgctgcagtggcctctactagtggtatcaacccactcctggtcaatagcctattcgcagggatggacttgacatcactgcagaatctgcaaaacctacagagcttgcagctggcgggattgatgggctttccgccaggcctggccaccgccgctacagccggtggtgatgcgaagaatcccgcggccgtgttaccacttatgcttcccggcatggccggactcccaaacgtgttcggcctcgggggacttctgaataaccccctgagtgctgccaccggtaatacaacaactgcatcgagccagggcgagcctgaggactccacttcgaagggtgaggagaaagggaacgagaacgaagacgaaaacaaggacagcgagaagagcactgacgccgtctctgctgctgacagcgctaatgggtccgtaggggcagccacggcccctgccggactgccgagtaaccctttggcattcaatcctttcctgctttccaccatggcaccaggcctgttttatccaagcatgtttctaccaccggggctgggaggactcacgctcccggggtttcccgccctggctggcctgcagaatgccgtcggttcttccgaggagaaggccgcagacaaagctgagggcgggcctttcaaagacggagagacccttgaggggtcagatgcggaagaatccctcgacaaaacggcggagagctccctgctggaggatgaaatagctcagggcgaagaactggactcacttgacggcggagatgagatcgaaaacaacgaaaatgatgagtag

SEQ ID NO: 195025 - DNA, 8994 bp, Artificial Sequence
  derived and/or modified sequence
atggcagatccagggatgatgtcgctttttggtgaagatggcaatatcttttccgaagggctcgagggcttaggagagtgcgggtatcccgagaacccagtgaatcccatgggccagcagatgcctattgatcaggggttcgccagtctgcaacctagccttcatcatccctctactaatcaaaatcagacaaagttgacacattttgaccattacaaccagtatgagcaacagaaaatgcatctgatggatcagccgaacagaatgatgtctaatactccagggaacggtcttgcaagcccccatagccagtatcacacccctcccgtgccacaggtacctcacggtggcagtggcgggggccagatgggggtgtaccccggtatgcagaacgaaagacacgggcagtccttcgtcgattctagctctatgtggggcccccgagccgtgcaggtgcccgaccaaatcagggctccatatcaacagcagcagccccaaccacaaccaccacagcctgcacctagcggacctcctgcccaggggcatccccagcatatgcagcagatgggcagctatatggcaagaggagactttagtatgcagcagcatgggcagcctcagcaacgaatgagtcagttttctcagggccaggagggtcttaaccagggaaatcctttcattgctacctctgggcctgggcacctttcacatgtacctcagcagtcccccagtatggctccctctctccggcactctgtgcagcagttccatcaccatccatcaactgctctccacggcgaaagcgtggcgcacagtccccgattctctcccaatccccctcagcagggggctgtgcggccgcagacgctgaacttcagcagccgatcccaaaccgtgccgagcccaacaattaataattccggccagtactccaggtatccctatagtaatttaaatcaggggctcgtgaataatacagggatgaatcagaatctgggtctgactaacaacacccctatgaaccaaagcgtccctaggtatccgaacgccgtaggatttccatccaacagcggacagggactgatgcatcaacagcccatacatccgtcggggagtctgaaccagatgaatacacaaaccatgcatcccagccagcctcaggggacatacgcctctcccccccccatgtcgcccatgaaagcgatgagcaatcccgccggcacaccccctccgcaggtgagacccggatctgccgggatccccatggaggtcggcagctaccccaatatgccccacccccaaccaagccatcagccaccgggcgcaatgggcattggccaacgcaacatgggcccccgcaatatgcagcaatctaggcctttcatcggcatgagttctgcaccacgagaattgactggccacatgagacccaatggctgtccaggcgtgggtctgggtgatccccaggccatacaagaacgactaattccgggacagcagcaccctggccagcagcctagctttcagcaactccccacgtgcccaccactccagccccaccccgggctgcaccaccaatctagccccccccatcctcaccaccagccatgggcgcaactccacccctctccgcaaaacactccacagaaagtacccgttcaccagcatagcccttcggagcccttcttagaaaaacccgttccagatatgacccaggtatctggacccaatgcccagcttgtgaagtccgacgattaccttccctctatcgaacagcaacctcagcagaagaagaaaaagaagaaaaacaatcatatcgtcgctgaggacccctcaaaaggcttcggcaaggacgatttccccggaggggtggataatcaggagttaaatcggaactccctggatgggagccaggaagagaagaaaaagaagaaacggtcaaaagccaagaaggaccccaaggagcccaaggaacctaaggagaagaaggagccgaaagagccgaaaactcctaaggctccaaaaattcccaaggagcccaaggagaaaaaggcaaaaaccgccacacctaaaccaaagagtagtaaaaaatccagtaacaaaaagcccgactccgaggcgagcgccctcaagaaaaaagtcaacaagggcaaaaccgaggggtcagagaactcagatctcgataagactccccccccctcaccacccccagaagaggatgaggaccccggggtgcagaaacggcgcagtagtcgccaagttaaacggaagcgctacacagaggatctggagttcaaaatctccgatgaggaagctgacgatgccgacgccgctgggagggactccccgtcaaatacgagccaaagcgagcagcaggagtcggtggatgccgaaggcccagtggtggaaaagattatgtcatctagatctgtgaagaagcagaaagagagtggtgaagaagtggagatcgaggaattctatgttaagtataagaacttctcatacctccattgccagtgggcaagcatcgaagatcttgagaaggataaacggattcagcagaagattaaacgctttaaggccaaacaaggccaaaacaaattcctatctgaaattgaagatgagttatttaacccggattacgtggaggtcgacaggatcatggatttcgcccgttcaacagacgatcgcggcgaaccggtcacacattatctggtgaaatggtgtagcctaccatacgaagatagcacttgggagaggaggcaggacatcgatcaggccaaaatcgaagagttcgaaaaactcatgtcgcgggagccagagacagaaagggtggaacggcctcccgctgatgattggaagaaaagcgagtcaagccgagagtacaagaacaataacaagctgagagaatatcagctggagggggtgaactggcttcttttcaactggtataatatgcgaaattgtatacttgctgacgagatgggactggggaaaacgatccagtcaataacgttcctatatgaaatctatctcaaagggatccacggaccatttctcgtaatagccccacttagcacaataccgaactgggagagggaatttcggacgtggactgagctgaacgtcgttgtctatcatggcagccaggccagccgaagaacaatccagctctacgaaatgtattttaaggatcctcagggtagagttattaaggggtcttacaagtttcacgcaatcatcactaccttcgagatgatacttaccgattgtcctgagctgcggaacatcccttggaggtgtgtggtgatagatgaggctcacagactgaagaatcggaactgcaagctgctggagggcctcaagatgatggatctggagcataaagttctgctcacggggacccctcttcagaacacagtggaagagctcttcagcctgttgcactttctggaaccctcaagattcccatctgagaccacattcatgcaagagttcggagacctgaagacagaggagcaagtgcagaaactccaggctatcctgaaacctatgatgcttcggaggttaaaggaggatgtggaaaagaatttagctcctaaagaggaaacgatcattgaagtcgagctgacgaacatccagaaaaagtactaccgcgccatcttagaaaaaaactttacatttctatctaagggaggtggtcaggcaaatgtacccaacctcctcaacacaatgatggagctgcgaaagtgctgcaatcacccttatttgatcaacggggctgaggagaaaatcctggaggaatttaaagaaactcataacgccgaaagccccgattttcagctgcaggcgatgatccaggccgccggcaaactggtgctcatcgacaagctgctgcctaaattaaaagccggcggacacagggtcctcattttcagtcagatggttaggtgtctggacattctcgaagattacctgatccagagacggtacccatatgagcgtatcgacgggagagtcaggggaaatcttaggcaggccgctattgatcggttctctaaacctgactccgatagattcgtgtttctactttgtaccagagctggagggttgggcattaacctcactgctgctgacacatgtattatctttgactccgactggaaccctcagaacgatctgcaagctcaggcaaggtgtcatcgtattggacagtctaagtccgtcaaaatttatcgcctcattacccgcaacagttatgagagggagatgtttgacaaagctagccttaaactgggactggataaggccgtactccagtctatgagcgggcgagaaaacgccacaaatggggtgcagcagctgagcaagaaggagatcgaggatctattacggaagggtgcatacggagccctgatggatgaggaggacgaaggatcaaagttttgcgaagaggacattgatcagattctcctgaggcggactcacacaatcaccatagagtcagagggcaaaggttcaacttttgcaaaagcaagctttgttgcttcagggaacagaaccgatatcagcctggatgacccaaatttttggcagaagtgggctaaaaaagcggaactggacatcgatgccctgaacggaagaaacaatctggtgatcgacaccccccgagtccgaaagcaaactcgattgtacagtgcggttaaagaagatgaacttatggagttcagcgatttggaaagcgatagcgaagagaaaccatgcgctaaaccccgcagaccccaagataagtcacaaggctacgcaaggtccgaatgctttcgcgtcgaaaagaatctcttggtgtacgggtggggtcgatggaccgatatactgtctcacggccggtataaacggcaactgaccgagcaagacgtggagaccatttgtcggactattctcgtgtactgtctgaaccactataagggcgacgagaatattaaaagctttatctgggatttgattactccgactgcggacggccagaccagggccctagttaaccatagtgggctgtccgcacccgtaccacggggacggaaagggaaaaaagtgaaagcgcagtccacccaacctgtggttcaggacgctgattggctggcaagctgtaatcccgatgctctttttcaagaggactcatataagaaacatctgaaacaccactgcaacaaggtgctgcttagggtgcgcatgctttactatttgaggcaggaagtgattggagaccaggctgataagatcctcgagggagcggattcaagtgaagctgacgtctggatccccgaacctttccatgctgaagtccctgccgattggtgggataaagaggcagacaaaagtttgctgatcggcgtttttaagcacggatatgagaagtacaactcgatgcgagccgatcccgccctgtgttttctcgagagggttgggatgccagatgctaaggctattgctgctgagcagcgcgggacagacatgctcgcagatggcggggacgggggggagtttgaccgtgaggacgaggatccagagtataagcctacccgcactcccttcaaggatgagatcgatgaatttgccaattcaccctccgaggacaaagaagaaagcatggaaattcacgccactggcaagcattcagagtctaatgccgaactgggccagctgtattggccgaatacctctacactcaccacccggctgcgacgtctgattacagcataccagagaagctacaagcgacaacagatgcggcaggaggccctgatgaaaaccgacagacggaggcggcgtcctagggaagaagtaagagcactggaagcggagcgcgaggctatcatatccgagaaacgccaaaaatggaccaggagagaagaagctgatttttacagagtagtatcaactttcggggtgatctttgatcccgttaaacaacaattcgattggaaccagtttagggccttcgccagattggacaagaaaagcgacgagagtctggaaaagtacttcagttgctttgtggcaatgtgtaggcgggtttgtcgaatgccagtgaagcccgacgatgagccccctgatctgtcttcaataattgagccgattacagaagagcgcgctagccggacactgtaccgcattgagttgctaaggaaaatcagagaacaggtactgcatcatccgcagctcggggagcgtctgaagctttgccagcccagcctcgacttgcctgagtggtgggagtgcggaagacacgatagagatctcctggttggcgcagcgaagcatggtgtttccagaaccgattaccacatcctcaacgacccagaactgagcttccttgatgcacataaaaacttcgcccagaacaggggagccggtaacactagctctctgaaccccctcgccgttgggtttgtgcaaacgcctccagtcatcagctccgctcacatccaggatgagagagtgctggagcaggctgagggaaaagtcgaggaacccgaaaacccagccgctaaagaaaagtgtgagggaaaagaggaggaagaagaaactgacggctcggggaaggagtcaaagcaagaatgtgaggcagaggcctctagtgtcaagaatgagctcaagggagtggaggtgggcgcagacacaggatcgaaatcaatctctgagaagggtagcgaggaagacgaggaggaaaagctagaagacgacgacaagtccgaggagtcatctcagcccgaagctggcgcagtgagccgtggaaagaacttcgacgaagaatctaacgcgtcaatgagtaccgctagggacgagacccgcgatggcttctatatggaagacggcgatccaagtgtcgcccagttacttcacgagagaacttttgcattttcgttttggccgaaagatcgggttatgattaataggctcgacaacatttgcgaagcggtgctgaaaggcaagtggccggtgaataggaggcagatgttcgactttcaaggtctcatacctggctataccccaaccaccgtcgacagccctctgcagaaaagaagtttcgccgaactgtctatggtgggccaggcttcaatttcgggaagtgaggacattacgaccagtcctcagttgtctaaggaagatgcgctgaacctctcagtgccgagacagagacgacggagacgtcgcaaaatcgagatcgaggccgagcgggccgcaaagagacgtaatttaatggaaatggtggcccagctccgcgagtctcaggtggtgagcgaaaatgggcaggaaaaggttgtggatttatcaaaagctagccgtgaggccacatcttcaacatcgaacttttcctcgctatccagcaagttcattcttcccaatgtcagtacacctgtgtcggatgcttttaaaacccagatggagctgctgcaggccggattgtctcgcactcccactcgccatctcttgaatgggagcctggttgacggggaaccacccatgaagcgaaggaggggaaggcgaaaaaatgtggagggactggacttacttttcatgagtcacaagcggacatcattgtccgcagaggacgccgaggttaccaaggcatttgaagaagacatcgagaccccaccgacaagaaatatcccatcacctggtcagttggacccagataccaggattcccgtgattaatttagaggatggtacccggctggttggggaagacgctcctaagaataaggacctcgtggagtggctcaagttgcacccaacgtacaccgtcgatatgcccagctacgtcccgaaaaacgccgacgtcctcttcagttcctttcagaaacctaagcaaaagagacatcggtgccggaatcccaacaagctggacataaataccttgactggggaggagcgcgtgccagtggtgaacaagagaaacggaaagaaaatgggaggagccatggccccgccaatgaaagacctccccagatggttggaggaaaatcctgagttcgcagtggcccccgactggaccgacatcgttaaacaatcggggttcgtcccagagagcatgttcgaccgattgcttaccggacccgtggttagaggtgaaggcgccagtcggcgcggcagacgacccaagtcagagatcgctagagcagcagccgcagctgcagccgtggcgtccacctccggaataaacccccttttggttaactctctgttcgctggcatggatctgacaagtctgcagaatctgcagaatttgcaatccctccaactcgccggcctgatggggttcccccctgggttggccacggctgcaactgccggtggagacgcaaaaaaccccgcagctgtgctgcctctcatgctgcccgggatggccggcctccctaacgtgttcgggctgggaggacttcttaataatcccctatctgcagccaccggcaacaccaccacagcctcctctcagggcgagcccgaggactctacttccaagggcgaggaaaaggggaacgaaaacgaagacgagaataaagatagcgagaaatccacggatgccgtaagcgctgccgactcagccaatggcagcgtgggcgccgccacggcgccagccggtcttccctctaatccattggccttcaacccattcctcctatccaccatggctcctggcttgttctatccatcaatgttccttcctcccggcttgggggggctaacgttgcccggctttcccgcattagctgggctccagaatgctgtaggatcctccgaagagaaggccgcagataaggcagaagggggaccctttaaggatggagagaccctggaggggagcgatgcagaggagtccctggacaaaaccgctgagagctcactcctggaagacgagatcgcacagggagaagagttagattcattggacggaggagacgagatagagaataacgaaaatgatgagtag

SEQ ID NO: 195026 - DNA, 8994 bp, Artificial Sequence
  derived and/or modified sequence
atggctgaccccggcatgatgagcctgtttggagaagatggcaacatcttcagcgagggcctggagggcctgggggagtgtggctacccagaaaatcctgtgaaccccatgggccagcagatgcccatcgaccagggctttgccagcctgcagcccagcctgcaccaccccagcaccaaccagaaccagaccaagctgacccactttgaccactacaaccagtatgagcagcagaagatgcacctgatggaccagcccaacaggatgatgagcaacaccccaggaaatggcctggccagcccccacagccagtaccacaccccacctgtgccccaggtgccccatggaggcagcggcggcggccagatgggcgtgtacccaggcatgcagaatgaaagacatggccagagctttgtggacagcagctccatgtggggccccagggctgtgcaggtgcctgaccagatccgggccccctaccagcagcagcagccccagccccagcccccccagcctgcccccagcggccccccagcccagggccacccccagcacatgcagcagatgggcagctacatggcccggggggacttctccatgcagcagcacggccagccccagcagaggatgagccagttcagccagggccaggagggcctgaaccagggcaaccccttcatcgccaccagcggccctggccacctgagccacgtgccccagcagagccccagcatggcccccagcctgcggcacagcgtgcagcagttccaccaccaccccagcacagccctgcatggagagagcgtggcccacagcccccgcttcagccccaaccccccccagcagggcgctgtgcggccccagaccctgaacttcagcagccgcagccagacagtgcccagccccaccatcaacaacagcggccagtacagccgctacccctacagcaacctgaaccagggcctggtgaacaacacaggcatgaaccagaacctgggcctgaccaacaacacccccatgaaccagagcgtgccccgctacccaaatgctgtgggcttccccagcaacagcggccagggcctgatgcaccagcagcccatccaccccagcggcagcctgaaccagatgaacacccagaccatgcaccccagccagccccagggcacctacgccagccccccacccatgagccccatgaaggccatgagcaacccagctggcaccccaccaccccaggtgcggcccggcagcgctggcatccccatggaggtgggcagctaccccaacatgccccacccccagcccagccaccagcccccaggggccatgggcatcggccagaggaacatgggccccaggaacatgcagcagagccggcccttcatcggcatgagcagcgccccccgggagctgaccggccacatgaggcccaacggctgccctggggtgggcctgggggacccccaggccatccaggagcggctcatccctggccagcagcaccctggccagcagcccagcttccagcagctgcccacctgcccccccctgcagccccaccctggcctgcaccaccagagcagccccccccacccccaccaccagccctgggcccagctgcaccccagcccccagaacaccccccagaaggtgcctgtgcaccagcacagccccagcgagcccttcctggagaagcctgtgcctgacatgacccaggtgtctggccccaatgcccagctggtgaagagtgatgactacctgcccagcattgagcagcagccccagcagaagaagaagaagaagaagaacaaccacatcgtggccgaggaccccagcaaaggatttgggaaggatgacttccctggaggagtggacaaccaggagctgaacagaaacagcctggatggcagccaggaggagaagaagaagaagaagaggagcaaggccaagaaggaccccaaggagcccaaggagcccaaggagaagaaggagcccaaggagcccaagacccccaaggcccccaagatccccaaggagcccaaggagaagaaggccaagacagccacccccaagcccaagagcagcaagaagagcagcaacaagaagccagattctgaggccagcgccctgaagaagaaggtgaacaagggcaagacagagggctctgaaaattctgacctggacaagaccccaccacccagccccccaccagaagaagatgaagatcctggggtgcagaagaggaggagcagccggcaggtgaagaggaagcgctacacagaggacctggagttcaagatcagtgatgaggaggctgatgatgctgatgctgctggccgggacagccccagcaacaccagccagagcgagcagcaggagagcgtggatgctgagggccctgtggtggagaagatcatgagcagccgctctgtgaagaagcagaaggagagcggggaggaggtggagattgaggagttctacgtgaagtacaagaacttctcctacctgcactgccagtgggccagcattgaggacctggagaaggacaagaggatccagcagaagatcaagcgcttcaaggccaagcagggccagaacaagttcctgtctgaaattgaagatgagctgttcaacccagactatgtggaggtggaccgcatcatggactttgcccggagcacagatgacagaggagagcctgtgacccactacctggtgaagtggtgcagcctgccctatgaggacagcacctgggagcggcggcaggacatcgaccaggccaagattgaggagtttgagaagctgatgagccgggagcctgagacagagcgggtggagcggcccccagcagatgactggaagaagtctgagagcagccgggagtacaagaacaacaacaagctgcgggagtaccagctggagggcgtgaactggctgctcttcaactggtacaacatgaggaactgcatcctggctgatgagatgggcctgggcaagaccatccagagcatcaccttcctgtatgagatctacctgaagggcatccacggccccttcctggtgattgcccccctgagcaccatccccaactgggagcgggagttccgcacctggacagagctgaatgtggtggtgtaccacggcagccaggccagcaggaggaccatccagctgtatgagatgtacttcaaggacccccagggccgggtcatcaagggcagctacaagttccacgccatcatcaccacctttgagatgatcctgacagactgcccagagctgaggaacatcccctggaggtgtgtggtgattgatgaggcccaccggctgaagaacagaaactgcaagctgctggagggcctgaagatgatggacctggagcacaaggtgctgctgaccggcacccccctgcagaacacagtggaggagctgttcagcctgctgcacttcctggagcccagccgcttccccagcgagaccaccttcatgcaggagtttggagacctgaagacagaggagcaggtgcagaagctgcaggccatcctgaagcccatgatgctgcggcggctgaaggaggatgtggagaagaacctggcccccaaggaggagaccatcatcgaggtggagctgaccaacatccagaagaagtactaccgggccatcctggagaagaacttcaccttcctgagcaaaggaggcggccaggccaacgtgcccaacctgctgaacaccatgatggagctgaggaagtgctgcaaccacccctacctgatcaatggagctgaggagaagatcctggaggagttcaaggagacccacaatgctgagagcccagacttccagctgcaggccatgatccaggccgccggcaagctggtgctgattgacaagctgctgcccaagctgaaggccggcggccaccgggtgctgatcttcagccagatggtgcgctgcctggacatcctggaggactacctgatccagaggcgctacccctatgaaagaattgatggccgggtgcggggcaacctgcggcaggccgccatcgaccgcttcagcaagccagacagcgacagatttgtgttcctgctgtgcacccgggccggcggcctgggcatcaacctgacagctgctgacacctgcatcatctttgacagcgactggaacccccagaatgacctgcaggcccaggcccgctgccacagaattggccagagcaagtctgtgaagatctaccgcctcatcaccagaaattcctatgaaagagagatgtttgacaaggccagcctgaagctgggcctggacaaggctgtgctgcagagcatgagcggccgggagaatgccaccaacggggtgcagcagctgagcaagaaggagattgaggacctgctgaggaagggggcctatggagccctgatggatgaggaggatgagggcagcaagttctgtgaagaagatattgaccagatcctgctgcggaggacccacaccatcaccatcgagagcgagggcaagggcagcacctttgccaaggccagctttgtggccagcggcaacagaacagacatcagcctggatgaccccaacttctggcagaagtgggccaagaaggccgagctggacattgatgccctgaatggaagaaacaacctggtgattgacaccccccgggtgaggaagcagacccggctgtacagcgctgtgaaggaggatgagctgatggagttcagtgacctggagagtgacagcgaggagaagccctgtgccaagccccggcggccccaggacaagagccagggctacgcccggtctgagtgcttccgggtggagaagaacctgctggtgtatggctggggccgctggacagacatcctgagccacggccgctacaagaggcagctgacagagcaggatgtggagaccatctgcaggaccatcctggtgtactgcctgaaccactacaagggagatgagaacatcaagagcttcatctgggacctgatcacccccacagcagatggccagacccgggccctggtgaaccacagcggcctgagcgcccctgtgccccggggcaggaagggcaagaaggtgaaggcccagagcacccagcctgtggtgcaggatgctgactggctggccagctgcaacccagatgccctcttccaggaggacagctacaagaagcacctgaagcaccactgcaacaaggtgctgctgcgggtgaggatgctgtactacctgcggcaggaggtgattggagaccaggccgacaagatcctggagggcgctgacagcagcgaggctgatgtgtggatccctgagcccttccacgccgaggtgcctgctgactggtgggacaaggaggccgacaagagcctgctgattggagtcttcaagcacggctatgagaagtacaacagcatgagagctgaccctgccctgtgcttcctggagcgggtgggcatgccagatgccaaggccatcgctgctgagcagaggggcacagacatgctggctgatggaggagatggaggagaatttgacagagaagatgaagatcctgagtacaagcccaccaggacccccttcaaggatgaaattgatgaatttgccaacagccccagcgaggacaaggaggagagcatggagatccacgccaccgggaagcacagcgagagcaatgctgagctgggccagctgtactggcccaacaccagcaccctgaccacccggctgcggcggctcatcacagcctaccagaggagctacaagaggcagcagatgaggcaggaggccctgatgaagacagacagaagaagaagaagaccccgggaggaggtgcgggccctggaggccgagcgggaggccatcatcagcgagaagaggcagaagtggacccggcgggaggaggccgacttctacagagtggtgtccacctttggagtcatctttgatcctgtgaagcagcagtttgactggaaccagttccgggcctttgcccggctggacaagaagagtgatgagagcctggagaagtacttcagctgctttgtggccatgtgcagaagagtgtgcaggatgcctgtgaagccagatgatgagcccccagacctgagcagcatcatcgagcccatcacagaggagcgggccagcaggaccctgtaccgcatcgagctgctgaggaagatccgggagcaggtgctgcaccacccccagctgggggagcggctgaagctgtgccagcccagcctggacctgcctgagtggtgggagtgtggcagacatgaccgggacctgctggtgggcgccgccaagcatggagtgtccaggacagactaccacatcctgaatgaccctgagctgtccttcctggatgcccacaagaactttgcccagaacagaggagctggcaacaccagcagcctgaaccccctggccgtgggctttgtgcagaccccacctgtgatcagcagcgcccacatccaggatgagcgggtgctggagcaggccgagggcaaggtggaggagccagaaaatcctgctgccaaggagaagtgtgagggcaaggaggaggaggaggagacagatggcagcggcaaggagagcaagcaggagtgtgaggccgaggccagctctgtgaagaatgagctgaagggcgtggaggtgggcgctgacaccggcagcaagagcatcagcgagaagggctctgaagaagatgaggaggagaagctggaggatgatgacaagtctgaggagagcagccagcctgaggccggggctgtgtcccggggcaagaactttgatgaggagagcaatgcctccatgagcacagccagagatgagaccagagatggcttctacatggaggatggagaccccagcgtggcccagctgctgcacgagaggacctttgccttctccttctggcccaaggacagagtgatgatcaaccggctggacaacatctgtgaggccgtgctgaagggcaagtggcctgtgaacagacggcagatgtttgacttccagggcctcatccctggctacacccccaccaccgtggacagccccctgcagaagaggagctttgctgagctgtccatggtgggccaggccagcatcagcggcagcgaggacatcaccaccagcccccagctgagcaaagaagatgccctgaacctgtctgtgccccggcagaggagaagaagaagaaggaagattgaaattgaagctgagcgggccgccaagagaagaaacctgatggagatggtggcccagctgcgggagagccaggtggtgtctgaaaatggccaggagaaggtggtggacctgagcaaggccagccgggaggccaccagcagcaccagcaacttcagcagcctgagcagcaagttcatcctgcccaacgtgtccacccctgtgtctgatgccttcaagacccagatggagctgctgcaggccggcctgagcaggacccccaccaggcacctgctgaatggcagcctggtggatggagagccccccatgaagagaagaagaggaagaaggaagaatgtggagggcctggacctgctcttcatgagccacaagaggaccagcctgtctgcagaagatgctgaggtgaccaaggcctttgaagaagatattgagaccccacccaccaggaacatccccagccctggccagctggaccctgacacccgcatccctgtgatcaacctggaggatggcacccggctggtgggagaagatgcccccaagaacaaggacctggtggagtggctgaagctgcaccccacctacacagtggacatgcccagctatgtgcccaagaatgctgatgtgctcttcagcagcttccagaagcccaagcagaagaggcaccgctgcaggaaccccaacaagctggacatcaacaccctgaccggggaggagcgggtgcctgtggtgaacaagagaaatggcaagaagatgggcggggccatggccccacccatgaaggacctgccccgctggctggaggagaaccctgagtttgctgtggccccagactggacagacatcgtgaagcagagcggctttgtgcctgagagcatgtttgaccggctgctgactggacctgtggtgcggggggagggcgccagccggcggggcagaagacccaagtcagaaattgcccgggctgctgctgctgctgctgctgtggccagcaccagcggcatcaaccccctgctggtgaacagcctgtttgctggcatggacctgaccagcctgcagaacctgcagaacctgcagagcctgcagctggccggcctgatgggcttccccccaggcctggccacagctgccacagctggaggagatgccaagaacccagctgctgtgctgcccctgatgctgcccggcatggccggcctgcccaacgtgtttggcctgggcggcctgctgaacaaccccctgtctgctgccaccggcaacaccaccacagccagcagccagggcgagcctgaggacagcaccagcaagggggaggagaagggaaatgaaaatgaagatgagaacaaggacagcgagaagagcacagatgctgtgtctgctgctgacagcgccaatggatctgtgggcgccgccacagccccagctggcctgcccagcaaccccctggccttcaaccccttcctgctgagcaccatggcccctggcctcttctaccccagcatgttcctgcccccaggcctgggcggcctgaccctgcccggcttccctgccctggccggcctgcagaatgctgtgggcagcagcgaggagaaggctgctgacaaggccgagggcggccccttcaaggatggagagaccctggagggcagtgatgctgaggagagcctggacaagacagctgagagcagcctgctggaggatgaaattgcccagggcgaggagctggacagcctggatggaggagatgaaattgaaaataatgaaaatgatgaatag

SEQ ID NO: 195027 - DNA, 8994 bp, Artificial Sequence
  derived and/or modified sequence
atggccgaccccggcatgatgagcctgttcggcgaggacggcaacatcttctctgaagggcttgagggtctgggcgagtgcggatatccagagaaccctgttaacccaatgggtcaacagatgcccattgatcagggattcgcctccttgcagccctcattacaccacccttcaacgaaccagaatcagactaagctgacgcactttgaccattacaaccagtacgagcagcagaagatgcacctcatggatcagccaaacagaatgatgtcgaacacaccagggaatggtctagccagcccccattctcagtaccacacccctccagtgccacaggtgcctcacggggggagcggcggaggccagatgggcgtctaccctgggatgcagaatgagagacacggacagtcctttgtggactcctcatctatgtgggggccacgggctgtacaggtgccggaccagattagggctccctaccagcaacagcagccccagccgcagccgccccagcctgctccgtccggcccaccagcccagggccatccccagcacatgcagcaaatgggaagctacatggccagaggggatttttcaatgcagcaacacggtcagccacagcaacggatgagccagttcagccagggccaggagggactgaaccagggcaacccttttatagctaccagtggcccgggccacctcagtcacgtcccacaacagtcaccatccatggcgccatcactacggcactcagtgcagcagtttcaccatcatccttccactgctctccatggagagagcgtcgcccatagccctagatttagtcctaaccctccacagcaaggagcagtcaggccgcagacattgaacttctcttcccgaagccaaaccgtaccatctcccacgattaataacagtggccagtactcccgctatccttattcgaatctgaaccagggcctggtcaacaatactggtatgaatcagaatcttgggctcactaataacacccccatgaaccagtccgtgcctcgatatcctaatgcagtcgggttccctagtaattcgggacaggggctgatgcaccagcagccaatccacccgtctggatccctgaaccaaatgaatacacagaccatgcatcccagccagcctcagggaacttacgcatcaccccctcccatgtctccgatgaaagcgatgtcaaaccctgccggcactccaccacctcaagtgagacctgggagcgcagggatcccaatggaggtgggttcttaccctaacatgcctcacccacagccttcccatcagcctcctggggcgatgggcattggacagaggaacatgggcccacggaatatgcaacaatctcgcccatttatagggatgagcagcgcccctagagagctgacaggtcacatgaggccaaatggctgcccaggtgtcgggctcggagatccacaggccatacaggaacgcctgatccccgggcagcagcaccctggccagcagccatcctttcagcagttgccaacctgcccccctctgcagccccatccaggcctgcaccaccaaagctccccgcctcaccctcaccaccagccatgggcccagctacatcccagcccacagaacactccgcagaaggttccggtgcaccaacactcaccttccgaaccattcttggagaagccagtcccagacatgacacaggtgtcgggccccaacgctcagcttgtgaagagtgatgattacttgccatcaatcgagcagcagccccagcagaagaagaaaaagaagaagaacaaccacatcgttgcagaggatccaagcaaagggttcggaaaggacgactttcccggaggagttgacaatcaggagctgaacaggaactctctcgacggttcccaggaggaaaagaagaaaaaaaagaggagtaaggccaaaaaagatccgaaggagcccaaagagccgaaggaaaagaaagagccaaaagaacctaagacacctaaggcccctaagatcccaaaagagccaaaggaaaaaaaagccaaaacagcaacgcccaaacccaagtcgtcaaaaaaaagttcaaataaaaagcccgattcagaggccagcgcactcaagaaaaaagtgaataaggggaaaactgaagggtccgagaactccgacctggacaagacccctccaccaagtccaccacccgaggaagatgaagatcccggtgttcagaaacgccgctcaagccgtcaggtgaaacgtaagcggtacacagaggacctcgagtttaagatttccgacgaggaagcggatgacgctgatgccgcggggagagatagcccaagcaacacatcccagtctgaacagcaggaatcagttgacgccgagggaccagtggtcgagaaaattatgtcctctcggagcgtgaagaagcaaaaagagagcggtgaggaggtcgaaatcgaggaattttatgtcaaatataaaaacttctcatacttgcactgccagtgggccagcatcgaagatctggagaaggataaaagaatacagcagaaaattaagaggtttaaggcaaagcagggacagaataagttcctgtccgagatcgaggatgagctttttaaccctgactacgttgaggtagataggatcatggatttcgccagaagcaccgatgaccggggtgaacctgtgacccactatctggtaaagtggtgttcactgccctacgaagattctacatgggaacggcggcaagatattgaccaggccaagattgaagagttcgagaaactgatgtctcgcgaaccagaaaccgaacgggttgagaggccaccggccgacgactggaagaaaagcgaaagctctagagagtacaaaaacaacaataaactgcgcgagtatcagctggaaggcgtaaactggcttctgtttaactggtataatatgcggaactgcatcctggccgatgaaatgggcctgggcaaaactattcagtccattacctttctctatgagatctacctcaaggggatacatggaccattcctagttattgcaccactttcaaccattcctaactgggagagggagttcagaacatggacagagctcaacgtggttgtctaccatggatctcaggcttcaagaagaactatccaactgtacgagatgtactttaaggacccacagggtagggttattaaaggttcatacaagttccacgcgattatcactacttttgagatgattttgacagactgccctgagctgaggaacatcccttggcgctgcgtcgtaatcgacgaggctcatagactgaaaaatagaaactgcaagttactcgagggactgaagatgatggacttggaacacaaggtattgctcaccggcacaccgctccaaaacacagttgaagaactgttctccctgctccacttcctggagcctagcagatttccttctgaaaccacattcatgcaggagtttggagatcttaagacagaagagcaagttcaaaagctgcaggccatcttaaagcctatgatgctgcgacggctgaaggaagatgtggagaaaaacctggcaccaaaggaagaaactataatcgaagtggaattgacgaacattcagaaaaagtattatcgggcgattctggaaaaaaattttacttttctatctaagggaggtgggcaggccaacgtgcctaaccttcttaacacgatgatggaactgaggaaatgctgcaatcatccttacctgattaatggggccgaagaaaaaatcctcgaggagttcaaggaaacccacaacgccgagtccccggatttccagttgcaagccatgattcaggctgcaggaaagctggtcctgatagataagctcctgccgaaactaaaggccggcggccatcgagtccttatcttttcacaaatggttcgttgcctagatattttggaagattatctgatccagaggcgctatccatatgagaggatcgacggacgggtaaggggaaacttgcggcaggccgctattgatagattttctaaacccgatagcgacagattcgtgtttctgctatgcaccagggccggaggcctgggaatcaacctcacagctgcagatacctgcatcatatttgacagtgactggaaccctcagaacgatctgcaggcacaggccagatgccacagaataggccagagtaaaagcgtcaaaatttatcggctcattaccaggaatagctatgaacgagagatgtttgacaaggcttcactaaagctcggattagataaagctgtgctgcagagcatgtcaggccgggagaacgccactaacggagtccagcagttgagcaagaaggaaatagaggacttgttacgcaagggcgcctacggtgcattgatggacgaagaggatgaaggttctaaattctgcgaggaggacattgatcagatactgctccgtagaacccacaccataacaatcgaaagtgaaggtaaggggtcaaccttcgccaaagcctcattcgtggccagtggtaataggactgatattagcctggatgacccaaacttttggcagaagtgggctaagaaggcggaactcgatatagatgccctcaacggtcgcaacaatttggtgatagatacaccgcgggtccggaagcaaactcgtctgtacagtgccgtgaaggaagatgaactgatggagttttcagacctggaatccgattccgaggagaagccctgcgcaaaaccaagacggccacaagacaagtctcagggctatgctcgctctgagtgtttccgggttgagaagaacctcctcgtttatggctgggggcgatggaccgatatactgtcccacgggagatataagcgccagctgacagaacaggatgtggagaccatctgtcgaaccattttagtgtactgtctgaatcactacaagggagatgagaacataaagagctttatctgggatttgatcactcctaccgcagacggccagacccgcgctcttgtcaatcactccggcttgagtgctcctgtgccaaggggtaggaaaggcaagaaggtgaaagcacagtccacgcaaccagtggtacaggatgccgactggttggcaagttgtaatcccgatgccctgttccaggaagactcttacaaaaaacaccttaagcaccactgtaacaaggtgttgctcagagtgaggatgttatactatttacgccaggaagtcatcggagatcaggcagacaaaatcttagagggggctgattctagcgaggcggacgtttggattcctgagcctttccacgccgaagtgcctgcggactggtgggataaggaagctgataagagtctactgattggagtgttcaaacatggttatgaaaaatacaattctatgagggctgatccagctctctgcttcctggaacgcgtggggatgcccgatgcaaaggctatagccgcagaacagcgcggcacggatatgctagccgacggaggggacggtggagaattcgatagggaggatgaagatcctgaatacaaacccacacgtaccccatttaaggacgagatagatgagtttgccaacagcccaagcgaggataaggaggagtccatggaaattcacgccaccggaaagcacagcgagtcgaacgctgaactcgggcagctgtactggccgaatacatcaaccctcacgacaagactcagacgcctgatcactgcctatcagagaagttataaacggcagcagatgcgacaggaggctctaatgaagactgacagaaggcggaggaggccgcgggaggaggtacgggcattggaggctgaacgcgaggctatcatttctgagaagcgacagaagtggactagacgcgaggaggccgatttctaccgggtcgtgtccacttttggagtgattttcgatcccgtgaagcagcaatttgattggaatcagtttagggctttcgctcggctggataagaaatccgacgagagtctggaaaagtatttctcatgttttgtagccatgtgtagacgggtctgtcgcatgccagtaaagcctgacgatgaacctcctgacctctcgagtattatagaaccgatcactgaagagagagctagtcgcaccttgtaccggatcgaactgctcaggaagatccgggagcaggttctccatcaccctcagctgggtgaacgcttaaagctctgccaaccgagtcttgacctccccgagtggtgggagtgtggccgccacgacagagatctgttggtcggagcagccaaacacggcgtctctcggaccgattaccacattctgaatgatcctgagctgagcttcctcgacgctcacaagaatttcgcccagaatagaggagctgggaataccagcagcctcaatccactggctgtggggttcgttcagacacctcccgtgatctcctccgcacacattcaggatgagcgcgtcctggaacaggcggaggggaaggtggaggaacctgagaacccagccgccaaagagaaatgcgaagggaaggaagaggaagaggagacggacggcagtggaaaggagtccaaacaggagtgcgaagcagaggcgtcttcagtgaagaatgagctgaagggcgttgaggtgggcgctgatacaggtagcaagtccatcagtgagaagggatccgaggaagatgaggaggaaaagctcgaagacgatgacaaatcggaggagtcttcacagccggaggcaggagccgtttcccgggggaagaactttgatgaggaatcaaacgcaagtatgtccaccgccagagacgagactagggatggtttttacatggaggacggggacccctccgtcgcacagctgctgcacgaaaggacttttgctttttcgttctggcctaaggatagagtgatgattaaccgactggacaatatctgcgaagctgtcctaaaaggaaaatggcccgtgaataggcgacagatgtttgattttcagggactgattcctggatataccccaacgacagttgattcccccctgcagaagaggagttttgcagagctttctatggttggtcaggcatccatctccggaagcgaagatataactaccagcccacaactgtcaaaggaggacgcattgaatcttagtgtcccccgtcagcggagaaggcgtagacgcaaaatcgaaatagaggctgaacgcgccgcaaaaagacgtaatctgatggaaatggtagctcagctaagggaatcacaggtcgtcagcgagaatggtcaagaaaaagtagtcgacttgagcaaagcttcacgagaggccacttcatctacctctaacttcagctccctctccagtaagttcattcttcctaatgtctctacccccgttagcgatgcttttaaaacacagatggagctcctgcaagcaggactctcccggactccaactcgccacctcttgaacgggagtctcgtggacggggagccgcctatgaagcgccgcagggggcggcggaagaatgtggaaggcctggacctgctattcatgagccacaaacgcacttctttgtcggccgaggacgccgaagtgacgaaagcatttgaagaggacatcgaaacgccacccacacgtaatatccctagccctggacagttagatcccgacacaaggatcccagtcatcaatttggaggacggcactaggcttgtgggagaggatgcccctaagaacaaggacctcgtcgagtggctgaagctgcaccctacttacactgtggacatgccttcctacgtcccaaaaaacgcagacgtgctgttttcttcctttcaaaagcctaagcagaaacggcaccgatgccggaacccaaacaagttagacattaacactctcacaggagaagagcgagtccccgtggtaaataagagaaatggtaagaaaatgggcggcgccatggcaccccccatgaaggacttaccacgctggcttgaagagaatccggaattcgccgtggcccccgactggacagatattgtgaagcagagcggttttgttccggaaagtatgtttgaccggttactaaccggaccagttgttcggggtgaaggagcaagccgcagggggcggcgccctaagtcggaaatcgcgcgggccgccgccgctgcagcagcggtggccagtaccagcggcatcaatccacttctcgtgaactcactgtttgctgggatggatctaactagtctgcagaatctgcagaatttgcagtccctgcaactagctggccttatggggttcccccccggcctggctacggccgccaccgccgggggtgatgcaaaaaatcctgccgccgtgctgccgctgatgttgcctggcatggcgggtctaccgaacgtctttggactggggggtcttctgaacaaccccctgtctgctgctaccggcaacacgactactgcaagcagtcagggcgaacccgaggacagcaccagcaaaggcgaagagaagggtaacgaaaacgaggacgagaataaagacagcgaaaaatccacagacgccgtttctgctgccgactcagccaatggttcggtaggcgccgcaacggcacctgccggcctacctagcaacccacttgcgttcaatcccttcctgctcagcactatggccccaggcctgttctatccctctatgttcctcccacccggtctgggaggactgaccctccctggcttccctgctttagcgggactgcagaatgcagtgggctcctctgaggagaaggctgccgacaaagctgagggaggtcctttcaaggacggggaaacactcgaggggtctgacgctgaggagagcttggataagaccgctgaaagctctttgctagaagatgaaattgcacaaggagaggagttggatagtctggacggcggggacgaaatcgagaataacgaaaacgacgaatag

SEQ ID NO: 195028 - DNA, 8994 bp, Artificial Sequence
  derived and/or modified sequence
atggccgaccccggcatgatgagcctgttcggcgaggacggcaacattttttctgaaggtcttgaaggccttggcgagtgcggataccccgagaaccctgtgaatcccatgggtcaacagatgcccatcgatcagggctttgcttccctgcaaccgtccctacatcacccgtccacgaaccagaaccagaccaagctcactcatttcgaccactacaaccagtatgaacagcaaaaaatgcatctaatggaccagccgaatcggatgatgtccaacacacctggcaatggcctggcaagtcctcatagccaataccacaccccccctgtaccccaggtccctcacggcgggagcggcggagggcagatgggggtttatccagggatgcagaacgagcggcatgggcagagttttgtggattcttccagtatgtggggcccccgcgctgtgcaggtaccggatcagatcagggccccataccaacaacagcagccccagccccaaccgccacagcctgctccgagcggcccacctgcacagggccatcctcaacatatgcagcagatgggttcgtatatggcccgaggtgacttctccatgcaacagcacgggcagcctcaacaacgaatgtcccagtttagccagggacaagaaggcctgaaccagggaaatcccttcatcgcaacgtctgggccagggcatttgtcacacgtccctcaacaaagcccatctatggctcctagtttaaggcactcagtccagcaattccaccatcatccgtccaccgcccttcatggagagagtgtcgctcattccccgcggttcagtccaaacccgccacaacagggggcagtacggccacagaccctgaatttttccagccggtctcagactgtgccgtccccaacgattaataactctggccagtactctcgctacccttactccaatctcaatcaaggcctggtgaacaacacagggatgaaccagaaccttgggctaaccaataatacccctatgaatcaaagtgtcccccgctacccgaatgcagtaggcttccccagtaactctggccagggcttgatgcaccaacagccaatacatccttcaggctctttgaaccagatgaacactcagacaatgcatccctctcagccacaaggaacttatgcctcgcccccacctatgtccccaatgaaagctatgtccaaccccgctggcaccccgccaccacaggtccgccccgggtccgccggtatccctatggaggtgggcagttacccaaatatgcctcacccccaaccctcacatcagccacctggcgcgatgggcatcgggcaaaggaatatgggcccccgtaatatgcagcagtcgagacccttcattgggatgagttctgctcccagggagctgaccggccacatgcgacctaacggttgccctggggtcggtttaggcgatccgcaggcaattcaggagagactcattcccggccaacagcaccccggccagcagccttccttccagcagcttccaacatgtccccccctccagccgcaccccggactccatcaccagtcatctcccccacatccccaccatcagccttgggctcagttgcacccttcacctcagaacaccccgcagaaggtccccgtgcatcagcattccccctctgaaccttttctggaaaaaccagtacccgacatgacacaggtctcagggcccaacgcccaactggtgaagagcgatgactatttaccttctatcgagcaacagcctcaacagaagaaaaagaaaaagaagaacaaccacattgtggccgaagatccctccaagggatttgggaaagatgattttccaggaggtgtggataaccaggaacttaacagaaacagtcttgacggctcgcaagaggagaagaagaagaagaaacgcagcaaagctaaaaaggaccccaaggaacctaaagagccaaaggagaaaaaagagccaaaggagcctaagacacctaaggcccctaagataccaaaggaacctaaagagaagaaggcaaaaaccgccaccccgaagccaaagtcttcaaagaaatcttccaataagaagcctgacagcgaggcctccgccttgaagaagaaggtgaacaagggcaaaaccgaggggtctgaaaactctgacctcgacaagactcccccccccagcccaccccccgaagaagatgaagacccaggagtgcagaagagacggagcagccgccaggttaaacgcaagagatacaccgaggacctggaatttaaaatctctgatgaagaggcggatgacgcagacgctgccggacgcgatagtccatccaacacctcacaaagcgagcagcaagagtcggtcgacgcggagggcccagtggtggaaaaaattatgtcatcacgctccgtcaagaagcagaaggaatccggggaggaagttgagattgaagagttttacgtaaaatataagaacttcagctacctgcactgccagtgggcatcaatcgaagatctggagaaggacaagcgcattcagcagaaaatcaagaggttcaaagccaaacagggtcaaaacaagtttctatccgaaattgaggatgagctgttcaaccctgattacgttgaggtggataggattatggacttcgccagatccactgacgatagaggggaacccgtcacccactacctggtgaaatggtgtagcctgccgtacgaggacagcacatgggaacggcgtcaggacatcgatcaggcaaagatcgaggagttcgagaaacttatgtctagggagccagagacagaaagagtggaaaggcctcctgccgacgattggaagaaatctgagtccagcagggagtacaaaaacaacaacaaactgagagagtatcagttagagggggtgaactggctgctgtttaactggtacaacatgaggaattgcatcttggctgatgagatgggccttggaaaaaccatccaaagtataacgttcttatatgagatctacttgaagggcatccatggcccttttctcgtgatcgccccactgtctactattcctaactgggagcgggagtttcgcacttggaccgaactgaacgtggtggtttatcacgggtcacaagccagtcggagaacgatccaactatatgagatgtactttaaagatccacaggggcgcgtgatcaagggcagctacaagtttcacgcaattattacaacatttgagatgatcctcactgattgcccagagctgcgaaatatcccctggcgttgcgtcgtgatcgatgaagcccaccggctcaagaatcgtaattgtaaactcctggagggcctgaaaatgatggatctcgagcacaaggtgctcctcacgggcaccccacttcagaacactgtcgaggaactgttctcactgttgcacttcctcgaaccctctaggtttccgtcagagacaacattcatgcaagagtttggcgatctgaagaccgaggagcaggtgcagaagctgcaggccattctgaagccgatgatgctgcggcgattgaaagaggacgtggaaaaaaatctggctccaaaggaagaaacgattattgaggtggagcttactaacatccagaaaaagtattaccgtgcgattctagagaaaaacttcactttcctcagtaagggcggagggcaggctaacgttccaaatctgctgaatacaatgatggagctaagaaagtgctgcaatcatccgtacctcattaacggagccgaggaaaagatactagaggagtttaaagagacccacaatgccgagtcgcctgacttccagcttcaagccatgatccaggctgctggtaagctggtgctgattgataaactgctccctaagttaaaagctggcggacatcgcgtcttaatcttttctcagatggtgcgctgtctggacatcctcgaggattacctaatccagcgccgctacccttatgaacgcatcgacggccgtgtcaggggtaacctgcgccaggctgcaattgacaggttttctaagcccgatagcgaccgcttcgtgttcctgctgtgcaccagggcaggtggcctgggtataaatctcactgcagccgatacctgtattattttcgactctgactggaatccccaaaatgatctgcaggctcaagcccgctgccataggatcgggcagagcaaatctgttaaaatctataggttgataacccgcaacagctacgaaagagagatgttcgacaaggcttctctgaaactgggactggataaagccgtcctccagtccatgtcaggccgcgaaaacgcaaccaatggcgtgcagcagttgtctaaaaaggaaatcgaagatctcttaaggaagggtgcttacggtgcgcttatggacgaagaagacgagggctctaagttctgtgaggaggatatcgaccagatcttgctgaggcgcacacacacaatcaccatcgagtccgaggggaagggttctacctttgccaaggcgagctttgttgcatctggtaacaggaccgatatttccttggatgatcccaatttttggcagaagtgggctaagaaagcagagctggacatagatgctctgaatggccgaaacaatttggtcatagatactcctagagtgagaaagcagactcggctctacagcgccgtgaaagaggatgaactgatggagttctccgacctcgagagtgacagcgaggagaaaccgtgcgccaaacctcgccgcccacaggacaaaagccaagggtatgcgcgaagcgaatgctttagagtcgagaagaatcttctcgtgtacggttgggggcgctggactgatattctgtcccacgggaggtacaagcgacagctgactgagcaggatgtcgagactatctgtcgtaccatcttagtctactgcctaaatcattacaagggcgatgagaacatcaagtctttcatttgggacctgattacacctactgctgacggccagactcgcgccctggttaatcatagcggcctgtccgcccctgtgccaaggggcaggaagggaaaaaaggtaaaagctcaatcaacgcagccagtggtgcaggatgcggattggcttgccagctgtaacccggacgcgttgttccaagaggactcttataaaaagcacctcaaacaccactgtaataaggtcctgttgcgcgttcggatgctgtactatctcagacaggaggtgattggagaccaggccgataagattctggaaggggctgactcctccgaagcagatgtctggattccagaaccctttcacgctgaggtgcccgccgactggtgggataaagaagctgacaagtctctgctaattggcgtgtttaaacacgggtatgaaaaatacaacagtatgcgagccgaccctgcattatgctttctggagcgggtgggcatgcccgatgcgaaggccattgctgcagagcagagggggactgatatgctggctgatgggggggatggcggagaatttgaccgtgaagacgaagaccccgaatataagcctacaagaactccgtttaaagacgagatcgatgaattcgctaattcccctagtgaagataaggaagaatctatggagatccacgccactggcaaacatagtgagagtaacgcagagctgggccagttgtactggcctaatacttctacactgactacgcggcttcgccggctcattaccgcatatcaacggagctataagagacagcaaatgcgacaggaagccctgatgaaaaccgatcggcggcggcgacggccacgcgaggaggtgcgggctttggaggcagaaagagaggcaattattagtgaaaaacgccagaaatggactaggcgagaagaggctgacttttacagagttgtgagcacatttggtgtcattttcgacccggtaaaacagcaatttgactggaatcagttccgcgctttcgcccgcctcgataagaagtccgatgagagcctcgagaaatatttcagttgtttcgtggccatgtgtcgccgggtatgccggatgccagtcaagcccgatgacgaaccccctgacctctccagtatcattgagcctataaccgaggaacgggccagccgtactctgtatcggatcgagttactgcgcaaaattcgggagcaggtcttacatcacccacagctaggcgagcggctgaaactctgccaaccctccttggaccttcctgaatggtgggagtgtggccggcacgatcgtgatcttcttgtgggagctgcaaaacacggcgtctctcgaaccgattaccatatccttaatgaccccgaactgtccttcttggacgctcacaaaaattttgcccagaaccggggcgccggaaacacatcttcgctgaatccgctggcagtaggtttcgtgcagacaccaccggtgatttcatcagctcacattcaggacgagagagtgctcgaacaggcggagggaaaggtggaagaaccggagaaccctgctgctaaagaaaagtgtgagggcaaggaagaggaagaggaaacggacggcagcggcaaagagtccaaacaggaatgtgaggcagaggcgtcctctgtcaagaacgagttgaagggggtggaggttggcgctgacactggatccaagtcaatcagcgaaaagggttccgaggaggatgaggaggagaagctggaggatgacgacaagagtgaggagtcctcccaaccagaagccggtgccgtcagtagagggaagaatttcgatgaggagtcgaacgcttctatgagtaccgccagagacgagacccgggacggcttctacatggaggacggcgatccttcagtagctcaactgcttcacgaaagaactttcgcgttctccttctggcctaaggaccgggtcatgatcaacagactggacaatatctgtgaagcagtccttaagggcaaatggccggttaatagacggcagatgtttgacttccaaggactaatccctggatatacccctaccaccgttgattcacccctgcagaaaaggagttttgcagagctttcgatggttgggcaagcctccattagcggcagcgaagacataactacctcaccccagctgtccaaagaagatgccttaaacctgtctgttcctcgccaacgcagacgccggaggagaaagatcgagatcgaagccgagcgggcagccaaacggcggaatctgatggagatggtggcccagcttagagagagtcaagttgttagcgagaacggccaggaaaaagtggtcgacctgtcaaaggcgtcccgggaggccacgagtagtactagtaatttctcctccctctcaagtaagttcatcctcccgaacgtaagcactccagtgtctgacgctttcaagacccagatggaactgctgcaagctggactgtccagaacccctactcgtcacctcttaaatggcagcctggtagacggcgagcctccgatgaagcgaagacgcggtcgccggaaaaacgttgaaggtctggatctgctcttcatgtcgcacaaaagaactagtctgtctgcggaagatgccgaagtgactaaggccttcgaagaggatatcgagacgccccccactcgtaatatccccagccccggccagctcgacccagatactagaatacccgtcatcaatctcgaagacggaactcggctggtcggagaagacgcaccaaaaaataaagatctggtggaatggctcaagctccatccgacctatacagtggatatgccttcgtatgttccaaagaacgctgatgttctgttctcttccttccagaaacccaaacaaaaacgacataggtgccggaacccgaacaaattggacatcaatacattgaccggtgaagagcgggtccccgttgttaacaaaagaaatggtaagaaaatgggcggcgctatggccccgcctatgaaggacctcccacggtggctcgaggagaaccctgagttcgcggtggccccagactggacagacattgttaagcagtccgggttcgtccccgagagcatgtttgatcggttgttgactggccctgtggtgaggggagagggcgcctctagacgggggcgacggccaaagagtgaaatagctcgcgcagccgctgctgcggctgcagtggcgagtacctcaggtatcaacccccttttggtgaattctctgttcgccggaatggacctcacaagccttcagaatctgcagaatctgcagagtcttcagctggccggcctgatgggcttcccgccaggtcttgccaccgctgcaacagccggcggggacgccaagaaccccgccgccgtgctgcccctgatgctccctggcatggccggcctaccaaacgtgtttggacttggcggactgcttaataatccgctctccgctgctactggtaacacaacaacagcgagctcgcagggtgaaccagaagactctacaagcaagggagaggagaaagggaatgaaaatgaggatgaaaataaagactcagaaaagtcaacagatgccgtgagcgccgcggactccgccaacggcagcgtcggggccgccaccgctccagccgggctaccttccaatcctctcgcctttaacccatttctgctctccacgatggcaccaggtctgttttacccctctatgttcctgcctcctgggctgggcggactaactctgccagggtttcctgccttggccgggttacagaacgcagtaggctcctcagaagaaaaggctgccgacaaggctgagggtggcccatttaaggacggcgaaaccttggaggggagtgatgccgaagagtccctcgacaagacggcagaatcctccctgttagaagacgagatcgcacagggggaggagcttgatagtctcgacggaggggatgagatcgaaaataatgaaaatgatgaatag

SEQ ID NO: 195029 - DNA, 8994 bp, Artificial Sequence
  derived and/or modified sequence
atggcagatcctgggatgatgagtctctttggcgaggatggcaacatttttagcgaaggactggaaggattgggcgagtgcggctaccccgaaaacccagtcaacccaatgggtcaacagatgcctatcgaccagggcttcgctagtctgcaaccatctttacatcacccttcaaccaaccagaaccagacaaaactgacccacttcgaccactacaatcaatatgagcagcagaagatgcacttaatggatcaaccgaaccgcatgatgtctaacacgcctggaaatggcctggcgtcacctcactcacaataccacaccccccctgtcccccaggttcctcatggcggatctggagggggtcagatgggagtctatcctggtatgcagaacgaacggcacgggcagtcctttgtagatagtagctccatgtggggcccacgtgccgtgcaagtgccggaccagattagggccccataccagcagcagcagccgcagccccagccgcctcaacccgctccatccggaccacccgctcaggggcacccacagcatatgcagcagatggggtcctatatggccaggggtgactttagtatgcagcagcatggccaaccacaacagcggatgagccagttctcccaaggacaggagggcctaaatcaaggcaacccctttattgcaactagtggccctggacatctcagtcacgttccacagcagagtcccagcatggcgccttctcttagacattcagtgcagcagtttcaccatcacccctctaccgcattacatggcgagtccgtcgcacattctccccgtttctctccgaacccccctcagcagggagcagtgagaccccagaccctgaacttttctagtaggtctcagactgttccttcaccgactatcaacaatagcggtcagtacagccggtatccttattccaacttgaaccaaggcctagtcaacaatactggcatgaatcagaacctggggctgactaataacacccctatgaaccagtccgtgccacggtatccgaatgccgtcggttttcctagtaacagtggacaggggctaatgcaccagcaacctatccacccttccggctctctgaaccaaatgaacacacaaacaatgcaccccagccagccacagggtacctacgcgagtccaccccctatgtcacccatgaaggcaatgagcaaccccgctgggactcccccacctcaggtaaggcccggttctgccggaattcccatggaggtcggctcatatccaaacatgccccatccacagccaagccaccagcctccgggagctatggggataggccagaggaatatgggcccaaggaacatgcagcagagtcggccattcatcggcatgagttcagctccccgagaactcactggacatatgcgtcctaatggatgccccggagtggggttgggcgacccccaagccatccaggagaggctcattccagggcaacagcacccagggcagcagccatcattccaacagcttcccacctgccccccactgcaaccccaccctggcctccatcaccagagctctccccctcacccgcaccaccagccatgggcccagctgcatccctccccccagaacaccccccagaaggtgccagtccatcaacacagtccatctgaacctttccttgagaagccagttcccgacatgacccaagtgtcaggccctaatgctcagttagtcaagtccgacgactatctgccttcaattgagcagcagccccagcagaaaaagaagaaaaagaaaaataatcacattgtggccgaggatcccagcaagggtttcgggaaggacgactttcccggtggggtcgataaccaggagcttaaccgaaattcactagacggctctcaagaggagaaaaaaaaaaagaagcgcagtaaagccaagaaggaccccaaggagcctaaagagcccaaggagaagaaagagccaaaagaacccaaaaccccaaaagcgcctaagattccgaaggagccaaaggaaaagaaagctaagactgcaactcccaaaccaaaatcaagcaaaaagtcctcgaataagaagcccgattccgaggcaagcgcgctgaagaaaaaagtcaacaagggaaagactgagggctctgagaactcggacctggacaaaaccccaccacccagtccaccccctgaggaagatgaagatcctggcgtgcagaaaaggcgatcgtctaggcaggttaaacgaaagcgctacaccgaggatcttgaattcaaaatttccgatgaagaagcagatgatgcggacgccgctggcagggattctccctctaataccagccagtcggagcagcaggaatccgttgacgctgaaggtcccgtggtcgagaaaatcatgtccagtaggagtgtgaagaaacagaaagagtctggcgaagaggtggaaatcgaggaattctatgtgaagtacaaaaacttttcctatttacactgtcagtgggcgtcgatcgaagacttagagaaggacaaacgtatccagcagaagatcaagcggttcaaagcaaaacaaggacagaacaagtttttgagtgaaattgaggacgagctgtttaatcccgactatgtcgaggtggataggattatggattttgccagaagcaccgacgatcgcggtgaacccgtgactcactatttggtaaagtggtgtagtctgccttatgaagatagcacatgggagaggcggcaggatatcgaccaggccaaaatcgaggagttcgagaaattgatgagccgtgagccagagacagaacgggtggaaaggccgcctgccgacgactggaagaaaagtgagtcctccagggaatacaagaataacaataaactgcgcgagtatcagctcgagggagtcaactggctgttattcaactggtataatatgcggaactgtattttagcagatgagatgggcctaggaaagaccatccaaagcataacttttctgtatgagatctatcttaaaggcattcacggccctttcttggtgatcgccccactgagcaccatccccaattgggagcgggaattccggacatggacagagctgaatgtcgtggtctaccacgggagtcaggccagccgtagaaccatccagctgtacgagatgtactttaaagacccccagggacgcgtgatcaagggatcttacaaatttcacgccataatcaccacatttgagatgatcctcactgactgccccgaactgcgcaatataccctggagatgtgttgtcatcgatgaggcccaccggctgaagaaccgcaattgcaagcttcttgagggacttaaaatgatggacctggaacataaggtgcttctgacaggaactcccctgcagaataccgtcgaggagctgttttctctcctgcacttcctggagccatccagattcccctctgaaacaacctttatgcaggagtttggagatctgaagacagaagagcaggtccaaaagctgcaggcaatcctcaagcccatgatgctaagacgcctcaaggaggatgtcgagaagaatctcgccccaaaggaggaaactatcattgaggtcgaactgacgaatattcagaaaaagtactaccgagctatcctcgagaaaaatttcacattcctttcaaagggcggaggtcaggctaatgtacctaatttactaaatactatgatggagcttcgcaagtgctgcaatcacccctacctcattaatggtgcggaagagaagattctggaagagtttaaagagacccataatgctgaatcaccagactttcagctgcaggcaatgattcaggcagcaggtaagctggtgctgatcgataaactcctgccaaagttaaaagcaggtgggcacagggtactgattttttcccagatggtgcggtgtcttgacattttagaagactatcttatccagcggcgttacccctacgaacgcattgatgggagagtgcgcggaaatctgcgacaggccgctattgatcgtttcagcaagcccgacagcgaccgtttcgtctttctactctgcactagagccggaggtcttggtattaatttgactgccgctgacacatgtatcattttcgacagcgattggaacccacaaaacgacctgcaagcacaggctagatgccataggattgggcaatctaagtcagtgaaaatttatcgactgattacccgcaattcttatgaacgagagatgttcgataaggcaagccttaaactgggacttgacaaggctgtgctgcaatccatgtcgggcagggaaaacgctacaaacggcgtacagcagctatcgaagaaagaaatcgaggacctactgagaaagggcgcttatggggctctgatggacgaggaggacgaaggtagcaagttctgtgaagaggacattgatcagatattattgagaaggacccatactatcactatagagtcggaaggcaaagggagtacattcgcaaaggccagctttgtcgcctctggcaaccggaccgacatctccttagacgacccaaacttctggcagaagtgggccaaaaaggccgagctggatatagacgctcttaacggcagaaacaacttggttatcgatacccccagagtgaggaaacagacccgactgtactcagcagttaaagaagatgaactcatggagttttcagacctggagagtgatagtgaggagaagccatgcgccaagccgcgacgaccacaggataaaagccagggatacgcgagaagcgagtgctttcgcgtcgagaagaatttattggtgtacggctggggacggtggaccgacatcctttctcacggacgctataagcggcagctcacagagcaggatgttgaaactatttgccgaactattcttgtctactgccttaaccattataaaggcgacgaaaacattaagagctttatttgggatctgatcacccctacagcagatggacagacccgagccctggtgaatcactcaggtttaagcgcccctgtaccccgtggtagaaagggcaaaaaggtgaaagcccagagtacccaaccggtcgtgcaagatgccgactggctggcatcttgtaaccccgatgccctgtttcaagaagattcctacaagaagcatctgaagcaccactgcaataaagtactgctcagagtcagaatgctctattaccttcgtcaagaagtaataggcgatcaagccgacaagatactggaaggtgcggatagcagtgaggccgacgtgtggatcccagagccgttccatgcggaggtaccagctgactggtgggacaaggaagctgacaagagtttgctgattggggtgttcaagcatggatatgagaaatataactctatgcgggctgatcccgctctgtgctttctcgaacgagttggtatgccagacgctaaagcaatcgcagcagagcaacgagggaccgacatgctggccgacggaggcgacgggggagaattcgacagggaagacgaggaccctgaatacaagcctacaagaacgcccttcaaagatgaaatcgatgaatttgcgaactctccaagcgaggacaaggaagaatctatggagatccacgccactggaaaacattcagaatccaacgcggagctcggccagctctactggcccaacacttccacactcaccactcgcctgcggaggctaatcaccgcctatcagcggagctataagcgccaacagatgcgtcaggaagcactgatgaaaactgatcgaaggagaagacgaccacgagaagaggtcagggccctcgaagccgagcgcgaggctatcatctcagaaaagaggcagaagtggacacggcgtgaggaggccgacttttaccgcgttgtgagcactttcggggtcatttttgacccggtgaagcagcagtttgattggaaccagttccgcgcttttgcaaggttagataaaaagtccgacgaatcccttgagaaatacttttcttgttttgtggctatgtgtcgtcgtgtgtgcagaatgccggtcaaacccgacgacgaacctccagacctgtctagcatcattgaacccatcacagaggagagagccagcaggaccctttacaggatcgagcttctacggaaaattcgggagcaggtactgcaccatccacagctgggtgagaggctcaagctgtgtcagccaagccttgacctccctgagtggtgggagtgtgggagacatgatcgcgatctactggtgggcgcagccaaacatggcgtctccagaactgattaccacatcttaaacgaccccgagctgagctttctcgacgctcacaagaatttcgcccagaatcggggagcaggaaatacttcttcactcaatcctctagcagtggggttcgtccagaccccacccgtgatctccagcgcgcatattcaggacgagagggtcctggagcaagctgaagggaaagtggaggagcctgagaatcccgctgccaaggagaagtgtgaaggtaaggaggaggaggaagagacagatgggagtggcaaggagtccaagcaagagtgcgaggccgaagccagtagtgtaaaaaacgagctcaaaggggtagaggtaggagcagatactggctcaaaaagcatcagcgagaaaggatccgaggaagacgaggaggaaaaactggaagacgatgataagagtgaggaaagttctcaaccggaagccggagcagtgagcagaggcaaaaacttcgacgaggaatccaatgcctcaatgagcactgcccgtgacgagactcgggacgggttctatatggaggatggagatcctagtgttgcccagctgctgcacgagagaacctttgctttctcgttctggcccaaagatcgcgtcatgattaacagattagataacatctgcgaggcagtgctgaaaggcaaatggcctgttaatagaaggcagatgtttgactttcaaggcctgatccctgggtatacacctacaaccgtagactctcctctccagaaacgaagcttcgcagaactctcgatggttgggcaagcctccatatcgggttctgaagacattaccacgtccccccagttgtctaaagaagacgccttaaacctgagtgtcccaaggcagcgccgtcgacgccgacggaagatcgagatcgaggccgaacgggcagcaaagcgtagaaatctcatggaaatggttgcccagctcagagagtcacaagtggtgagcgagaatggccaggagaaggtggtcgatctgagcaaagcttcgagagaggcgacaagttccacctctaacttctcctctctgagtagcaagtttattctccctaatgtatccacacccgtgtcagacgcctttaagactcaaatggagctgctccaagcaggacttagcagaaccccgaccaggcacctcctgaatggctccttagttgacggagagcctccaatgaagaggaggagggggagaaggaagaacgtggagggattggacctgctgttcatgagccataagcgcactagcctctctgcagaagatgccgaggtgacaaaggcctttgaagaggatatcgagacccctccaactcggaacattccatctcccggacagctggaccctgacacccgaattccagtgataaatctggaggatggcacacgtctggttggcgaggacgcccctaaaaataaagacctggttgaatggctgaaattgcacccaacatataccgtcgatatgcctagttacgtgcccaaaaacgccgacgtgctttttagctctttccaaaagccaaagcaaaagcgacatcggtgtcggaatcctaacaaacttgatattaacaccctgacaggtgaagagcgcgtgcccgtcgtaaataagagaaatgggaagaagatgggcggagcaatggcccctcccatgaaggatctcccacggtggctggaagaaaaccccgagttcgcagtggcgcctgactggaccgatatcgtcaaacaaagcgggtttgtaccggagtccatgttcgacaggttgcttaccggccctgtcgtgagaggagaaggggcttcgcgccgtggacgcagacccaaatcagaaatagccagagctgccgctgctgctgccgcagtggcttcaacaagcgggattaaccccctgctggtgaactccctattcgcgggaatggatctcacttcattacagaacttacaaaatctgcagtctcttcaattggcaggtctcatgggtttccctcctggtctcgcaactgccgctactgccggtggcgatgcaaagaaccctgcagccgtgctgcccttgatgctgcccggtatggcaggactgccgaacgtgttcggcctgggcggattgcttaataacccactttctgctgccaccggcaacacaaccaccgcaagcagccagggggaaccggaagacagcacaagcaagggggaggaaaaaggcaacgagaacgaagatgagaacaaagattctgaaaagtcgaccgacgcagtgtcagccgctgatagcgcgaacggctcagtgggcgcagccacggcacccgcaggactcccttcaaacccgctggcgtttaatccattcctgctgagcaccatggcgcctggactgttctaccccagtatgttcctcccgccagggctcggcggtctgactctccccggattccccgcacttgccggactgcagaatgctgtgggatcatcagaggaaaaggcggcagacaaagccgaaggaggcccattcaaggatggagaaactctcgaggggtctgacgcagaagaatccttggataagactgcagaaagcagcctcctggaggacgagatcgcccagggcgaagaactggatagcttggacggcggagatgaaatcgagaataatgaaaatgacgagtac

SEQ ID NO: 195030 - DNA, 8993 bp, Artificial Sequence
  derived and/or modified sequence
atggccgaccctggcatgatgtccctttttggtgaggacgggaatattttctcggagggtctggagggtttgggagaatgcggatatcctgaaaatccggttaatccaatgggacagcagatgccaatcgaccaaggtttcgcaagcctccagccttccctgcatcatcccagcactaaccagaatcagaccaagctcacccactttgaccactacaaccagtacgagcaacaaaaaatgcacctgatggatcagccaaaccgaatgatgtctaacactccaggaaacggtctggcctcaccccacagccaataccacactccaccagtgccgcaggtacctcacgggggtagcggcggaggacaaatgggtgtttatcctgggatgcaaaacgaacgccatggacagtcgtttgtggattcttcttcaatgtgggggccacgcgcagtacaggtccccgatcagatcagggcgccataccaacagcagcaacctcagccccagcctcctcaacccgcaccatctgggccacccgcacagggtcatccacagcacatgcagcagatgggctcatatatggcgagaggtgacttctcaatgcagcagcacggtcaaccacagcagcggatgtcccagttctctcagggacaggaagggctgaatcagggtaatccttttatcgccacctctggaccgggtcacctgagccacgttccccagcaaagtccaagtatggctccatctttgaggcattcagtgcagcagtttcaccaccaccctagtactgccctacatggcgaatctgtggcacacagccctcggttcagccctaaccctccccagcagggagctgtgagacctcagactctcaatttcagctcacgttcacaaactgtccctagccccacgataaataacagtgggcagtattcgaggtatccgtattccaatctgaaccagggtttagtgaacaacactggaatgaaccagaacctgggactgacgaataatacacctatgaaccaatccgttccgcgttatccaaatgccgtggggtttccctccaactctggtcagggccttatgcaccagcagcccatccacccgtctggctcactgaaccagatgaatactcagaccatgcatccaagccagccccagggaacatacgcttccccccctccaatgagtcccatgaaggctatgtctaaccccgctgggacacccccacctcaggtccgacctggcagcgctggcatccccatggaggtgggttcttacccgaacatgccacatcctcagcccagtcatcagccaccaggcgctatgggcatcggacagcgaaatatgggaccaaggaatatgcagcagtcacgcccattcatcggtatgtcctctgcgcctcgggaattgacgggccacatgagacctaacggctgcccaggcgtgggcctcggtgatcctcaggcgatccaagaacgattaatccctggacaacagcatcccggtcagcagccctcattccaacagttgcccacgtgtccaccattacagcctcacccaggtctgcaccaccagtcctccccaccacacccacaccaccagccttgggcccagctccaccccagtccgcagaacactccccagaaggtgcccgtgcaccagcactcccctagcgagccgtttctggagaaaccagtccccgatatgacgcaggtctcaggacccaacgcccaactggtgaaaagcgatgactatctgccctcaattgaacaacagcctcagcagaaaaaaaaaaagaagaaaaacaaccatattgtagctgaggatccatcaaaaggtttcggcaaggatgactttccaggcggagtggacaaccaagaacttaaccggaacagtctggatggctcacaagaggaaaagaaaaaaaaaaagaggtctaaagcgaaaaaggatcccaaagaaccaaaagaacctaaggagaagaaggaaccaaaggagcccaagacgcccaaagcaccaaagataccaaaggaacctaaggagaaaaaagctaagaccgcaacacccaaacccaaatcctcaaaaaagtcctctaacaagaagcccgactccgaggcttctgctctgaagaagaaggttaacaaggggaaaaccgaaggatccgagaactccgacctggataagaccccccctccgagcccaccacccgaggaggatgaagacccaggtgtgcagaaacgtagaagttccagacaggttaagcgcaagagatatactgaagatctggaattcaagattagcgacgaagaggccgacgatgctgacgcagccggacgggacagcccttctaacacctcacagagcgaacagcaagaatccgtcgacgccgaagggcctgtcgttgaaaaaattatgtcttctaggtccgttaaaaagcagaaggagtccggtgaggaggtggagatagaagagttttatgtgaaatataaaaattttagttacctgcactgccagtgggcttcgatcgaggacttagagaaagataagaggatccagcagaagataaaaaggttcaaggccaagcagggccaaaacaagttcctgagcgagattgaggacgagctatttaaccccgattatgtcgaggtcgatcggatcatggacttcgctaggtcaaccgatgataggggagagcctgtaactcattaccttgtgaagtggtgctcgcttccgtacgaggattctacatgggaaagacgacaagacatcgaccaggctaaaatcgaagaattcgagaaactgatgtctcgagagccggagaccgagagagtagaaagaccgcctgctgatgactggaagaagagcgagtccagcagagagtacaaaaacaacaataagctacgtgagtatcagcttgaaggagttaactggctcttgttcaattggtataacatgcggaactgcatcctcgctgatgagatggggcttggcaaaactatccagagcatcacctttctatacgagatctacctgaaaggcattcatggcccattcctcgtcatcgcccctctgtcgacaataccaaattgggagagagaattccggacctggacggagctgaacgtagtggtctaccatgggtcccaggcgagccgcaggaccatccagctatatgagatgtatttcaaggacccacaaggaagggttatcaagggttcctataagtttcatgccataatcactacatttgagatgatcctgacggactgtcccgaattgaggaatattccatggagatgcgttgtaatagacgaggcgcataggttgaagaatcgaaattgcaagttgctggagggcctcaaaatgatggacctcgaacataaagtcctgctcaccggaactccattgcaaaatacggtggaggaactgtttagccttctccacttcctagagcccagtaggtttccttcagaaacaacctttatgcaggagtttggcgacctgaaaactgaggagcaggtgcagaagctccaggccattctgaagcctatgatgctccggaggctgaaggaggacgtggaaaaaaaccttgctccaaaagaagagacaattattgaagttgagctgaccaacattcagaaaaaatattaccgggctattctcgaaaagaactttacttttctgagcaagggtggcggacaagctaacgtgcctaatctcttaaacacaatgatggaactcaggaagtgttgcaaccacccatatctgattaacggtgccgaagaaaaaatcctggaggagttcaaagaaacacacaacgccgaatcacctgatttccagctgcaggccatgatccaggccgcaggcaaattggtgcttattgataagctcctgccaaaactgaaagcgggagggcacagagtacttatttttagtcagatggtcaggtgtctggacatactagaagattacctcatccaaagaaggtatccttatgagcgaatcgacggtagagtcaggggtaacctcaggcaggccgctattgatcgattctctaaacccgattccgacagatttgtctttcttttgtgcacgagagcaggtggcctgggaatcaacctgacagctgcagacacgtgcatcatctttgacagtgactggaacccccagaacgatctgcaggcccaggcacgatgccatagaatcggccagagcaagtcggttaaaatctaccggctcatcactcgaaactcttacgagagagaaatgttcgataaagcatctctcaagctggggttagataaagcagttttacagtctatgagcggccgtgaaaatgccaccaacggggtgcagcagcttagtaaaaaggagattgaggatttgttgcgcaagggcgcatatggggctctcatggacgaggaagatgagggatccaaattttgtgaagaggacatagaccaaattctgctgaggcggacccatacgatcacaatcgaatctgaaggcaagggctccactttcgcaaaggcctctttcgtggcgtccggcaaccggacagacataagcttggatgatcccaatttttggcagaagtgggctaagaaggcagagctggacattgatgccctgaatggaagaaacaacctcgtaatagatacccccagagtgagaaagcagacgaggttgtactctgcagtgaaggaagacgaactcatggagttcagcgatcttgaaagtgacagcgaggagaaaccatgtgctaaacccagaaggccccaagataaatcccaaggctacgcgaggagcgagtgcttccgagttgagaagaatttgctcgtgtatgggtggggcagatggacggatatactgagtcacggcagatacaaacgtcagctgaccgagcaggacgttgaaacaatctgccgtaccattctggtctattgtctcaatcactacaaaggggacgagaacataaagtcctttatttgggaccttataacaccgacagcagacggtcagacgagagctctggtaaaccacagcggcttatctgctcctgtaccgagaggcaggaaaggtaagaaggtgaaagcccagtcaacacaacctgttgtgcaggatgccgactggttggcctcctgtaaccctgatgcgttgttccaggaagactcctacaaaaagcacctcaaacatcactgcaacaaagtcctgctgagggtccggatgctgtactacttaagacaggaagtgataggggaccaggctgataagatcctggaaggggctgactctagtgaagctgatgtctggatccccgaacccttccacgcggaggtccctgcagactggtgggacaaagaggccgataagagcttgttaattggagtgtttaaacatggctacgagaagtacaactccatgagggccgatccagccctgtgctttctcgagagggtcgggatgcctgacgccaaggcgattgctgcggagcaacgagggactgacatgctggccgacggcggagacggcggagagttcgatcgcgaagacgaggaccccgagtataagccaactagaactccgttcaaggacgagatagacgaatttgcaaactcaccatctgaagataaggaggagtccatggagattcacgccacaggaaaacattccgaatccaacgctgaactgggacagttgtattggcccaatacatcaactcttaccacacgcctgcgtcggcttatcacggcgtaccagaggagctataaaaggcagcagatgcgccaggaagctctgatgaagactgacaggaggagacgtcgaccgcgagaagaagtgcgagcgcttgaagcggagagggaagcgatcatttccgagaagagacaaaagtggactagaagagaggaggctgacttctatagggtggtgagcaccttcggtgttatttttgatccagttaagcaacagttcgactggaatcagttcagagcttttgctcgactggacaagaagtcagacgagtcacttgagaaatatttcagctgtttcgtggccatgtgccgccgtgtatgccgaatgcctgtgaaaccagatgacgagccacccgatctctcttctattatcgagccgataacggaagaaagggcatcccgcaccctctacagaatcgagctattacggaagatccgcgaacaggtgctacatcatccacagttaggagagagacttaagctctgccagccatctctcgacctccctgaatggtgggagtgcggtaggcacgatcgagacctgttggtcggagctgccaagcacggcgttagtaggaccgattaccatattctgaacgaccctgaattatctttcctggatgctcacaagaactttgcccagaaccgcggagccggtaatacttccagtctgaaccccctcgctgtgggtttcgtacagactccgcctgtgattagctctgctcatatccaggatgagcgtgtattagagcaagcagaggggaaagtcgaggagccagaaaaccccgctgcgaaagaaaagtgcgaaggaaaagaagaggaggaggaaacagacgggtcagggaaggagtcaaagcaggagtgtgaggctgaggcctctagtgtgaagaatgagctcaaaggggtcgaggtgggagccgacaccgggtctaaatcgatttcagagaagggcagcgaggaagacgaggaagagaagctggaggacgatgataaatcagaggaaagttcccagcccgaggccggagccgtgagccgcggtaagaacttcgacgaggaaagtaatgcctcaatgagtacagccagggatgaaactagagacggattctatatggaagacggggatcccagcgttgctcagcttttgcacgagcgtacctttgctttctcgttttggcccaaggaccgcgtgatgatcaatcgattggacaacatatgcgaggcagttttaaagggcaaatggccggttaatcggcgtcagatgttcgattttcaggggctcattcccggatacacacctaccaccgtggatagccccctgcagaagcgctccttcgccgagctcagcatggtgggtcaggcttcaatttctggatcagaagatatcaccacttctccccaactgagcaaggaggatgcattaaacctcagtgttcccaggcagcggcgtcgcagaaggcggaagatcgaaatcgaagccgagcgagcagcaaaacggcgaaaccttatggagatggttgctcagctccgagaaagccaagttgtgagcgagaatgggcaagagaaggttgtggacctttcaaaagcatccagagaggcaaccagttccacctccaacttcagttccctctcttcgaagtttatcctgccgaacgtcagtactccagtgtccgacgcgtttaaaacccaaatggagttactacaggccggactcagcaggacaccaaccagacacttattaaacgggtcacttgtggatggcgaaccaccaatgaagcgtcgacgcggacggcgtaagaatgtcgagggcttggatcttctcttcatgagccacaaaagaacgtctttaagcgcagaagacgctgaggtgacaaaggcgttcgaggaggacatcgagaccccacccacaaggaacatcccatcaccagggcagctcgatccggatacccgaattccagtgataaacctcgaagatggcacgcggttagtcggcgaagatgcccctaagaacaaggacctggtcgagtggctgaagctccacccaacttatacagttgatatgccctcttatgttcctaaaaacgcagacgtgcttttcagctccttccaaaaacccaaacaaaagaggcataggtgccgaaaccctaacaaactcgacatcaatactcttaccggagaagagagagttcctgtcgttaacaaaagaaatggcaaaaaaatggggggagccatggccccacctatgaaggaccttccgaggtggctggaagagaacccagagttcgctgtggcccctgattggacagacatcgtgaagcagagcggttttgtacctgaaagcatgtttgatcgattgctgaccgggcctgtcgtacggggagaaggcgcttccagaaggggccgaagacctaagtcggagattgctagagcagccgctgcagcagcagcggtggcaagcacctctgggataaacccactcctcgtgaactcactgttcgctggcatggacctcacaagtctccagaatctgcagaatctgcagtcccttcagctggccggtctgatggggtttcctcctggcctggccacagctgctacagccggtggcgatgctaagaatcccgctgccgtgctgccactgatgcttcccggtatggccggtttacccaacgtatttgggctgggtggtctgctgaataatcctctctctgcagctactggaaacacaacaactgccagcagccagggtgagcctgaagactctacaagtaaaggtgaggaaaaggggaatgagaacgaggacgagaacaaggatagcgagaaatccacagatgcggtgtcggctgcggattctgccaatggcagtgttggcgcagcaacagccccagccggactgccttctaatcccttagctttcaatccttttttgctgagtacgatggcccctggtctgttttacccatccatgttcttacctccagggctgggagggttaactttgccagggttccccgcacttgcgggattgcagaatgccgtcggttctagcgaggagaaggctgccgataaggctgaagggggacccttcaaagacggcgagacactggagggctccgacgcagaggagagcctggacaagacagccgagagcagtctgctggaggatgagattgctcagggtgaggaactggatagtctggacgggggagacgagattgagaacaatgagaacgacgaata

SEQ ID NO: 195031 - DNA, 10446 bp, Artificial Sequence
  derived and/or modified sequence
cggcggcggcggcagcggcggcggcggcggcggcgcgggggttgagtcgtggtggtgcggacgcgctcgtgctcgggaactatcggattaaacttgaatcgagtgaaattacacaaaggagcgccgcggaggaggcggcccggggacccggacaccctgaaactcaccagagacccgttcgcccccggccaactccgtgcccgtggattcagccccctggccgcagctgccgagccaactccggagcccgctctgcgttttgttttcccctcggcactaggcagcggaggagcccgaccgacccggacctatatccagactttgcctgacactgcagggtccaagagaattaaagaaatatggaatgacatgaagaagattagttaaggattataggctttgagggcaaacacctcagtgaagtgaagcacaggcaagctcctgagctgtggtttggaggagccgtgtgttggaagaagatggcagatccaggaatgatgagtctttttggcgaggatgggaatattttcagtgaaggtcttgaaggcctcggagaatgtggttacccggaaaatccagtaaatcctatgggtcagcaaatgccaatagaccaaggctttgcctctttacagccatcccttcatcatccttcaactaatcaaaatcaaacaaagctgacacattttgatcactataatcagtatgaacaacaaaagatgcatctgatggatcagccgaacagaatgatgagcaacacccctgggaacggactcgcgtctccgcactcgcagtatcacacccctcccgttcctcaggtgccccatggtggcagtggtggcggtcagatgggtgtctaccctggcatgcagaatgagaggcatgggcaatcctttgtggacagcagctccatgtggggccccagggctgttcaggtaccagaccagatacgagccccctaccagcagcagcagccacagccgcagccaccgcagccggctccgtcggggccccctgcacagggccaccctcagcacatgcagcagatgggcagctatatggcacgtggggatttttccatgcagcagcatggtcagccacagcagaggatgagccagttttcccaaggccaagagggcctcaatcagggaaatccttttattgccacctcaggacctggccacttgtcccacgtgccccagcagagtcccagcatggcaccttccttgcgtcactcggtgcagcagttccatcaccacccctctactgctctccatggagaatccgttgcccacagtcccagattctccccgaatcctccccaacaaggggctgttaggccgcaaacccttaactttagttctcggagccagacagtcccctctcctactataaacaactcagggcagtattctcgatatccttacagtaacctaaatcagggattagttaacaatacagggatgaatcaaaatttaggccttacaaataatactccaatgaatcagtccgtaccaagataccccaatgctgtaggattcccatcaaacagtggtcaaggactaatgcaccagcagcccatccaccccagtggctcacttaaccaaatgaacacacaaactatgcatccttcacagcctcagggaacttatgcctctccacctcccatgtcacccatgaaagcaatgagtaatccagcaggcactcctcctccacaagtcaggccgggaagtgctgggataccaatggaagttggcagttatccaaatatgccccatcctcagccatctcaccagccccctggtgccatgggaatcggacagaggaatatgggccccagaaacatgcagcagtctcgtccatttataggcatgtcctcggcaccaagggaattgactgggcacatgaggccaaatggttgtcctggtgttggccttggagacccacaagcaatccaggaacgactgatacctggccaacaacatcctggtcaacagccatcttttcagcagttgccaacctgtcctccactgcagcctcacccgggcttgcaccaccagtcttcacctccacaccctcatcaccagccttgggcacagctccacccatcaccccagaacaccccgcagaaagtgcctgtgcatcagcattccccgtcggagccctttctagagaaaccagtgccggatatgactcaggttagtggaccgaatgctcagctagtgaagagtgatgattacctgccatcaatagaacagcagccacaacaaaagaagaagaaaaagaaaaacaaccacattgtagcagaggatcccagtaaaggttttggtaaagatgacttccctggtggggtagataaccaagaactaaataggaactcactggatgggtcccaagaagaaaaaaagaaaaagaaaaggtcaaaggcaaaaaaagacccgaaggaaccgaaagaacccaaggagaaaaaagagcccaaggaacccaagaccccgaaagcccctaagattcccaaagagccaaaggaaaagaaagcaaaaactgccacgccaaaacccaaatccagcaaaaagtcaagtaataagaaacctgactcagaagcaagtgctttgaagaaaaaggtcaacaagggaaaaacagaaggttctgaaaattcagacttagacaaaacacccccaccatctcctcctcctgaagaagatgaggacccaggtgttcagaagagacggtccagcagacaggtgaagagaaagcgctacactgaagacctggagttcaagatttctgatgaggaggcagatgatgcagatgctgctgggagggattccccctccaacacctcccagtcagaacagcaggaatctgttgatgcagaaggcccagtggtagaaaaaattatgagcagtcgttcagtaaaaaagcagaaggaatctggagaggaggtagaaattgaggaattctatgtgaaatacaaaaacttctcttatcttcattgtcagtgggcatctatagaagatctggaaaaagataagagaattcagcaaaaaattaaacgatttaaggcaaagcagggccagaacaagttcctttcagagattgaggatgagctttttaatccagattatgtggaggttgaccggataatggactttgcacgtagcacagatgaccggggagagcctgtgactcactatctggtgaagtggtgttcacttccttatgaagacagcacgtgggagcggaggcaggacatagatcaagcaaagatcgaggagtttgagaaactaatgtccagggagccggaaacagagcgtgtggagcgacctcctgctgatgattggaagaaatcggagagttccagggagtataaaaacaataacaaactcagggaataccagttggagggagtaaactggctacttttcaattggtacaacatgcgaaactgcattttagcagatgaaatgggtttgggaaaaactatccagtccattacatttctctatgagatatatttgaaaggaatccatggcccttttttagtaattgccccattgtccacaatccccaactgggaaagggaattccgaacctggacagagttgaacgtggttgtgtatcatgggagtcaagctagtcgtcggaccattcagttgtatgaaatgtacttcaaagatccccagggtcgagtgataaaggggtcctataagtttcatgccatcatcactacatttgagatgattttgactgattgtcctgagctgcggaatattccatggcgctgtgtagtcattgatgaagcccacaggctgaagaacaggaactgcaagctgttggagggactcaagatgatggacttggaacacaaagtgctgctgacgggaaccccactccagaacactgtggaagaactcttcagcttgcttcatttcttggaaccaagtcgcttcccttcagaaaccacatttatgcaagaatttggtgatctaaaaacagaagagcaggtgcaaaaacttcaagctattctaaagccaatgatgttgagacgtctcaaagaggatgtagaaaagaacttggcccccaaagaagaaactattattgaagttgagctaacaaacattcagaagaaatattaccgagccatccttgagaagaatttcacatttctttccaaaggcggtggtcaagctaacgtacctaacctattaaacactatgatggaattgcggaagtgctgcaatcatccgtaccttatcaatggtgctgaagagaaaattttggaagagtttaaagaaacacacaatgcagagtctccagattttcagctccaggcaatgatccaggctgctggcaagctagtgctgattgacaagctgctgccaaaactgaaggctggtggccacagggtgcttatcttttcccagatggtgcgctgcttggacatactggaagactacctcattcaaagacggtacccatatgaaaggatcgacggccgagtaagaggcaacctccgccaggcagctatcgacagattctccaaacctgattctgataggtttgttttcctcctgtgtacaagggcaggaggtttaggcattaacctcactgctgctgatacctgcatcatctttgattcagactggaatccccaaaatgacctccaggctcaggctagatgtcatagaataggacagagcaaatctgtgaaaatctacaggctgattacaagaaattcctatgaaagggaaatgttcgacaaggctagtttgaaactgggcctggataaagctgtgctacagtctatgagtggaagagaaaatgctaccaatggggtacaacagctttccaagaaagaaatagaggatcttctacgaaaaggggcctatggtgcactcatggatgaggaggatgaagggtctaaattctgtgaagaagatattgatcagatcctcctacgtcgaacccacaccattaccattgagtcagaagggaaaggttccacatttgctaaggccagttttgttgcatctggaaataggacagatatttccttggatgatccaaatttctggcaaaagtgggctaagaaggctgaattggatattgatgccttaaatgggaggaacaacctggttattgatactccaagagtgagaaagcagaccaggctctacagtgcagtgaaggaagatgagctgatggagttctcagacttggaaagtgattctgaagaaaagccctgtgcaaagccacggcgtccccaggataagtcacagggctatgcaaggagtgaatgtttcagggtggagaagaatctgcttgtctatggttggggacggtggacagacattctttcccacggacgctataaacgccaactcactgagcaagatgtagaaaccatctgcagaaccatcctggtgtactgtcttaatcattacaaaggggatgagaatatcaaaagcttcatctgggatctgatcacacccacagcggatggccagactcgagccttggtcaaccattccggtttgtcagctcctgtgccaaggggaaggaagggaaagaaggtgaaagcccagagcacacagccggtggtgcaggatgccgactggctggccagctgcaacccagatgccctgttccaggaggacagctacaagaaacacctgaagcatcactgtaacaaggtcctgctgcgtgtccgcatgctgtactacctaagacaagaagtgataggagaccaggcggataagatcttagagggtgctgactcaagtgaagccgatgtgtggatccctgaacctttccatgctgaagttcctgcagattggtgggataaggaagcagacaaatccctcttaattggagtgttcaaacatggctatgagaagtacaactccatgcgagctgaccccgcgctgtgctttctggaacgagtcggtatgcctgatgccaaggccatagctgccgagcaaagaggaacagacatgctagcagatggtggtgacgggggagaatttgatagagaagatgaagacccagaatataaaccaaccagaacaccgttcaaagatgaaatagatgaatttgcaaattctccttcagaggataaggaagaatccatggaaatacatgccacaggtaagcacagtgagagtaatgctgagttaggccaactttactggcctaacacttcaaccctgactacacgtctgcgccggctcattactgcctatcagcgcagctataaaaggcaacagatgaggcaagaggccctaatgaagactgaccggcgcagacggcggcctcgagaggaagtgagagctctggaagcggaaagggaagctattatatctgagaagcggcaaaagtggacaagaagagaagaggctgatttttaccgtgtggtatccacctttggggttatttttgaccctgtgaaacagcaatttgactggaaccaatttagagcctttgccaggcttgacaaaaaatctgatgagagtttggagaaatacttcagttgttttgtggccatgtgtaggcgagtatgtcgaatgcccgtcaagccagatgatgaaccgcccgacctctcctccataattgagccgatcacagaggagcgagcctctcgaactctgtaccgcattgagctgctacggaagatccgcgagcaggttctccatcacccccagctgggagagaggcttaagctctgccagccaagcttggatctgccagagtggtgggagtgtggacggcatgaccgagacttgctggttggtgctgctaaacacggggtcagtcggacggattatcacatcctcaatgaccctgagttatccttcttggatgcacataaaaactttgctcaaaacagaggggcaggtaatacatcttccttgaacccactggcagttggatttgtccagactcctccagtcatctcatctgctcatattcaagatgagagggtactggaacaagccgaaggcaaagtggaggagcctgaaaacccagctgccaaggagaaatgtgagggcaaagaagaggaagaagaaaccgatggcagcgggaaggagagcaagcaggaatgtgaggcagaggccagctctgtgaaaaatgaactgaaaggtgttgaggtcggcgcagacactgggtccaaatctatttcagagaaaggttccgaagaggatgaagaggaaaagctggaggatgacgataagtcggaagagtcttcccagcccgaagcaggagctgtctctagagggaagaattttgatgaagaaagcaatgcttccatgagcactgctagagatgaaacccgagatggattctacatggaggacggagatccttcagtagctcagctccttcatgaaagaacatttgccttctcgttttggcctaaggatagagtaatgataaaccgcttagacaacatctgtgaagcagtgttgaaaggcaaatggccagtaaataggcgccagatgtttgatttccaaggcctcatcccaggttacacacccaccacagtggacagccccttgcagaagaggagctttgctgagctctccatggtcggccaagccagcattagtgggagtgaggacatcactacgtctcctcagttgtcaaaggaagatgccctcaacctctctgtccctcgccagcggaggaggaggaggagaaaaatcgaaattgaggccgaaagagctgccaagaggcgaaatctcatggagatggttgcccagcttcgagagtctcaggtggtctcagaaaatggacaagaaaaagttgtagatttatcaaaggcctcaagagaggcaacaagctctacctcaaatttttcatctctttcttcaaagtttatcttgcctaatgtctcaacaccagtgtctgatgcctttaagactcaaatggaactgctccaagcaggcctttcgcgcacacccacaaggcatctccttaatggctccctagtggatggagagcctcccatgaagaggaggcggggaaggaggaaaaatgtggagggacttgatctgcttttcatgagccacaaacggacgtcattgagtgcagaggatgctgaggtgaccaaagcttttgaagaagatatagagaccccaccaacaagaaacattccttctcccggacagctggacccagacacacggatccctgttatcaatcttgaagatgggactaggctggtgggggaagatgctcctaaaaataaggatttagttgaatggctgaagctgcaccctacttacactgttgatatgccaagttatgtaccaaagaatgcagatgtgctgttttcctcatttcagaaaccgaaacagaaacgacatagatgtcgaaaccctaataaattggatataaacactttgacaggagaagaaagggtgcctgttgtcaataaacgaaatgggaagaagatgggtggagctatggcgcctccaatgaaggatctacccaggtggctggaagaaaatcctgaatttgcagttgctccagactggactgatatagttaagcagtctggttttgttcctgagtcgatgtttgaccgccttctcactgggcctgtagtgcggggagagggagcgagcagaagaggaagaaggcccaaaagtgagatcgccagagcagccgcggccgccgctgctgtggcctccacgtcagggatcaaccctttgctggtgaacagcctgtttgctggaatggacctgacgagccttcagaatctccagaatctccagtcgctccagctggcaggcctcatgggcttccctccaggactggcaacagctgccaccgccggaggcgatgcgaagaaccctgctgctgtgctgcccctgatgctgccaggaatggcgggcctgcccaacgtgtttggcttgggcgggctgttgaataaccctctgtcagctgctactggaaacaccactactgcttctagtcaaggagaaccggaagacagcacttcaaaaggagaggagaaaggaaatgagaatgaagacgagaacaaagactctgagaaaagcacagatgctgtttcggctgctgactctgcgaatggatctgttggtgctgctactgccccggctggattgccctcaaacccgctagccttcaaccctttcctcctgtccacaatggccccgggcctcttctacccatccatgtttctacctccaggactggggggattgacgctgcctgggttcccagcattggcaggacttcagaatgccgtgggctccagcgaagaaaaggctgctgacaaggctgagggaggaccctttaaagatggagagacccttgaaggcagcgatgccgaggagagcctggataagactgcagagtcctccctcttagaagacgaaatagcacagggtgaagagctagactcacttgatgggggggatgaaatagaaaacaatgaaaatgatgaataaccagtaccagttccagttcaagtgtttaaaacttttgacaagtggtagtcctactgtttacactcacagttaatgttcatacctagttttataagctgttctgtaacatagtgtagcaaaaaaaaaagttcaagtcatgttatacaggtgtgtcaaaaggtatcttggtcattaagtattgtgcagtgcattatttattatccctaggagagatgaaatttgagaggtgatcatgtctttttaaggaaacttacataatgctctgctttttttttttctcttggtaccattggtattataataaagagcaatttgtaactgagtggcactaatggaagaaagtgctgctcaaaggaagtatgaagttatatatttaattttttaattttaatttttaatttttttgctgtgaaggtcaagctgaaatttaccatacatatcatacttgctcatttgtttccctttttgactgtatgggggttcccacactcgtgcatacacacacatccatacactctgacaatctccacgctagtgtgaacgcctctgtcccgaggcgcagcaataataaggcagctgttgaatgtgaagggtccctttggaaaattaacctactgggagggttcttgccagacagaactacagttccattgtctcgtggtcttgtaatgcactggtaaaaacaaaataaatagatgaataaataaagagtgagagaagagagaatcaggtaccttttttaaattaaaggactttgttactttagccacaaagctaaaacagcattacctcagctctaaactagccttgaagtttacagacatgactttgtaaatgtattgtttttctttgttgtgatgtccttttatttttttctttgaaaactgctatcatgtaagataaaatgtaaattgctgccaactgtagtaatgatgcttttaataaaagtgacccatgatatgcagagatgtaa

SEQ ID NO: 195032 - DNA, 10442 bp, Artificial Sequence
  derived and/or modified sequence
gcggcggcggcagcggcggcggcggcggcggcgcgggggttgagtcgtggtggtgcggacgcgctcgtgctcgggaactatcggattaaacttgaatcgagtgaaattacacaaaggagcgccgcggaggaggcggcccggggacccggacaccctgaaactcaccagagacccgttcgcccccggccaactccgtgcccgtggattcagccccctggccgcagctgccgagccaactccggagcccgctctgcgttttgttttcccctcggcactaggcagcggaggagcccgaccgacccggacctatatccagactttgcctgacactgcagggtccaagagaattaaagaaatatggaatgacatgaagaagattagttaaggattataggctttgagggcaaacacctcagtgaagtgaagcacaggcaagctcctgagctgtggtttggaggagccgtgtgttggaagaagatggcagatccaggaatgatgagtctttttggcgaggatgggaatattttcagtgaaggtcttgaaggcctcggagaatgtggttacccggaaaatccagtaaatcctatgggtcagcaaatgccaatagaccaaggctttgcctctttacagccatcccttcatcatccttcaactaatcaaaatcaaacaaagctgacacattttgatcactataatcagtatgaacaacaaaagatgcatctgatggatcagccgaacagaatgatgagcaacacccctgggaacggactcgcgtctccgcactcgcagtatcacacccctcccgttcctcaggtgccccatggtggcagtggtggcggtcagatgggtgtctaccctggcatgcagaatgagaggcatgggcaatcctttgtggacagcagctccatgtggggccccagggctgttcaggtaccagaccagatacgagccccctaccagcagcagcagccacagccgcagccaccgcagccggctccgtcggggccccctgcacagggccaccctcagcacatgcagcagatgggcagctatatggcacgtggggatttttccatgcagcagcatggtcagccacagcagaggatgagccagttttcccaaggccaagagggcctcaatcagggaaatccttttattgccacctcaggacctggccacttgtcccacgtgccccagcagagtcccagcatggcaccttccttgcgtcactcggtgcagcagttccatcaccacccctctactgctctccatggagaatccgttgcccacagtcccagattctccccgaatcctccccaacaaggggctgttaggccgcaaacccttaactttagttctcggagccagacagtcccctctcctactataaacaactcagggcagtattctcgatatccttacagtaacctaaatcagggattagttaacaatacagggatgaatcaaaatttaggccttacaaataatactccaatgaatcagtccgtaccaagataccccaatgctgtaggattcccatcaaacagtggtcaaggactaatgcaccagcagcccatccaccccagtggctcacttaaccaaatgaacacacaaactatgcatccttcacagcctcagggaacttatgcctctccacctcccatgtcacccatgaaagcaatgagtaatccagcaggcactcctcctccacaagtcaggccgggaagtgctgggataccaatggaagttggcagttatccaaatatgccccatcctcagccatctcaccagccccctggtgccatgggaatcggacagaggaatatgggccccagaaacatgcagcagtctcgtccatttataggcatgtcctcggcaccaagggaattgactgggcacatgaggccaaatggttgtcctggtgttggccttggagacccacaagcaatccaggaacgactgatacctggccaacaacatcctggtcaacagccatcttttcagcagttgccaacctgtcctccactgcagcctcacccgggcttgcaccaccagtcttcacctccacaccctcatcaccagccttgggcacagctccacccatcaccccagaacaccccgcagaaagtgcctgtgcatcagcattccccgtcggagccctttctagagaaaccagtgccggatatgactcaggttagtggaccgaatgctcagctagtgaagagtgatgattacctgccatcaatagaacagcagccacaacaaaagaagaagaaaaagaaaaacaaccacattgtagcagaggatcccagtaaaggttttggtaaagatgacttccctggtggggtagataaccaagaactaaataggaactcactggatgggtcccaagaagaaaaaaagaaaaagaaaaggtcaaaggcaaaaaaagacccgaaggaaccgaaagaacccaaggagaaaaaagagcccaaggaacccaagaccccgaaagcccctaagattcccaaagagccaaaggaaaagaaagcaaaaactgccacgccaaaacccaaatccagcaaaaagtcaagtaataagaaacctgactcagaagcaagtgctttgaagaaaaaggtcaacaagggaaaaacagaaggttctgaaaattcagacttagacaaaacacccccaccatctcctcctcctgaagaagatgaggacccaggtgttcagaagagacggtccagcagacaggtgaagagaaagcgctacactgaagacctggagttcaagatttctgatgaggaggcagatgatgcagatgctgctgggagggattccccctccaacacctcccagtcagaacagcaggaatctgttgatgcagaaggcccagtggtagaaaaaattatgagcagtcgttcagtaaaaaagcagaaggaatctggagaggaggtagaaattgaggaattctatgtgaaatacaaaaacttctcttatcttcattgtcagtgggcatctatagaagatctggaaaaagataagagaattcagcaaaaaattaaacgatttaaggcaaagcagggccagaacaagttcctttcagagattgaggatgagctttttaatccagattatgtggaggttgaccggataatggactttgcacgtagcacagatgaccggggagagcctgtgactcactatctggtgaagtggtgttcacttccttatgaagacagcacgtgggagcggaggcaggacatagatcaagcaaagatcgaggagtttgagaaactaatgtccagggagccggaaacagagcgtgtggagcgacctcctgctgatgattggaagaaatcggagagttccagggagtataaaaacaataacaaactcagggaataccagttggagggagtaaactggctacttttcaattggtacaacatgcgaaactgcattttagcagatgaaatgggtttgggaaaaactatccagtccattacatttctctatgagatatatttgaaaggaatccatggcccttttttagtaattgccccattgtccacaatccccaactgggaaagggaattccgaacctggacagagttgaacgtggttgtgtatcatgggagtcaagctagtcgtcggaccattcagttgtatgaaatgtacttcaaagatccccagggtcgagtgataaaggggtcctataagtttcatgccatcatcactacatttgagatgattttgactgattgtcctgagctgcggaatattccatggcgctgtgtagtcattgatgaagcccacaggctgaagaacaggaactgcaagctgttggagggactcaagatgatggacttggaacacaaagtgctgctgacgggaaccccactccagaacactgtggaagaactcttcagcttgcttcatttcttggaaccaagtcgcttcccttcagaaaccacatttatgcaagaatttggtgatctaaaaacagaagagcaggtgcaaaaacttcaagctattctaaagccaatgatgttgagacgtctcaaagaggatgtagaaaagaacttggcccccaaagaagaaactattattgaagttgagctaacaaacattcagaagaaatattaccgagccatccttgagaagaatttcacatttctttccaaaggcggtggtcaagctaacgtacctaacctattaaacactatgatggaattgcggaagtgctgcaatcatccgtaccttatcaatggtgctgaagagaaaattttggaagagtttaaagaaacacacaatgcagagtctccagattttcagctccaggcaatgatccaggctgctggcaagctagtgctgattgacaagctgctgccaaaactgaaggctggtggccacagggtgcttatcttttcccagatggtgcgctgcttggacatactggaagactacctcattcaaagacggtacccatatgaaaggatcgacggccgagtaagaggcaacctccgccaggcagctatcgacagattctccaaacctgattctgataggtttgttttcctcctgtgtacaagggcaggaggtttaggcattaacctcactgctgctgatacctgcatcatctttgattcagactggaatccccaaaatgacctccaggctcaggctagatgtcatagaataggacagagcaaatctgtgaaaatctacaggctgattacaagaaattcctatgaaagggaaatgttcgacaaggctagtttgaaactgggcctggataaagctgtgctacagtctatgagtggaagagaaaatgctaccaatggggtacaacagctttccaagaaagaaatagaggatcttctacgaaaaggggcctatggtgcactcatggatgaggaggatgaagggtctaaattctgtgaagaagatattgatcagatcctcctacgtcgaacccacaccattaccattgagtcagaagggaaaggttccacatttgctaaggccagttttgttgcatctggaaataggacagatatttccttggatgatccaaatttctggcaaaagtgggctaagaaggctgaattggatattgatgccttaaatgggaggaacaacctggttattgatactccaagagtgagaaagcagaccaggctctacagtgcagtgaaggaagatgagctgatggagttctcagacttggaaagtgattctgaagaaaagccctgtgcaaagccacggcgtccccaggataagtcacagggctatgcaaggagtgaatgtttcagggtggagaagaatctgcttgtctatggttggggacggtggacagacattctttcccacggacgctataaacgccaactcactgagcaagatgtagaaaccatctgcagaaccatcctggtgtactgtcttaatcattacaaaggggatgagaatatcaaaagcttcatctgggatctgatcacacccacagcggatggccagactcgagccttggtcaaccattccggtttgtcagctcctgtgccaaggggaaggaagggaaagaaggtgaaagcccagagcacacagccggtggtgcaggatgccgactggctggccagctgcaacccagatgccctgttccaggaggacagctacaagaaacacctgaagcatcactgtaacaaggtcctgctgcgtgtccgcatgctgtactacctaagacaagaagtgataggagaccaggcggataagatcttagagggtgctgactcaagtgaagccgatgtgtggatccctgaacctttccatgctgaagttcctgcagattggtgggataaggaagcagacaaatccctcttaattggagtgttcaaacatggctatgagaagtacaactccatgcgagctgaccccgcgctgtgctttctggaacgagtcggtatgcctgatgccaaggccatagctgccgagcaaagaggaacagacatgctagcagatggtggtgacgggggagaatttgatagagaagatgaagacccagaatataaaccaaccagaacaccgttcaaagatgaaatagatgaatttgcaaattctccttcagaggataaggaagaatccatggaaatacatgccacaggcaagcacagtgagagtaatgctgagttaggccaactttactggcctaacacttcaaccctgactacacgtctgcgccggctcattactgcctatcagcgcagctataaaaggcaacagatgaggcaagaggccctaatgaagactgaccggcgcagacggcggcctcgagaggaagtgagagctctggaagcggaaagggaagctattatatctgagaagcggcaaaagtggacaagaagagaagaggctgatttttaccgtgtggtatccacctttggggttatttttgaccctgtgaaacagcaatttgactggaaccaatttagagcctttgccaggcttgacaaaaaatctgatgagagtttggagaaatacttcagttgttttgtggccatgtgtaggcgagtatgtcgaatgcccgtcaagccagatgatgaaccgcccgacctctcctccataattgagccgatcacagaggagcgagcctctcgaactctgtaccgcattgagctgctacggaagatccgcgagcaggttctccatcacccccagctgggagagaggcttaagctctgccagccaagcttggatctgccagagtggtgggagtgtggacggcatgaccgagacttgctggttggtgctgctaaacacggggtcagtcggacggattatcacatcctcaatgaccctgagttatccttcttggatgcacataaaaactttgctcaaaacagaggggcaggtaatacatcttccttgaacccactggcagttggatttgtccagactcctccagtcatctcatctgctcatattcaagatgagagggtactggaacaagccgaaggcaaagtggaggagcctgaaaacccagctgccaaggagaaatgtgagggcaaagaagaggaagaagaaaccgatggcagcgggaaggagagcaagcaggaatgtgaggcagaggccagctctgtgaaaaatgaactgaaaggtgttgaggtcggcgcagacactgggtccaaatctatttcagagaaaggttccgaagaggatgaagaggaaaagctggaggatgacgataagtcggaagagtcttcccagcccgaagcaggagctgtctctagagggaagaattttgatgaagaaagcaatgcttccatgagcactgctagagatgaaacccgagatggattctacatggaggacggagatccttcagtagctcagctccttcatgaaagaacatttgccttctcgttttggcctaaggatagagtaatgataaaccgcttagacaacatctgtgaagcagtgttgaaaggcaaatggccagtaaataggcgccagatgtttgatttccaaggcctcatcccaggttacacacccaccacagtggacagccccttgcagaagaggagctttgctgagctctccatggtcggccaagccagcattagtgggagtgaggacatcactacgtctcctcagttgtcaaaggaagatgccctcaacctctctgtccctcgccagcggaggaggaggaggagaaaaatcgaaattgaggccgaaagagctgccaagaggcgaaatctcatggagatggttgcccagcttcgagagtctcaggtggtctcagaaaatggacaagaaaaagttgtagatttatcaaaggcctcaagagaggcaacaagctctacctcaaatttttcatctctttcttcaaagtttatcttgcctaatgtctcaacaccagtgtctgatgcctttaagactcaaatggaactgctccaagcaggcctttcgcgcacacccacaaggcatctccttaatggctccctagtggatggagagcctcccatgaagaggaggcggggaaggaggaaaaatgtggagggacttgatctgcttttcatgagccacaaacggacgtcattgagtgcagaggatgctgaggtgaccaaagcttttgaagaagatatagagaccccaccaacaagaaacattccttctcccggacagctggacccagacacacggatccctgttatcaatcttgaagatgggactaggctggtgggggaagatgctcctaaaaataaggatttagttgaatggctgaagctgcaccctacttacactgttgatatgccaagttatgtaccaaagaatgcagatgtgctgttttcctcatttcagaaaccgaaacagaaacgacatagatgtcgaaaccctaataaattggatataaacactttgacaggagaagaaagggtgcctgttgtcaataaacgaaatgggaagaagatgggtggagctatggcgcctccaatgaaggatctacccaggtggctggaagaaaatcctgaatttgcagttgctccagactggactgatatagttaagcagtctggttttgttcctgagtcgatgtttgaccgccttctcactgggcctgtagtgcggggagagggagcgagcagaagaggaagaaggcccaaaagtgagatcgccagagcagccgcggccgccgctgctgtggcctccacgtcagggatcaaccctttgctggtgaacagcctgtttgctggaatggacctgacgagccttcagaatctccagaatctccagtcgctccagctggcaggcctcatgggcttccctccaggactggcaacagctgccaccgccggaggcgatgcgaagaaccctgctgctgtgctgcccctgatgctgccaggaatggcgggcctgcccaacgtgtttggcttgggcgggctgttgaataaccctctgtcagctgctactggaaacaccactactgcttctagtcaaggagaaccggaagacagcacttcaaaaggagaggagaaaggaaatgagaatgaagacgagaacaaagactctgagaaaagcacagatgctgtttcggctgctgactctgcgaatggatctgttggtgctgctactgccccggctggattgccctcaaacccgctagccttcaaccctttcctcctgtccacaatggccccgggcctcttctacccatccatgtttctacctccaggactggggggattgacgctgcctgggttcccagcattggcaggacttcagaatgccgtgggctccagcgaagaaaaggctgctgacaaggctgagggaggaccctttaaagatggagagacccttgaaggcagcgatgccgaggagagcctggataagactgcagagtcctccctcttagaagacgaaatagcacagggtgaagagctagactcacttgatgggggggatgaaatagaaaacaatgaaaatgatgaataaccagtaccagttccagttcaagtgtttaaaacttttgacaagtggtagtcctactgtttacactcacagttaatgttcatacctagttttataagctgttctgtaacatagtgtagcaaaaaaaaaagttcaagtcatgttatacaggtgtgtcaaaaggtatcttggtcattaagtattgtgcagtgcattatttattatccctaggagagatgaaatttgagaggtgatcatgtctttttaaggaaacttacataatgctctgctttttttttttctcttggtaccattggtattataataaagagcaatttgtaactgagtggcactaatggaagaaagtgctgctcaaaggaagtatgaagttatatatttaattttttaattttaatttttaatttttttgctgtgaaggtcaagctgaaatttaccatacatatcatacttgctcatttgtttccctttttgactgtatgggggttcccacactcgtgcatacacacacatccatacactctgacaatctccacgctagtgtgaacgcctctgtcccgaggcgcagcaataataaggcagctgttgaatgtgaagggtccctttggaaaattaacctactgggagggttcttgccagacagaactacagttccattgtctcgtggtcttgtaatgcactggtaaaaacaaaataaatagatgaataaataaagagtgagagaagagagaatcaggtaccttttttaaattaaaggactttgttactttagccacaaagctaaaacagcattacctcagctctaaactagccttgaagtttacagacatgactttgtaaatgtattgtttttctttgttgtgatgtccttttatttttttctttgaaaactgctatcatgtaagataaaatgtaaattgctgccaactgtagtaatgatgcttttaataaaagtgacccatgatatgcagagatgt

SEQ ID NO: 195033 - DNA, 8994 bp, Artificial Sequence
  derived and/or modified sequence
atggccgaccccggcatgatgagcctgttcggcgaggacggcaacatcttcagcgagggcctggagggcctgggcgagtgcggctaccccgagaaccccgtgaaccccatgggccagcagatgcccatcgaccagggcttcgccagcctgcagcccagcctgcaccaccccagcaccaaccagaaccagaccaagctgacccacttcgaccactacaaccagtacgagcagcagaagatgcacctgatggaccagcccaacagaatgatgagcaacacccccggcaacggcctggccagcccccacagccagtaccacaccccccccgtgccccaggtgccccacggcggcagcggcggcggccagatgggcgtgtaccccggcatgcagaacgagagacacggccagagcttcgtggacagcagcagcatgtggggccccagagccgtgcaggtgcccgaccagatcagagccccctaccagcagcagcagccccagccccagcccccccagcccgcccccagcggcccccccgcccagggccacccccagcacatgcagcagatgggcagctacatggccagaggcgacttcagcatgcagcagcacggccagccccagcagagaatgagccagttcagccagggccaggagggcctgaaccagggcaaccccttcatcgccaccagcggccccggccacctgagccacgtgccccagcagagccccagcatggcccccagcctgagacacagcgtgcagcagttccaccaccaccccagcaccgccctgcacggcgagagcgtggcccacagccccagattcagccccaaccccccccagcagggcgccgtgagaccccagaccctgaacttcagcagcagaagccagaccgtgcccagccccaccatcaacaacagcggccagtacagcagatacccctacagcaacctgaaccagggcctggtgaacaacaccggcatgaaccagaacctgggcctgaccaacaacacccccatgaaccagagcgtgcccagataccccaacgccgtgggcttccccagcaacagcggccagggcctgatgcaccagcagcccatccaccccagcggcagcctgaaccagatgaacacccagaccatgcaccccagccagccccagggcacctacgccagccccccccccatgagccccatgaaggccatgagcaaccccgccggcaccccccccccccaggtgagacccggcagcgccggcatccccatggaggtgggcagctaccccaacatgccccacccccagcccagccaccagccccccggcgccatgggcatcggccagagaaacatgggccccagaaacatgcagcagagcagacccttcatcggcatgagcagcgcccccagagagctgaccggccacatgagacccaacggctgccccggcgtgggcctgggcgacccccaggccatccaggagagactgatccccggccagcagcaccccggccagcagcccagcttccagcagctgcccacctgcccccccctgcagccccaccccggcctgcaccaccagagcagccccccccacccccaccaccagccctgggcccagctgcaccccagcccccagaacaccccccagaaggtgcccgtgcaccagcacagccccagcgagcccttcctggagaagcccgtgcccgacatgacccaggtgagcggccccaacgcccagctggtgaagagcgacgactacctgcccagcatcgagcagcagccccagcagaagaagaagaagaagaagaacaaccacatcgtggccgaggaccccagcaagggcttcggcaaggacgacttccccggcggcgtggacaaccaggagctgaacagaaacagcctggacggcagccaggaggagaagaagaagaagaagagaagcaaggccaagaaggaccccaaggagcccaaggagcccaaggagaagaaggagcccaaggagcccaagacccccaaggcccccaagatccccaaggagcccaaggagaagaaggccaagaccgccacccccaagcccaagagcagcaagaagagcagcaacaagaagcccgacagcgaggccagcgccctgaagaagaaggtgaacaagggcaagaccgagggcagcgagaacagcgacctggacaagacccccccccccagccccccccccgaggaggacgaggaccccggcgtgcagaagagaagaagcagcagacaggtgaagagaaagagatacaccgaggacctggagttcaagatcagcgacgaggaggccgacgacgccgacgccgccggcagagacagccccagcaacaccagccagagcgagcagcaggagagcgtggacgccgagggccccgtggtggagaagatcatgagcagcagaagcgtgaagaagcagaaggagagcggcgaggaggtggagatcgaggagttctacgtgaagtacaagaacttcagctacctgcactgccagtgggccagcatcgaggacctggagaaggacaagagaatccagcagaagatcaagagattcaaggccaagcagggccagaacaagttcctgagcgagatcgaggacgagctgttcaaccccgactacgtggaggtggacagaatcatggacttcgccagaagcaccgacgacagaggcgagcccgtgacccactacctggtgaagtggtgcagcctgccctacgaggacagcacctgggagagaagacaggacatcgaccaggccaagatcgaggagttcgagaagctgatgagcagagagcccgagaccgagagagtggagagaccccccgccgacgactggaagaagagcgagagcagcagagagtacaagaacaacaacaagctgagagagtaccagctggagggcgtgaactggctgctgttcaactggtacaacatgagaaactgcatcctggccgacgagatgggcctgggcaagaccatccagagcatcaccttcctgtacgagatctacctgaagggcatccacggccccttcctggtgatcgcccccctgagcaccatccccaactgggagagagagttcagaacctggaccgagctgaacgtggtggtgtaccacggcagccaggccagcagaagaaccatccagctgtacgagatgtacttcaaggacccccagggcagagtgatcaagggcagctacaagttccacgccatcatcaccaccttcgagatgatcctgaccgactgccccgagctgagaaacatcccctggagatgcgtggtgatcgacgaggcccacagactgaagaacagaaactgcaagctgctggagggcctgaagatgatggacctggagcacaaggtgctgctgaccggcacccccctgcagaacaccgtggaggagctgttcagcctgctgcacttcctggagcccagcagattccccagcgagaccaccttcatgcaggagttcggcgacctgaagaccgaggagcaggtgcagaagctgcaggccatcctgaagcccatgatgctgagaagactgaaggaggacgtggagaagaacctggcccccaaggaggagaccatcatcgaggtggagctgaccaacatccagaagaagtactacagagccatcctggagaagaacttcaccttcctgagcaagggcggcggccaggccaacgtgcccaacctgctgaacaccatgatggagctgagaaagtgctgcaaccacccctacctgatcaacggcgccgaggagaagatcctggaggagttcaaggagacccacaacgccgagagccccgacttccagctgcaggccatgatccaggccgccggcaagctggtgctgatcgacaagctgctgcccaagctgaaggccggcggccacagagtgctgatcttcagccagatggtgagatgcctggacatcctggaggactacctgatccagagaagatacccctacgagagaatcgacggcagagtgagaggcaacctgagacaggccgccatcgacagattcagcaagcccgacagcgacagattcgtgttcctgctgtgcaccagagccggcggcctgggcatcaacctgaccgccgccgacacctgcatcatcttcgacagcgactggaacccccagaacgacctgcaggcccaggccagatgccacagaatcggccagagcaagagcgtgaagatctacagactgatcaccagaaacagctacgagagagagatgttcgacaaggccagcctgaagctgggcctggacaaggccgtgctgcagagcatgagcggcagagagaacgccaccaacggcgtgcagcagctgagcaagaaggagatcgaggacctgctgagaaagggcgcctacggcgccctgatggacgaggaggacgagggcagcaagttctgcgaggaggacatcgaccagatcctgctgagaagaacccacaccatcaccatcgagagcgagggcaagggcagcaccttcgccaaggccagcttcgtggccagcggcaacagaaccgacatcagcctggacgaccccaacttctggcagaagtgggccaagaaggccgagctggacatcgacgccctgaacggcagaaacaacctggtgatcgacacccccagagtgagaaagcagaccagactgtacagcgccgtgaaggaggacgagctgatggagttcagcgacctggagagcgacagcgaggagaagccctgcgccaagcccagaagaccccaggacaagagccagggctacgccagaagcgagtgcttcagagtggagaagaacctgctggtgtacggctggggcagatggaccgacatcctgagccacggcagatacaagagacagctgaccgagcaggacgtggagaccatctgcagaaccatcctggtgtactgcctgaaccactacaagggcgacgagaacatcaagagcttcatctgggacctgatcacccccaccgccgacggccagaccagagccctggtgaaccacagcggcctgagcgcccccgtgcccagaggcagaaagggcaagaaggtgaaggcccagagcacccagcccgtggtgcaggacgccgactggctggccagctgcaaccccgacgccctgttccaggaggacagctacaagaagcacctgaagcaccactgcaacaaggtgctgctgagagtgagaatgctgtactacctgagacaggaggtgatcggcgaccaggccgacaagatcctggagggcgccgacagcagcgaggccgacgtgtggatccccgagcccttccacgccgaggtgcccgccgactggtgggacaaggaggccgacaagagcctgctgatcggcgtgttcaagcacggctacgagaagtacaacagcatgagagccgaccccgccctgtgcttcctggagagagtgggcatgcccgacgccaaggccatcgccgccgagcagagaggcaccgacatgctggccgacggcggcgacggcggcgagttcgacagagaggacgaggaccccgagtacaagcccaccagaacccccttcaaggacgagatcgacgagttcgccaacagccccagcgaggacaaggaggagagcatggagatccacgccaccggcaagcacagcgagagcaacgccgagctgggccagctgtactggcccaacaccagcaccctgaccaccagactgagaagactgatcaccgcctaccagagaagctacaagagacagcagatgagacaggaggccctgatgaagaccgacagaagaagaagaagacccagagaggaggtgagagccctggaggccgagagagaggccatcatcagcgagaagagacagaagtggaccagaagagaggaggccgacttctacagagtggtgagcaccttcggcgtgatcttcgaccccgtgaagcagcagttcgactggaaccagttcagagccttcgccagactggacaagaagagcgacgagagcctggagaagtacttcagctgcttcgtggccatgtgcagaagagtgtgcagaatgcccgtgaagcccgacgacgagccccccgacctgagcagcatcatcgagcccatcaccgaggagagagccagcagaaccctgtacagaatcgagctgctgagaaagatcagagagcaggtgctgcaccacccccagctgggcgagagactgaagctgtgccagcccagcctggacctgcccgagtggtgggagtgcggcagacacgacagagacctgctggtgggcgccgccaagcacggcgtgagcagaaccgactaccacatcctgaacgaccccgagctgagcttcctggacgcccacaagaacttcgcccagaacagaggcgccggcaacaccagcagcctgaaccccctggccgtgggcttcgtgcagaccccccccgtgatcagcagcgcccacatccaggacgagagagtgctggagcaggccgagggcaaggtggaggagcccgagaaccccgccgccaaggagaagtgcgagggcaaggaggaggaggaggagaccgacggcagcggcaaggagagcaagcaggagtgcgaggccgaggccagcagcgtgaagaacgagctgaagggcgtggaggtgggcgccgacaccggcagcaagagcatcagcgagaagggcagcgaggaggacgaggaggagaagctggaggacgacgacaagagcgaggagagcagccagcccgaggccggcgccgtgagcagaggcaagaacttcgacgaggagagcaacgccagcatgagcaccgccagagacgagaccagagacggcttctacatggaggacggcgaccccagcgtggcccagctgctgcacgagagaaccttcgccttcagcttctggcccaaggacagagtgatgatcaacagactggacaacatctgcgaggccgtgctgaagggcaagtggcccgtgaacagaagacagatgttcgacttccagggcctgatccccggctacacccccaccaccgtggacagccccctgcagaagagaagcttcgccgagctgagcatggtgggccaggccagcatcagcggcagcgaggacatcaccaccagcccccagctgagcaaggaggacgccctgaacctgagcgtgcccagacagagaagaagaagaagaagaaagatcgagatcgaggccgagagagccgccaagagaagaaacctgatggagatggtggcccagctgagagagagccaggtggtgagcgagaacggccaggagaaggtggtggacctgagcaaggccagcagagaggccaccagcagcaccagcaacttcagcagcctgagcagcaagttcatcctgcccaacgtgagcacccccgtgagcgacgccttcaagacccagatggagctgctgcaggccggcctgagcagaacccccaccagacacctgctgaacggcagcctggtggacggcgagccccccatgaagagaagaagaggcagaagaaagaacgtggagggcctggacctgctgttcatgagccacaagagaaccagcctgagcgccgaggacgccgaggtgaccaaggccttcgaggaggacatcgagaccccccccaccagaaacatccccagccccggccagctggaccccgacaccagaatccccgtgatcaacctggaggacggcaccagactggtgggcgaggacgcccccaagaacaaggacctggtggagtggctgaagctgcaccccacctacaccgtggacatgcccagctacgtgcccaagaacgccgacgtgctgttcagcagcttccagaagcccaagcagaagagacacagatgcagaaaccccaacaagctggacatcaacaccctgaccggcgaggagagagtgcccgtggtgaacaagagaaacggcaagaagatgggcggcgccatggccccccccatgaaggacctgcccagatggctggaggagaaccccgagttcgccgtggcccccgactggaccgacatcgtgaagcagagcggcttcgtgcccgagagcatgttcgacagactgctgaccggccccgtggtgagaggcgagggcgccagcagaagaggcagaagacccaagagcgagatcgccagagccgccgccgccgccgccgccgtggccagcaccagcggcatcaaccccctgctggtgaacagcctgttcgccggcatggacctgaccagcctgcagaacctgcagaacctgcagagcctgcagctggccggcctgatgggcttcccccccggcctggccaccgccgccaccgccggcggcgacgccaagaaccccgccgccgtgctgcccctgatgctgcccggcatggccggcctgcccaacgtgttcggcctgggcggcctgctgaacaaccccctgagcgccgccaccggcaacaccaccaccgccagcagccagggcgagcccgaggacagcaccagcaagggcgaggagaagggcaacgagaacgaggacgagaacaaggacagcgagaagagcaccgacgccgtgagcgccgccgacagcgccaacggcagcgtgggcgccgccaccgcccccgccggcctgcccagcaaccccctggccttcaaccccttcctgctgagcaccatggcccccggcctgttctaccccagcatgttcctgccccccggcctgggcggcctgaccctgcccggcttccccgccctggccggcctgcagaacgccgtgggcagcagcgaggagaaggccgccgacaaggccgagggcggccccttcaaggacggcgagaccctggagggcagcgacgccgaggagagcctggacaagaccgccgagagcagcctgctggaggacgagatcgcccagggcgaggagctggacagcctggacggcggcgacgagatcgagaacaacgagaacgacgagtag

SEQ ID NO: 195034 - protein, 490 aa, Artificial Sequence
  derived and/or modified sequence
MALLLLLFLGLLGLWGLLCACAQDPSPAARWPPGPRPLPLVGNLHLLRLSQQDRSLMELSERYGPVFTVHLGRQKTVVLTGFEAVKEALAGPGQELADRPPIAIFQLIQRGGGIFFSSGARWRAARQFTVRALHSLGVGREPVADKILQELKCLSGQLDGYRGRPFPLALLGWAPSNITFALLFGRRFDYRDPVFVSLLGLIDEVMVLLGSPGLQLFNVYPWLGALLQLHRPVLRKIEEVRAILRTLLEARRPHVCPGDPVCSYVDALIQQGQGDDPEGLFAEANAVACTLDMVMAGTETTSATLQWAALLMGRHPDVQGRVQEELDRVLGPGRTPRLEDQQALPYTSAVLHEVQRFITLLPHVPRCTAADTQLGGFLLPKGTPVIPLLTSVLLDETQWQTPGQFNPGHFLDANGHFVKREAFLPFSAGRRVCVGERLARTELFLLFAGLLQRYRLLPPPGVSPASLDTTPARAFTMRPRAQALCAVPRP

SEQ ID NO: 195035 - DNA, 1473 bp, Artificial Sequence
  derived and/or modified sequence
atggccctgctgctgctgctgttcctgggcctgctgggcctgtggggcctgctgtgcgcctgcgcccaggaccccagccccgccgccagatggccccccggccccagacccctgcccctggtgggcaacctgcacctgctgagactgagccagcaggacagaagcctgatggagctgagcgagagatacggccccgtgttcaccgtgcacctgggcagacagaagaccgtggtgctgaccggcttcgaggccgtgaaggaggccctggccggccccggccaggagctggccgacagaccccccatcgccatcttccagctgatccagagaggcggcggcatcttcttcagcagcggcgccagatggagagccgccagacagttcaccgtgagagccctgcacagcctgggcgtgggcagagagcccgtggccgacaagatcctgcaggagctgaagtgcctgagcggccagctggacggctacagaggcagacccttccccctggccctgctgggctgggcccccagcaacatcaccttcgccctgctgttcggcagaagattcgactacagagaccccgtgttcgtgagcctgctgggcctgatcgacgaggtgatggtgctgctgggcagccccggcctgcagctgttcaacgtgtacccctggctgggcgccctgctgcagctgcacagacccgtgctgagaaagatcgaggaggtgagagccatcctgagaaccctgctggaggccagaagaccccacgtgtgccccggcgaccccgtgtgcagctacgtggacgccctgatccagcagggccagggcgacgaccccgagggcctgttcgccgaggccaacgccgtggcctgcaccctggacatggtgatggccggcaccgagaccaccagcgccaccctgcagtgggccgccctgctgatgggcagacaccccgacgtgcagggcagagtgcaggaggagctggacagagtgctgggccccggcagaacccccagactggaggaccagcaggccctgccctacaccagcgccgtgctgcacgaggtgcagagattcatcaccctgctgccccacgtgcccagatgcaccgccgccgacacccagctgggcggcttcctgctgcccaagggcacccccgtgatccccctgctgaccagcgtgctgctggacgagacccagtggcagacccccggccagttcaaccccggccacttcctggacgccaacggccacttcgtgaagagagaggccttcctgcccttcagcgccggcagaagagtgtgcgtgggcgagagactggccagaaccgagctgttcctgctgttcgccggcctgctgcagagatacagactgctgcccccccccggcgtgagccccgccagcctggacaccacccccgccagagccttcaccatgagacccagagcccaggccctgtgcgccgtgcccagaccctag

SEQ ID NO: 195036 - DNA, 2304 bp, Artificial Sequence
  derived and/or modified sequence
cagccacgtcctcatggccctgctgctcttgctgttcctgggcctcctggggctctgggggctgctctgcgcctgcgcccaagacccctccccagctgcccggtggcccccggggcctcgcccgctgccgctcgtcgggaacctgcacttgctgcgtctgtcgcaacaggaccggtccctgatggagctctcagaacgctacgggccggtgttcaccgtgcacctggggcgccagaagacggtggtgctgacggggttcgaggcggtcaaagaggcgctggcgggccccgggcaggagctggccgaccggcctcccatcgccatcttccagctcatccagcgaggtggaggcatcttcttctcatctggggcgcgctggagggctgcccgccagttcacggtgcgtgccctgcacagcctgggcgtgggccgggagccggtggctgacaagattctgcaggagctgaaatgcctctctgggcagctggatggctacagaggccggcccttcccgctggccctactgggctgggctccctccaatatcaccttcgcgctcctcttcggccgccgatttgactaccgggaccccgtgtttgtgtccctgctgggtctcatcgatgaggtcatggtcctcttggggtcccctggcctgcagctgttcaacgtctacccatggctcggggccctgctccagctgcaccggcccgtcctgcgcaagatcgaggaggtccgtgccattctgaggaccctcctggaggcgcggaggccccacgtgtgcccgggggaccccgtgtgcagctatgtggacgccctgatccagcagggacagggggatgaccccgagggcctgtttgctgaggccaacgcggtggcctgcaccctggacatggtcatggccgggacggagacgacctcggccacgctgcagtgggccgcacttctgatgggccggcacccggacgtgcagggccgggtgcaggaggagctagaccgcgtgctgggccctgggcggactccccggctggaggaccagcaggctctgccctacacaagcgccgtgctccacgaggtgcagcggttcatcacgctcctgccgcacgtgccccgctgcaccgcggccgacacacagctgggcggcttcctgctccccaagggcacgcccgtgattcccctgctgacctcggtgctcctggatgagacacagtggcagaccccaggccagttcaaccccggccatttcctggacgcgaatgggcactttgtgaagcgggaggccttcctgcctttctctgcaggccgccgcgtctgtgttggggagcgcctggccaggaccgagctcttcctgctgtttgccggcctcctgcagaggtaccgcctgctgcccccgcctggcgtcagtccggcctccctggacaccacgcccgcccgggcttttaccatgaggccgagggcccaggccctgtgtgcggtgcccaggccctaggagctcccccagcccccaggtcctcctgaccactcccctcccagccctgggtcctcccaccctctctcctcccaccccacagctcggactgctctgggagggccctgaggactcccaccctcacccccacccccacagggtcagcaactgcttccggttacacccaggactacccctgcccgaccctgtgggacccccacccctctgatgctgtctgcagctcagtccctgccagcccccaggagcgcctccagggccccgcccactctcccacccctgaagctgcactcccacccacctagctccccccagggccccccagcacctacagctggggctgcagggagacaacgggtggctgcatccagccagagacaggcgcaggtgggtgtcctcagcgtgcgagccctgcaccccccaggtcctgggactcctgcagaccccactccattcccgctcctggaacacttcctgcagctgtgcctggaggcagtcggcctgcagtgccagactctgagccaagccactggggccatgcgtatgactggtgcagggaggcaaggcccacattctccttcagagacaggcactggcgccagaggcttccttggggcggggggagggcacctcagcccctgaagacaagcagcactgcagtggcaaaaatggaaacactgacccggtgcggtggctcatgcctgtaatcccagcactttgggaggccgaggcaggcgaatcacgaggtcaggagttcgagaccagcctgcccaacatggtgaaaccctgtctctactaaaaatacaaaaaaattaaccgag

SEQ ID NO: 195037 - DNA, 1473 bp, Artificial Sequence
  derived and/or modified sequence
atggccctgctcctgctcttatttctaggcctactcggcctatggggcttgctttgcgcctgcgctcaggatcccagccccgccgctagatggcctcccggaccgaggccgctgcccctagtgggcaaccttcacttgctgcggctctcgcaacaggatcgctccttgatggagcttagtgagaggtatggacctgtgttcacagttcacctggggcggcagaagacagtagtcctgacaggctttgaagcagtcaaagaagctctggcgggcccaggacaggaactcgccgacaggccgcctatagcgattttccagctgatccagaggggggggggcatcttcttcagctcaggagcccgatggcgcgccgcccgccagtttactgtccgcgccctgcacagtctgggcgtcggccgagagcctgtggcggataagatcttgcaggagctcaagtgccttagcggccaactggacggttatcgtgggcggccgtttccactggccctgctgggatgggcacccagcaatattacgttcgccctgctatttggccggagatttgactatcgcgatccggtgttcgttagcctactaggcttaattgatgaagtcatggtgctgctggggtccccaggcctgcaactgtttaacgtgtacccgtggctgggggccctgctgcaattgcatcgacctgtgttgaggaagatcgaagaagtacgtgccatcctacggactctgttggaagcccggagaccgcatgtatgtccgggcgaccctgtttgtagctatgttgacgctctcatacagcaggggcagggggatgatccagaaggcttattcgccgaggcaaacgccgttgcctgcacattggatatggtgatggccggcaccgaaaccaccagtgcaaccctgcagtgggccgcactgctaatgggtaggcatccagatgtgcagggtcgagttcaggaggagctcgaccgggtgctggggcctggcagaacccctagactggaggaccagcaggctctcccctatacatctgccgtacttcatgaggtgcagcggtttattacattgttgccccatgtgccccgttgtaccgccgccgacacacagctcggagggtttctgctccccaaaggcacaccggtgattcccctgctgacatctgtactcttggacgagacgcaatggcaaaccccgggtcagtttaaccctggccacttcctggatgcgaatggacatttcgtcaagagggaagcctttctgccattctccgccgggcgacgggtgtgtgtcggagagcggctggctcggacagagctctttttgctgttcgccggtctgctgcaacgctacagacttctgccaccccctggagtcagtccagcttcgttagatactacgccagcacgtgctttcaccatgagacctagggcacaggcgctttgcgctgtgccccgcccatag

SEQ ID NO: 195038 - DNA, 1473 bp, Artificial Sequence
  derived and/or modified sequence
atggccctgctgctgctgctcttcctgggcctgctgggcctgtggggcctgctgtgtgcctgtgcccaggaccccagccctgctgcccgctggcccccaggcccccggcccctgcccctggtgggcaacctgcacctgctgcggctgagccagcaggacaggagcctgatggagctgtctgaaagatatggccctgtgttcaccgtgcacctgggccggcagaagacagtggtgctgaccggctttgaggccgtgaaggaggccctggccggccctggccaggagctggccgaccggccccccatcgccatcttccagctgatccagagaggaggcggcatcttcttcagcagcggggcccgctggagggctgcccggcagttcaccgtgcgggccctgcacagcctgggcgtgggccgggagcctgtggccgacaagatcctgcaggagctgaagtgcctgagcggccagctggatggctaccggggccggcccttccccctggccctgctgggctgggcccccagcaacatcacctttgccctgctgtttggccgccgctttgactacagagatcctgtgtttgtgtccctgctgggcctgattgatgaggtgatggtgctgctgggcagccctggcctgcagctgttcaacgtgtacccctggctgggcgccctgctgcagctgcacaggcctgtgctgaggaagattgaggaggtgcgggccatcctgcggaccctgctggaggcccggcggccccacgtgtgccctggggaccctgtgtgcagctatgtggatgccctgatccagcagggccagggagatgatcctgagggcctgtttgctgaggccaatgctgtggcctgcaccctggacatggtgatggccggcacagagaccaccagcgccaccctgcagtgggccgccctgctgatgggccgccacccagatgtgcagggccgggtgcaggaggagctggacagagtgctgggccctggccgcaccccccggctggaggaccagcaggccctgccctacaccagcgctgtgctgcacgaggtgcagcgcttcatcaccctgctgccccacgtgccccgctgcacagctgctgacacccagctgggcggcttcctgctgcccaagggcacccctgtgatccccctgctgacctctgtgctgctggatgagacccagtggcagaccccaggccagttcaaccctggccacttcctggatgccaacggccactttgtgaagcgggaggccttcctgcccttctctgctggccggcgggtgtgtgtgggggagcggctggccaggacagagctgttcctgctgtttgctggcctgctgcagcgctaccgcctgctgcccccacctggggtgtccccagccagcctggacaccaccccagcccgggccttcaccatgaggccccgggcccaggccctgtgtgctgtgccccggccctag

SEQ ID NO: 195039 - DNA, 1473 bp, Artificial Sequence
  derived and/or modified sequence
atggccctgctgctgctgctgttcctgggcctgctgggcctgtggggactgctctgtgcttgtgctcaggaccccagtccggcagcacggtggccacccggtcccagacctctgcccctggtggggaacctgcatctgctacgtcttagtcagcaagatagaagtctcatggagctgagcgagcgatacggccccgtgttcacggttcatcttggcaggcaaaaaactgtagtgcttaccggcttcgaggcagtgaaggaggcccttgcaggccctggacaggagttggcagacagaccccctattgcaatcttccagctcatacagaggggcggcgggatcttcttctcttcaggggcccggtggcgagccgctagacagttcactgttcgggcactccattccctgggagtgggacgtgaacctgtcgcggacaagatattacaggaactgaaatgtttatctggacagctggatggataccgcggccgcccgttccccctcgcacttctcggatgggccccttcgaatatcacctttgccttgctgttcggaagaaggttcgattatcgcgaccctgtgttcgtcagtttgctgggtctgattgatgaggtgatggtgcttctgggatcccctggactccagttattcaacgtctatccatggcttggggcccttcttcagctacatcggcccgtccttcgcaagatagaggaagtgagggctatcctccgcaccctcctcgaagcccgtcggccccatgtgtgtcccggcgaccccgtgtgcagctacgtggatgccctgattcagcagggtcagggcgacgatccagagggtctgtttgctgaagcaaacgccgtagcttgtacactggacatggtaatggccggaacagaaacgacttcagccacactacagtgggccgcattattaatggggcgacacccagatgttcaagggagggtccaggaggagcttgaccgggtcctgggtccggggcgcacaccaagattggaggatcagcaggctctgccctatacaagtgccgtgctgcatgaggtgcagaggttcattacattgctccctcacgtaccgaggtgtacagccgccgacacccaattgggcgggttcctgctgcccaagggaactcccgtcatccccctgcttacatctgtgctactcgatgaaacacagtggcagacccctggacagtttaaccccggtcatttcttggatgctaacggccattttgtgaaaagggaggcttttttaccttttagcgctggacgaagggtgtgtgtcggagagcgcctggccagaactgaactattcttgcttttcgctgggctcctgcagagatacagattgctccctccaccgggcgtgtccccagcctctctggataccacccccgcacgcgcgttcacaatgaggccgagggcccaggccctatgtgcagtaccaagaccttag

SEQ ID NO: 195040 - DNA, 1473 bp, Artificial Sequence
  derived and/or modified sequence
atggctctacttctgttgctttttctgggactcttagggctgtggggccttttgtgcgcttgcgctcaagatcctagccctgccgcacggtggcccccaggcccacggccacttcccctggtgggcaacctgcatttgctgagactgagtcagcaggaccgtagcctgatggagctgtccgagcgatatggacctgtgttcacggtccatctgggacgccagaagacagtggttctcaccgggttcgaggcggtgaaagaagccctcgccggaccaggacaggaactggcggacaggccccctattgcgatttttcaactgatccaaagggggggtggcatcttctttagcagtggagctagatggagagcagccagacaatttaccgtgcgggcactgcactccttaggggtgggacgggagcccgtcgctgataaaattctccaggagcttaaatgcctctcaggacaactggatgggtatcgcggaaggcctttcccactggcactgctgggatgggcaccctcgaatattacctttgccctcctgttcggccgtcggttcgactacagagatccagtgtttgtgtccctgctggggctcattgatgaagtaatggtcctgctgggctcccctggtctgcagctgtttaacgtgtacccttggctaggcgcactgctgcaacttcacaggcccgtgctgcggaagatcgaggaggtgcgggctatccttcgcacccttctcgaggctcggcgaccccacgtgtgtcccggagatcctgtttgttcctatgtcgatgctctgatccagcagggccagggcgacgaccccgaggggctgttcgctgaggcaaatgctgtggcttgtacactggacatggtgatggcaggtacagaaacaacctctgccactcttcaatgggctgcgctcttgatgggacgacatcctgacgtgcaaggacgcgtgcaagaagagctggaccgggtcttaggccctggccgaacccctaggctggaggaccagcaagccctgccatatacctcagccgtgctgcacgaggtgcaacggttcatcacccttctgccccatgtgccaagatgtacggcagctgacacccaactgggtgggttcttattgcctaaggggacgcctgttatccccctgttaacaagtgttttactggatgagacccagtggcagactcctgggcaatttaacccagggcatttcctcgacgcaaacggtcactttgtcaagagggaggcattcctccccttcagtgccggacgacgcgtgtgcgtgggcgaaaggctggctcgaaccgagcttttccttctatttgctggactgctgcagagatacagactcctgccgcctcctggggtgagtcccgctagtctggacactactcccgcacgcgcttttactatgagacctcgagctcaagccttgtgcgccgttccaagaccctag

SEQ ID NO: 195041 - protein, 764 aa, Artificial Sequence
  derived and/or modified sequence
MERAVQGTDGGGGSNSSSRSSSRATSAGSSPSCSLAGRGVSSRSAAAGLGGGGSRSSPGSVAASPSGGGGRRREPALEGVLSKYTNLLQGWQNRYFVLDFEAGILQYFVNEQSKHQKPRGVLSLSGAIVSLSDEAPHMLVVYSANGEMFKLRAADAKEKQFWVTQLRACAKYHMEMNSKSAPSSRSRSLTLLPHGTPNSASPCSQRHLSVGAPGVVTITHHKSPAAARRAKSQYSGQLHEVREMMNQVEGQQKNLVHAIESLPGSGPLTALDQDLLLLKATSAATLSCLGECLNLLQQSVHQAGQPSQKPGASENILGWHGSKSHSTEQLKNGTLGSLPSASANITWAILPNSAEDEQTSQPEPEPNSGSELVLSEDEKSDNEDKEETELGVMEDQRSIILHLISQLKLGMDLTKVVLPTFILEKRSLLEMYADFMAHPDLLLAITAGATPEERVICFVEYYLTAFHEGRKGALAKKPYNPIIGETFHCSWEVPKDRVKPKRTASRSPASCHEHPMADDPSKSYKLRFVAEQVSHHPPISCFYCECEEKRLCVNTHVWTKSKFMGMSVGVSMIGEGVLRLLEHGEEYVFTLPSAYARSILTIPWVELGGKVSINCAKTGYSATVIFHTKPFYGGKVHRVTAEVKHNPTNTIVCKAHGEWNGTLEFTYNNGETKVIDTTTLPVYPKKIRPLEKQGPMESRNLWREVTRYLRLGDIDAATEQKRHLEEKQRVEERKRENLRTPWKPKYFIQEGDGWVYFNPLWKAH

SEQ ID NO: 195042 - DNA, 2295 bp, Artificial Sequence
  derived and/or modified sequence
atggaaagggccgtccaaggtaccgatgggggagggggatcaaactctagctcaagatccagctctcgcgcaacctctgctggctcatcaccttcgtgcagcttggctggacggggagtgtcatctcgaagtgccgcagcaggtctggggggcggcgggtccaggtcatctcccggttctgttgcagcctctccctccggtggaggcggaaggaggcgagaaccggctctggaaggggtgctctccaagtacactaacctcctccagggttggcagaatcgttacttcgtcctagacttcgaagctggcatcctacagtacttcgtcaatgagcagagcaagcatcaaaaacctcggggggttctttccttgagcggagcaatagtttcactgtccgacgaggcccctcatatgctggtcgtttatagcgccaatggagagatgttcaagcttagggcagccgacgccaaggaaaaacagttttgggtgactcaactgagggcctgcgccaaatatcacatggagatgaacagtaaatccgccccttcatctcgcagccgttccctcacccttctccctcacggcactccaaattcggccagcccttgttcacaacgccatttatccgtgggcgctcccggggtggtgaccatcactcaccataagagtccggctgcagccagacgagccaaatcacaatacagcggacaactccatgaggtacgtgagatgatgaaccaagtagaaggacagcagaaaaatttggtgcacgctatcgagtctttgccaggctccgggcctctcactgctctggatcaagacctactcttattaaaagcaacatccgccgccactctttcttgcctgggtgaatgtctcaatttactgcagcagagcgttcaccaagccggccagcccagtcagaagcccggagcctcagaaaatatcctaggctggcatggatcaaagagtcattctaccgagcagcttaagaacgggactttaggctctctaccctcagcctccgctaatataacctgggccatcctgcccaacagcgccgaagacgagcagacttcacaaccggaaccagagccaaactctggcagcgagctcgtgctgtccgaggacgaaaaaagcgataatgaagataaagaggaaaccgagctcggtgtcatggaagatcaaaggtccatcatcctccatctgatctcccagctgaagctcggaatggatctaaccaaggtggtgctgcctacctttattctggagaaacggtccctgctggagatgtacgccgattttatggcccaccctgatctactcctggcgataacagctggcgcaacacctgaagagagggtcatttgctttgtggagtactatctcaccgcctttcacgagggtcgcaagggcgccttggccaaaaagccctacaaccctataatcggtgagaccttccattgttcttgggaggtccctaaagaccgcgtgaagcctaaaaggactgcctcgagatcgcccgcatcttgtcacgagcaccccatggctgatgacccttcaaaatcttacaagcttagatttgtggcggagcaggtgtcccaccacccacccatctcttgcttttactgcgagtgcgaagagaagcggttatgtgtgaatacacatgtgtggactaagtcaaagtttatgggaatgtcagtcggggtctccatgattggagaaggagttttgagactccttgagcacggggaggagtatgtgttcacactgccctccgcatatgctcggagtatcttgaccatcccttgggtggagctggggggtaaagtgtctatcaattgtgcaaaaaccggatatagcgctaccgtgatctttcacacaaagcctttttatggcggtaaggtccaccgagtcactgccgaagtaaagcacaatccaacaaacactatcgtctgcaaggcccatggagaatggaatggtacactggaatttacatataataacggagagaccaaggtcatcgacacaaccactttaccagtgtatcccaagaaaataagaccgctggaaaaacagggacccatggagtcacgtaacctctggagggaggtgacccggtatttgagactgggagatatcgatgcggcaaccgagcagaagcgccatctagaggagaagcagcgagtcgaggagcggaaaagagaaaacttacggaccccctggaagccgaagtacttcatacaggagggtgatggctgggtgtactttaatcctctttggaaagcacactag

SEQ ID NO: 195043 - DNA, 2295 bp, Artificial Sequence
  derived and/or modified sequence
atggagagagctgtgcagggcacagatggcggcggcggcagcaacagcagcagccgcagcagcagccgggccaccagcgctggcagcagccccagctgcagcctggccggccggggcgtgagcagccgctctgctgctgctggcctgggcggcggcggcagccgcagcagccctggctctgtggccgccagccccagcggcggcggcggcagaagaagagagcccgccctggagggcgtgctgagcaagtacaccaacctgctgcagggctggcagaaccgctactttgtgctggactttgaggccggcatcctgcagtactttgtgaatgagcagagcaagcaccagaagccccggggcgtgctgagcctgagcggggccatcgtgtccctgagtgatgaggccccccacatgctggtggtgtacagcgccaatggagagatgttcaagctgcgggcagcagatgccaaggagaagcagttctgggtgacccagctgcgggcctgtgccaagtaccacatggagatgaacagcaagagcgcccccagcagccgcagccgcagcctgaccctgctgccccacggcacccccaacagcgccagcccctgcagccagaggcacctgtctgtgggcgcccctggggtggtgaccatcacccaccacaagagccctgctgctgcccggcgggccaagagccagtacagcggccagctgcacgaggtgcgggagatgatgaaccaggtggagggccagcagaagaacctggtgcacgccatcgagagcctgcccggcagcggccccctgacagccctggaccaggacctgctgctgctgaaggccaccagcgctgccaccctgagctgcctgggagaatgtctgaacctgctgcagcagagcgtgcaccaggccggccagcccagccagaagccaggggccagcgagaacatcctgggctggcacggcagcaagagccacagcacagagcagctgaagaatggcaccctgggcagcctgcccagcgccagcgccaacatcacctgggccatcctgcccaacagcgcagaagatgagcagaccagccagcctgagcctgagcccaacagcggcagcgagctggtgctgtctgaagatgagaagagtgacaatgaagacaaggaggagacagagctgggcgtgatggaggaccagaggagcatcatcctgcacctgatcagccagctgaagctgggcatggacctgaccaaggtggtgctgcccaccttcatcctggagaagaggagcctgctggagatgtatgctgacttcatggcccacccagacctgctgctggccatcacagctggggccaccccagaggagagggtcatctgctttgtggagtactacctgacagccttccacgagggcaggaaaggagccctggccaagaagccctacaaccccatcattggagagaccttccactgctcctgggaggtgcccaaggacagagtgaagcccaagaggacagccagccgcagccctgccagctgccacgagcaccccatggctgatgaccccagcaagagctacaagctgcgctttgtggccgagcaggtgagccaccacccccccatcagctgcttctactgtgaatgtgaggagaagaggctgtgtgtgaacacccacgtgtggaccaagagcaagttcatgggcatgtctgtgggcgtgtccatgattggagagggcgtgctgcggctgctggagcacggggaggagtatgtgttcaccctgcccagcgcctatgcccggagcatcctgaccatcccctgggtggagctgggcggcaaggtgtccatcaactgtgccaagacaggctacagcgccaccgtcatcttccacaccaagcccttctacggcggcaaggtgcaccgggtgacagctgaggtgaagcacaaccccaccaacaccatcgtgtgcaaggcccacggggagtggaatggcaccctggagttcacctacaacaatggagagaccaaggtgattgacaccaccaccctgcctgtgtaccccaagaagatccggcccctggagaagcagggccccatggagagcaggaacctgtggagggaggtgacccgctacctgcggctgggggacattgatgctgccacagagcagaagaggcacctggaggagaagcagagggtggaggagaggaagcgggagaacctgcggaccccctggaagcccaagtacttcatccaggagggagatggctgggtgtacttcaaccccctgtggaaggcccactag

SEQ ID NO: 195044 - DNA, 2295 bp, Artificial Sequence
  derived and/or modified sequence
atggagcgggccgtgcagggcaccgacggcggcggcggcagcaacagcagctcccgctccagcagcagggctaccagcgccgggtcttcaccatcatgcagcttagctggtcgcggtgtctcaagccgcagcgcagccgcaggcttgggtggaggaggcagccgcagttcccccggatctgtggctgcgtcgccatccgggggcggcgggcgccgacgtgagcccgcactggagggcgtattgtcaaaatatacaaacttgctgcaaggatggcagaaccggtatttcgtactggactttgaggcaggcatccttcagtatttcgtaaacgagcagtccaaacaccagaaaccccgtggagttctctcattgtcaggggccatagttagcctgtctgatgaggctccccacatgctcgtggtgtactcagcaaacggcgaaatgtttaagctgcgggctgccgatgccaaagagaaacaattttgggtgacccagcttcgcgcctgcgctaaatatcatatggaaatgaactccaagtcggctccatcttccagaagtcgatcactcaccctgctgcctcacggaacacctaattccgcttctccatgtagccaacgacacctgtccgttggtgcacccggagtagtgaccattactcatcacaaaagcccggcggccgccaggcgcgctaagagccagtactcaggccagctccacgaggttagggagatgatgaatcaggtggagggccaacagaaaaaccttgtgcacgcaattgaatcgctgcctggatctggcccactcaccgccttggatcaggatctcctccttctgaaggctacatcagccgcgaccttaagttgcttgggagaatgccttaacctgctgcagcagagtgtacatcaggcaggccagccctctcagaaaccgggagccagtgagaatattctggggtggcatggttctaaatcccatagcactgagcaactgaagaatgggactttgggctctcttcccagtgcctctgccaacattacttgggcaatcttgccgaactctgccgaggacgagcaaacttctcaaccagaacctgaaccaaattcaggcagcgagcttgtgctcagcgaagacgagaagagcgacaatgaggataaagaggaaactgagctcggagtgatggaagaccagcgatccatcatcctccatctcatctcgcagttaaagttgggaatggacctcaccaaagtagttctcccaacgttcattctcgaaaagcgcagtctgctcgagatgtatgccgattttatggctcaccccgacctgctgctggcaattaccgcgggtgctacaccggaagaacgtgttatctgttttgtggaatactatctgaccgcctttcatgagggtcgtaagggcgccttggccaaaaaaccatataatccaattatcggagagaccttccactgttcatgggaggtgcccaaagatcgcgtgaagcctaagaggactgcctcacgatcgccggcttcctgtcatgagcaccccatggccgatgatccgtccaaatcatataagctgcgctttgtggcagagcaagtgtctcaccacccgcctatcagctgcttttattgtgaatgtgaggaaaagagattgtgtgtgaacactcacgtgtggaccaaatcaaagttcatgggcatgtccgtgggggtgagtatgattggagaaggagtcttacgtctcttagaacatggcgaagagtacgtgtttacgctgccatctgcttatgcccgatcgattcttacaataccctgggttgaactcggagggaaggtgtccatcaactgtgctaagacggggtactctgccacggtgatattccacacgaaacccttctatgggggaaaggtccaccgggtgacagctgaagtgaaacataatcccactaataccatcgtatgcaaggcgcacggcgaatggaacggcaccctggagtttacctataacaacggcgaaacaaaagtcatcgataccacaaccctcccagtgtaccccaagaagattcgaccactcgaaaagcagggtcctatggaatccagaaacctgtggagggaggtgaccagatatctacggctcggcgacattgatgccgcaaccgaacagaaacgccatctggaggaaaagcagagagttgaggagcgcaaacgcgaaaatctccgaacaccttggaaacccaagtacttcattcaggaaggagatggttgggtgtacttcaaccccctctggaaggcgcattag

SEQ ID NO: 195045 - DNA, 6600 bp, Artificial Sequence
  derived and/or modified sequence
catttcccggggatttggagcaggcacgcgcggcccgggcgtccggagctgtagcagcagcagcagccgccgtgccggggccgccaccgcggcgggcacccgcgtcccgggcgcccacggaccatggagagggcagtccagggcacagacggcggcgggggtagcaacagcagcagccgcagcagcagccgtgctacctcggcgggctcctcgccctcctgctctctggcgggccggggggtctccagccggtcggcggcggccgggctcggcggcgggggaagccgcagcagcccgggctctgtggccgctagcccgtccgggggaggcggccgcaggagggagccggcgctcgagggcgtgctcagcaaatacaccaacctcctccagggctggcagaacaggtacttcgtactggatttcgaggctggcatcctgcagtattttgtgaatgagcaaagcaaacaccagaagcctcgaggagtcctgtctttatctggagccatagtgtccctgagcgatgaagctccccacatgctggtggtgtactctgctaatggagagatgtttaaactgagagctgctgatgcaaaagagaaacaattctgggtgactcagcttcgagcttgtgccaaataccacatggaaatgaattctaagagtgctccaagctcccgaagccgaagtctcactttgctcccacatggaacacccaattctgcgtctccctgtagccagagacacctcagtgtgggggcccccggtgttgtcacaatcacgcatcacaagtcgcctgcagccgcccgaagagccaagagtcagtattccggccagcttcacgaagtcagagagatgatgaaccaggtggaagggcagcagaagaaccttgtgcacgccattgagtccctgccagggtccggccccctcactgccttggaccaggacctgctgctcctgaaagctacctctgctgccaccctcagctgccttggggagtgcctcaacttgttacagcagagtgtgcaccaggcgggccagcccagccagaagccaggagcctcggaaaacatcctgggatggcacgggtccaagtcacattccacagagcagctgaaaaatgggacacttggctctttgccatcagccagtgccaacataacctgggcaattttaccaaactctgctgaagacgaacaaacctcacagccagagccagagccaaactcaggctctgaattggttttgtctgaagatgaaaaaagtgacaatgaagataaggaagagacggaattgggcgtcatggaggatcagcgtagtataattcttcatctcatttcacaactcaaacttggaatggatttgaccaaggtggtgcttcccacctttatcctggagaagcgatctttgctggagatgtatgcagatttcatggcgcacccagacctactgctggccatcaccgctggggccacaccagaggagagagtcatttgcttcgttgagtattatctcacagcctttcacgagggccgcaagggcgctttagccaagaagccctacaaccccatcataggcgagacatttcactgctcctgggaagttcccaaggacagggtcaagcctaagaggactgcttcccgctctcctgccagctgtcacgaacacccaatggccgatgacccttccaaaagctacaaactaaggtttgtggctgagcaagtgtcccatcacccacccatctcctgcttctactgtgagtgcgaggagaagagactgtgcgtcaacactcatgtatggaccaaaagcaagttcatgggcatgtccgtgggggtctctatgataggggaaggtgtgttgaggctcctggaacacggggaggagtacgtattcaccctgcctagtgcctacgcccggtccattctcaccatcccgtgggtggagctcggaggaaaagtcagcatcaactgtgccaagactgggtactcagcgacagtgatattccacacgaagcctttctatggagggaaagtccacagggttaccgcagaagtgaagcacaacccaaccaacaccattgtttgtaaagcccatggggaatggaatggtactttagagttcacctacaacaatggagaaaccaaagtcatcgacacaaccacactgccagtgtatcccaagaagatcagacctcttgagaagcagggacccatggagtccaggaacctctggcgggaggtgacccgatacctgcggctgggggacattgacgcagccaccgagcagaagcggcacctggaggagaagcaacgggtggaggaacggaagcgcgagaacctccgcacaccatggaagcccaaatattttatccaggagggcgatggctgggtatacttcaatcccctctggaaagcacactgatggggtggaggtgcagagctttccagtatagccctgtttttgtaggaatattaaagtagtagagtatcagggttttgttggcattcactgagaccttgtattagcatccaagaaatgatgagagagagagaaattatatactatgaaaagtgcacccccacactctgctagaggaatgaatttattcaagagccattcggggcacgtgtgtgtacacaccgtatacgttcacacacatgcactatgtaaacatctgagtatgattacacatttaaatactgcactcaccaaggttaaagtgggtaatcataagctcctttttatcaatgaagtttgaagtttttctatttttcactttgccaaaaatgttttacactcacaaagatattctcacttagtcaactcctgtcaaaatgaaggtgaactggcatggcccgatcactgtccataagggagaaagtggctcattcctggtagaagtatgggtggttatcatttcaaaattattgtgattctcacctccctccccacctcagtgttttgtctgtccgcgcccaagaaagataagcaagtatttcctgctggatgggggttggcaggaagctgttaaagatttatgccagagccttgcaggatggagcacctctgggacaactaagagccaaggcccaccaaggagttttccacccgtctctcatggtcacagcgctagtcattcatttttgagaagttgcttcttttacatcagaaaaccagtcaatcatatggagacttcttttgtgatgaaaaagggctttagaagttaaatacatgcatgcacatgaaaacatgcacaaccacagcctcaatcttgtatttagtttggggaaagagaagagaatttcctgtggattattttttcctcaagtgcacctctctggttaacccaaactctgcaagaaagcactgtgactaaaacatacataacgcctgcataaatattccatggtttcagttaaatttcagtttttagcctttacacatgaggtcaaaggagtgacgaaaatacaaagcaaggaaaaaatgaaatatctggtttttgctgaatgcttaatttattttttactgtgccactccaatatttatcaaatccaaatagcatgaatgcttctctgtagtaatactaattttgtgccttttgtctgctttcttaagaccagttgttcacactttgtagatattagacaaatatatttcgattgaatacatatctgtgtctgtgttttattttcagggattcaacagttctattaaattggtggctctaagtgagctcaacttttcctggttaaatatttctagttattgatatgaagagcaatcatatctatatggaaaaagtatttaacacatttaaaaatgtaccagataaacatttatgaatattttctggtaagtccataagaacatttaactcctacccagtgagtgttgtttcacgagaagagtcactgccagaagtcacaatagaagcctacttaggtccacagtctttaaagcatctgggtgaatcaagtatctggaaccatcttatttctgacagagaaagtggaacaaatgctattttgagaaaaagaagaaaactcaactcaatgagactgaaaagtaatcactgtgttgttggattttccagtctgactacaaagcataaaccatctgggaagtaaaacatggagagggctcacttttcttttgaggccaggggtacatttaaaattgtgaaatgttatgtgtcaggagatttacataaaacatatgtactccaggaataattataaatacccttgtagccactgcttaagcaaagaaacctgtttaccagtaccttaaaagccactattgtgcccctatacaattgtatccctctccatgccttcctggaataaccatccccttatgggttttttgttgttcttttagactatacacactatgtgtgtatttctaaacagtgtgattggttttacccatttttgtaaaaattgaatcataccctagtttgcctatttgagccaatattttctttctagttcaatccttgttgctctatttgttcattttcttgctgagttcatattatgttttattgtggtaaaatatatgtaacaaaatctaccattttaactattttttttttcccagatggagtctcactctgtcacccaggctggagtgcaatggcgcgcaatctctgctcactgcaacctctgccttccgggttcaagcgattctcctgcttcagcctcccgagtagctgggattacaggcgtgtgccaccatgcccagctaatttttgtatttttagtagagatggggtttcaccatgttggccaggctggtctcaaactcctgacctcaggtgattcacccacctgagcctcccaaagtgctgggattacaggtgtgagccactgtgcccagcctggcattttaaaaatatactgagaagtggaattgctatatcatatgaaaattctggtttaagttttaaggaattgccacacagtttctcacaagagctggctgccacattttgcaatgccactagcaatgcacaagggatccaatttctccacatcctcaccaatacctattattttgtttttacttttgttgtttctttaaccccatcctaatggctatgaagtgccatctcaatgtggttttgatttatatttccctaatgattagtgatgttgagcatgtgtttttgtggttttggccatttgtaaatctttggagaaatgtttattcaaatccttttgcccattttaaaattaggttctttttgttgagttttaggagtcctttatgggtattaatcctttctggatattaatcctttatcagatatgatgtgcaaatattttcttctgactctttggttgcctcttcactgttaatggtgtcctctgatgtacaaaagtatttaattttgataatgtctaatttatttttctttgtacttgtgcttttgatgtcatatccaagaaatcattgacaaatacaatgctgtgaagtttttgtcctatgatttcttctaagagttttatagttttaggtcttactggggggtagggggtactttgatccattttgagttggtttttatatatggtgttagataagggtccaacttcattcttttgcatgtggatatccagtttccccaacaccatttgttgaaaagactctgcattccccattgagtgatcttggtaccttgttgaaaatcactggctatatacacgaatgtttatttatggcctattcttttccaatggtcgatgtcagtctttatgccagtaccacactcttttagttactgtagctttgtagcaagttacaagattaggaagtatgagacctccaacttttttattcttttttcaatattgtttcgtctgtacagggtcatttaagattccatgtgaattttaggatgaaattttctatttttgcaaaaaactctgggattttgatagggattgcattgaatctgtagatccctttgagtagcattgtcttaacagtaagtcttccaatctgttaaccagaatatctttccatttatttatctgtcttaatttctttcagcatgttttgtagttttcactgggcaagtcttcctcagttaagtttaattcttaagtattttactctttttggtactactgtaagtagatctttctcagtttcctttttggattgttcaatgttggcatataaaagtgtaagtgccaggcacagtgtcacatgcctatagttccagctactcaggaggctgagacaggaggattgcttgggcccaggagtttgagatttcagcatgctatgattgctcctgtgaatagccactgcactccagcctgggcaacataacaagacctcatttcgtaaaaaacacataatactgatttttgtgcattggttttgtatcctttgctgaatttgtttattctaacagttttttggggggtgtgtgggatctaggattttctagatacaatcatgtcatttgctaacagattttacttcttccaaatttggatgtcttttatttcttgttcttgcctaattgctgtacctagaacttcaaatactgtgttgaaggaaggaggcaaaaaaaaaaaaaaaaaaaaa

SEQ ID NO: 195046 - DNA, 2295 bp, Artificial Sequence
  derived and/or modified sequence
atggaacgggcagttcagggcacggatggcggaggagggtcgaactcatccagccgaagcagtagtagagccacttcagcgggttccagtccatcatgttcattggccggacgcggagtgtcatctcggtccgcggctgctggcctggggggagggggaagtcgatccagcccaggctcagtcgcagcctcaccatccgggggtggaggtcgcaggcgtgaacctgcgctagagggagtgctgagcaaatacaccaacttactccaaggctggcagaaccggtacttcgtcctggactttgaagccggaattctgcaatattttgtcaacgaacaatccaagcaccagaaaccccgaggagtgttaagtttgagcggggcaattgtgtcactatcggatgaagctccgcacatgttagttgtatattctgcaaacggtgaaatgttcaagctacgagccgctgatgccaaagaaaagcagttttgggttacgcagttgagggcatgcgcgaaataccacatggaaatgaattccaagtccgcgccaagttctcggagccggagtctgacacttctgccacacggcacccccaacagcgcatccccctgcagccagagacacctctccgtaggagcccctggggtagtgactataacacatcacaagtctcccgctgctgccaggcgtgcgaaaagccagtatagtggtcagctacacgaagtcagagaaatgatgaaccaggtggaaggccagcaaaagaacctggtccatgcaattgagagcttgccaggatcagggccactgaccgctcttgaccaagacctgctcctgctgaaagcgaccagtgcagccacattgagctgtctcggcgaatgtctgaatttactgcagcagagcgtgcaccaggctggacagccatcacagaaacctggagctagtgagaatatcttaggatggcatggctcaaagtcccactccactgaacagcttaagaacgggactctggggagtttgcccagtgccagtgccaatatcacgtgggcaatactgcccaacagcgctgaagacgaacaaacatctcagcccgagcctgaaccaaattcaggcagcgagctagtgcttagcgaagacgaaaaaagcgacaacgaagataaggaggaaaccgaattgggggtgatggaggatcagcgctccattatcctgcatcttatctcacagctgaaacttggcatggatctgaccaaggttgttttgccaacattcatcctggaaaaaagatctttgctggagatgtacgctgacttcatggcccaccctgatctcctgctggctatcacagccggagccactcctgaggagagggtgatctgtttcgttgagtactatcttactgcttttcacgaagggagaaagggggctttagccaagaagccgtacaatccgatcatcggcgagacgttccactgctcatgggaggtgccaaaggatcgggttaagcccaaaagaacagccagtcgaagcccagcttcttgccatgagcatcctatggcggatgaccccagcaaaagttacaagttgagattcgtggcggagcaggtgtcccatcatcccccaattagttgtttctactgcgagtgtgaggagaagaggctttgtgtgaatactcacgtctggaccaaatcaaagttcatgggcatgagtgttggggtgagcatgattggtgagggcgtgctgaggctccttgagcacggcgaagaatacgtgtttaccctgccctcggcttacgccagaagcatacttaccatcccttgggtggagttgggaggaaaagtgtccatcaattgtgcaaaaacaggctattcagctactgtgatctttcatacgaagccattctatggcggaaaggtgcaccgagtcactgctgaggtgaagcacaatcctacgaataccatcgtgtgcaaggcccacggtgaatggaacggtacacttgaattcacctataacaatggggaaactaaggtaatcgacaccaccactctgcctgtgtatccgaaaaagattagacctctcgaaaagcaaggacccatggaatcaaggaatctttggcgggaggtgacgcggtatctgaggctgggtgatattgatgctgccacagaacagaaacggcatcttgaggaaaagcaacgcgtggaggaacgcaagcgcgagaatcttcggaccccctggaagcctaagtactttatccaggaaggagacggctgggtctatttcaatcccctgtggaaagctcattag

SEQ ID NO: 195047 - DNA, 2295 bp, Artificial Sequence
  derived and/or modified sequence
atggagagagccgtgcagggcaccgacggcggcggcggcagcaacagcagcagcagaagcagcagcagagccaccagcgccggcagcagccccagctgcagcctggccggcagaggcgtgagcagcagaagcgccgccgccggcctgggcggcggcggcagcagaagcagccccggcagcgtggccgccagccccagcggcggcggcggcagaagaagagagcccgccctggagggcgtgctgagcaagtacaccaacctgctgcagggctggcagaacagatacttcgtgctggacttcgaggccggcatcctgcagtacttcgtgaacgagcagagcaagcaccagaagcccagaggcgtgctgagcctgagcggcgccatcgtgagcctgagcgacgaggccccccacatgctggtggtgtacagcgccaacggcgagatgttcaagctgagagccgccgacgccaaggagaagcagttctgggtgacccagctgagagcctgcgccaagtaccacatggagatgaacagcaagagcgcccccagcagcagaagcagaagcctgaccctgctgccccacggcacccccaacagcgccagcccctgcagccagagacacctgagcgtgggcgcccccggcgtggtgaccatcacccaccacaagagccccgccgccgccagaagagccaagagccagtacagcggccagctgcacgaggtgagagagatgatgaaccaggtggagggccagcagaagaacctggtgcacgccatcgagagcctgcccggcagcggccccctgaccgccctggaccaggacctgctgctgctgaaggccaccagcgccgccaccctgagctgcctgggcgagtgcctgaacctgctgcagcagagcgtgcaccaggccggccagcccagccagaagcccggcgccagcgagaacatcctgggctggcacggcagcaagagccacagcaccgagcagctgaagaacggcaccctgggcagcctgcccagcgccagcgccaacatcacctgggccatcctgcccaacagcgccgaggacgagcagaccagccagcccgagcccgagcccaacagcggcagcgagctggtgctgagcgaggacgagaagagcgacaacgaggacaaggaggagaccgagctgggcgtgatggaggaccagagaagcatcatcctgcacctgatcagccagctgaagctgggcatggacctgaccaaggtggtgctgcccaccttcatcctggagaagagaagcctgctggagatgtacgccgacttcatggcccaccccgacctgctgctggccatcaccgccggcgccacccccgaggagagagtgatctgcttcgtggagtactacctgaccgccttccacgagggcagaaagggcgccctggccaagaagccctacaaccccatcatcggcgagaccttccactgcagctgggaggtgcccaaggacagagtgaagcccaagagaaccgccagcagaagccccgccagctgccacgagcaccccatggccgacgaccccagcaagagctacaagctgagattcgtggccgagcaggtgagccaccacccccccatcagctgcttctactgcgagtgcgaggagaagagactgtgcgtgaacacccacgtgtggaccaagagcaagttcatgggcatgagcgtgggcgtgagcatgatcggcgagggcgtgctgagactgctggagcacggcgaggagtacgtgttcaccctgcccagcgcctacgccagaagcatcctgaccatcccctgggtggagctgggcggcaaggtgagcatcaactgcgccaagaccggctacagcgccaccgtgatcttccacaccaagcccttctacggcggcaaggtgcacagagtgaccgccgaggtgaagcacaaccccaccaacaccatcgtgtgcaaggcccacggcgagtggaacggcaccctggagttcacctacaacaacggcgagaccaaggtgatcgacaccaccaccctgcccgtgtaccccaagaagatcagacccctggagaagcagggccccatggagagcagaaacctgtggagagaggtgaccagatacctgagactgggcgacatcgacgccgccaccgagcagaagagacacctggaggagaagcagagagtggaggagagaaagagagagaacctgagaaccccctggaagcccaagtacttcatccaggagggcgacggctgggtgtacttcaaccccctgtggaaggcccactag

SEQ ID NO: 195048 - protein, 605 aa, Artificial Sequence
  derived and/or modified sequence
MEADIITNLRCRLKEAEEERLKAAQYGLQLVESQNELQNQLDKCRNEMMTMTESYEQEKYTLQREVELKSRMLESLSCECEAIKQQQKMHLEKLEEQLSRSHGQEVNELKTKIEKLKVELDEARLSEKQLKHQVDHQKELLSCKSEELRVMSERVQESMSSEMLALQIELTEMESMKTTLKEEVNELQYRQEQLELLITNLMRQVDRLKEEKEEREKEAVSYYNALEKARVANQDLQVQLDQALQQALDPNSKGNSLFAEVEDRRAAMERQLISMKVKYQSLKKQNVFNREQMQRMKLQIATLLQMKGSQTEFEQQERLLAMLEQKNGEIKHLLGEIRNLEKFKNLYDSMESKPSVDSGTLEDNTYYTDLLQMKLDNLNKEIESTKGELSIQRMKALFESQRALDIERKLFANERCLQLSESENMKLRAKLDELKLKYEPEETVEVPVLKKRREVLPVDITTAKDACVNNSALGGEVYRLPPQKEETQSCPNSLEDNNLQLEKSVSIYTPVVSLSPHKNLPVDMQLKKEKKCVKLIGVPADAEALSERSGNTPNSPRLAAESKLQTEVKEGKETSSKLEKETCKKLHPILYVSSKSTPETQCPQQ

SEQ ID NO: 195049 - protein, 506 aa, Artificial Sequence
  derived and/or modified sequence
MEADIITNLRCRLKEAEEERLKAAQYGLQLVESQNELQNQLDKCRNEMMTMTESYEQEKYTLQREVELKSRMLESLSCECEAIKQQQKMHLEKLEEQLSRSHGQEVNELKTKIEKLKVELDEARLSEKQLKHQVDHQKELLSCKSEELRVMSERVQESMSSEMLALQIELTEMESMKVKYQSLKKQNVFNREQMQRMKLQIATLLQMKGSQTEFEQQERLLAMLEQKNGEIKHLLGEIRNLEKFKNLYDSMESKPSVDSGTLEDNTYYTDLLQMKLDNLNKEIESTKGELSIQRMKALFESQRALDIERKLFANERCLQLSESENMKLRAKLDELKLKYEPEETVEVPVLKKRREVLPVDITTAKDACVNNSALGGEVYRLPPQKEETQSCPNSLEDNNLQLEKSVSIYTPVVSLSPHKNLPVDMQLKKEKKCVKLIGVPADAEALSERSGNTPNSPRLAAESKLQTEVKEGKETSSKLEKETCKKLHPILYVSSKSTPETQCPQQ

SEQ ID NO: 195050 - protein, 86 aa, Artificial Sequence
  derived and/or modified sequence
MEADIITNLRCRLKEAEEERLKAAQYGLQLVESQNELQNQLDKCRNEMMTMTESYEQEKYTLQREVELKSRMLESLSCECEAIKQQ

SEQ ID NO: 195051 - protein, 150 aa, Artificial Sequence
  derived and/or modified sequence
MEADIITNLRCRLKEAEEERLKAAQYGLQLVESQNELQNQLDKCRNEMMTMTESYEQEKYTLQREVELKSRMLESLSCECEAIKQQQKMHLEKLEEQLSRSHGQEVNELKTKIEKLKVELDEARLSEKQLKHQVDHQKELLSCKSEELRV

SEQ ID NO: 195052 - protein, 88 aa, Artificial Sequence
  derived and/or modified sequence
MEADIITNLRCRLKEAEEERLKAAQYGLQLVESQNELQNQLDKCRNEMMTMTESYEQEKYTLQREVELKSRMLESLSCECEAIKQQQK

SEQ ID NO: 195053 - DNA, 261 bp, Artificial Sequence
  derived and/or modified sequence
atggaggccgacatcatcaccaacctgagatgcagactgaaggaggccgaggaggagagactgaaggccgcccagtacggcctgcagctggtggagagccagaacgagctgcagaaccagctggacaagtgcagaaacgagatgatgaccatgaccgagagctacgagcaggagaagtacaccctgcagagagaggtggagctgaagagcagaatgctggagagcctgagctgcgagtgcgaggccatcaagcagcagtag

SEQ ID NO: 195054 - DNA, 453 bp, Artificial Sequence
  derived and/or modified sequence
atggaggccgacatcatcaccaacctgagatgcagactgaaggaggccgaggaggagagactgaaggccgcccagtacggcctgcagctggtggagagccagaacgagctgcagaaccagctggacaagtgcagaaacgagatgatgaccatgaccgagagctacgagcaggagaagtacaccctgcagagagaggtggagctgaagagcagaatgctggagagcctgagctgcgagtgcgaggccatcaagcagcagcagaagatgcacctggagaagctggaggagcagctgagcagaagccacggccaggaggtgaacgagctgaagaccaagatcgagaagctgaaggtggagctggacgaggccagactgagcgagaagcagctgaagcaccaggtggaccaccagaaggagctgctgagctgcaagagcgaggagctgagagtgtag

SEQ ID NO: 195055 - DNA, 477 bp, Artificial Sequence
  derived and/or modified sequence
atggaggccgacatcatcaccaacctgagatgcagactgaaggaggccgaggaggagagactgaaggccgcccagtacggcctgcagctggtggagagccagaacgagctgcagaaccagctggacaagtgcagaaacgagatgatgaccatgaccgagagctacgagcaggagaagtacaccctgcagagagaggtggagctgaagagcagaatgctggagagcctgagctgcgagtgcgaggccatcaagcagcagcagaagatgcacctggagaagctggaggagcagctgagcagaagccacggccaggaggtgaacgagctgaagaccaagatcgagaagctgaaggtggagctggacgaggccagactgagcgagaagcagctgaagcaccaggtggaccaccagaaggagctgctgagctgcaagagcgaggagctgagagtgatgagcgagagagtgcaggagagctag

SEQ ID NO: 195056 - DNA, 693 bp, Artificial Sequence
  derived and/or modified sequence
atggaggccgacatcatcaccaacctgagatgcagactgaaggaggccgaggaggagagactgaaggccgcccagtacggcctgcagctggtggagagccagaacgagctgcagaaccagctggacaagtgcagaaacgagatgatgaccatgaccgagagctacgagcaggagaagtacaccctgcagagagaggtggagctgaagagcagaatgctggagagcctgagctgcgagtgcgaggccatcaagcagcagcagaagatgcacctggagaagctggaggagcagctgagcagaagccacggccaggaggtgaacgagctgaagaccaagatcgagaagctgaaggtggagctggacgaggccagactgagcgagaagcagctgaagcaccaggtggaccaccagaaggagctgctgagctgcaagagcgaggagctgagagtgatgagcgagagagtgcaggagagcatgagcagcgagatgctggccctgcagatcgagctgaccgagatggagagcatgaagaccaccctgaaggaggaggtgaacgagctgcagtacagacaggagcagctggagctgctgatcaccaacctgatgagacaggtggacagactgaaggaggagaaggaggagagagagaaggaggccgtgagctactacaacgccctggagaaggccagatag

SEQ ID NO: 195057 - DNA, 267 bp, Artificial Sequence
  derived and/or modified sequence
atggaggccgacatcatcaccaacctgagatgcagactgaaggaggccgaggaggagagactgaaggccgcccagtacggcctgcagctggtggagagccagaacgagctgcagaaccagctggacaagtgcagaaacgagatgatgaccatgaccgagagctacgagcaggagaagtacaccctgcagagagaggtggagctgaagagcagaatgctggagagcctgagctgcgagtgcgaggccatcaagcagcagcagaagtag

SEQ ID NO: 195058 - DNA, 1818 bp, Artificial Sequence
  derived and/or modified sequence
atggaggcggacattatcaccaaccttagatgtaggctgaaagaggccgaagaggagcgcttaaaggctgcgcagtatggattacagttagttgagtcccagaatgagcttcagaatcagctggacaagtgccggaatgagatgatgacgatgaccgagtcatacgaacaggagaagtacacactccaacgggaggtggagctgaaatcgaggatgcttgaaagcctgagctgtgagtgcgaggcgatcaagcagcagcagaagatgcatctcgagaagcttgaggagcagttatcccgctcacacggccaggaggtaaacgagctgaagacaaagatagagaagctgaaggtagagcttgacgaagcacggctgagcgaaaagcagctgaagcatcaggttgatcaccagaaggagttgctgtcttgtaagagcgaagaactccgcgtgatgagtgaaagggtacaagagtctatgagctcagaaatgctggccctgcaaattgagctcacagagatggagagcatgaaaactacgttaaaagaagaggtgaacgaactgcagtataggcaggaacagcttgaattgcttatcaccaacctgatgcgccaagtggaccgactgaaagaggagaaggaggagagggagaaagaagcagtcagttattataacgccctggaaaaggcccgcgtggcgaaccaggatctccaggtgcagttggaccaggccctccagcaggccctggacccaaattctaagggaaactctctgtttgctgaggttgaggatcgcagggctgccatggaacgccagcttatctccatgaaagttaaataccagtctctgaagaagcagaacgtttttaatcgtgagcagatgcagcgcatgaagttgcaaattgccactctactccaaatgaagggtagccagactgagtttgagcagcaggaaagactccttgccatgctggagcagaaaaacggcgaaattaagcacctccttggagagatccgaaacttggaaaagtttaagaacctttacgatagtatggaaagcaagccatccgtagattctggtacactggaggacaatacgtattacaccgatttacttcaaatgaagctggataacctgaataaggagatagagtcgacgaaaggcgaactgtcaattcaacggatgaaggcactgtttgagagtcagcgagccttagatatagagagaaaacttttcgcaaacgagcgatgtctgcagctaagtgagagcgagaatatgaaattgcgagctaaactcgacgagcttaagctgaagtacgaaccagaggaaaccgtggaggtgccagttttgaaaaagaggagggaagtgctgcctgttgacattaccactgccaaggacgcctgcgtgaacaactcagccctgggtggtgaagtttacaggttgcctccacagaaggaggagactcagtcttgtcctaactccctcgaggacaataatctgcagttggagaagtcggtttctatctacacaccagtggtctcactgagtccccataagaacctcccagttgatatgcagctcaagaaggaaaaaaagtgcgtcaaattgattggtgtgcccgccgacgccgaggcgctgtctgagcgatccggtaatacgcccaactctccacgcctggctgcggagagtaaactgcagactgaagtcaaggaggggaaagaaactagcagtaaactagagaaagaaacatgtaagaagttgcacccgatcctttatgtctcctccaaaagtacccctgaaacccaatgcccacagcagtag

SEQ ID NO: 195059 - DNA, 1521 bp, Artificial Sequence
  derived and/or modified sequence
atggaagctgacatcatcacaaatctgaggtgtcgactcaaggaagctgaagaggagcggctgaaggccgctcagtatggactacagttagtggagagccaaaatgaactacagaatcagctggataagtgccgcaacgagatgatgaccatgacagagtcatacgagcaggagaagtacactctccagcgagaagtagaactgaagagcaggatgctagagagtttgagttgtgagtgcgaggcaatcaagcagcaacagaagatgcatctggagaagctggaagagcagctttcaaggagccatggtcaagaagtgaacgaactcaagaccaaaatcgagaagctgaaagtagaattggacgaggcacggttatccgaaaagcagctcaaacaccaggtcgaccaccaaaaagagttgttaagttgcaagtctgaagaactaagagtgatgtccgagagagtgcaggagagtatgagcagcgagatgttggcgttacaaattgaactgacagaaatggagagcatgaaggttaagtaccaatcattaaaaaaacaaaatgtgttcaatcgagagcaaatgcagaggatgaaattacagatcgctaccctgttacaaatgaagggctctcagacagagttcgagcagcaagagcgcctgctggccatgctggaacagaagaatggcgagattaagcacctcctgggtgaaattaggaaccttgaaaaattcaaaaacctatacgattcgatggaaagtaagcccagcgtcgactcaggaactcttgaggataacacctactacacggatttactacagatgaaactggacaacctcaataaagagatcgagtccaccaagggcgaactcagcatacaacgcatgaaggccttgttcgaatcacagcgcgcactagacatcgagcgaaaactgttcgccaatgaacggtgcttgcagctgtccgaatcggagaatatgaaactccgagccaagctcgacgagttaaaacttaaatacgaacccgaggagaccgtggaagtgccagtattgaagaagagacgtgaggtcttaccagtggacattaccacggccaaggatgcctgcgtgaacaactcagctttgggtggggaagtgtatcggttgcccccccagaaagaggaaactcagagctgccccaatagcctagaggacaataacctccagttagaaaagtccgtgtccatttataccccagtagtcagtttgagcccccataagaacctgcctgtggacatgcagcttaaaaaagagaagaaatgtgtcaaactcatcggtgtcccagctgatgctgaggccctgtccgaacgctctggcaacaccccaaactctcctcgcctcgctgcagaatccaagctccagaccgaggtcaaggaggggaaagagactagctcgaagctagagaaagagacctgcaagaaactgcacccaatcttgtatgtatccagcaaaagtacaccagaaacccaatgcccgcagcaatag

SEQ ID NO: 195060 - DNA, 261 bp, Artificial Sequence
  derived and/or modified sequence
atggaggctgatatcatcaccaacctacgttgcagactgaaagaagccgaagaggagagacttaaggcagcgcagtacggactgcagctggtggagtcacagaacgagctgcagaaccagctggataagtgccggaatgaaatgatgacaatgacagagtcttacgagcaagaaaagtacacactccagcgggaggtcgagctgaaaagcaggatgctggagtcgctttcctgcgaatgtgaggccatcaaacagcaatag

SEQ ID NO: 195061 - DNA, 453 bp, Artificial Sequence
  derived and/or modified sequence
atggaagccgacattatcactaacctgcgttgcagactgaaggaggccgaggaggagaggctaaaggctgcccagtacgggttgcagcttgtggaatctcagaacgagctgcaaaatcaattggataagtgccggaacgagatgatgactatgacagaatcgtacgagcaggaaaagtacaccctgcagcgagaggtggagctgaaaagcagaatgctggagagtttgtcgtgcgagtgtgaagccattaaacagcagcagaagatgcacctcgagaagctggaggaacagttgtcaaggagtcacgggcaggaagtgaacgagctcaaaaccaagatcgagaaactcaaggtggaactagatgaggcgaggttgtccgagaagcagctgaaacaccaggtggatcaccaaaaggagttactgtcctgtaagagcgaggagctccgggtgtag

SEQ ID NO: 195062 - DNA, 477 bp, Artificial Sequence
  derived and/or modified sequence
atggaagcagacatcatcaccaatctgagatgtagactgaaggaggctgaggaggagcggcttaaagcagcccagtatgggctccagctggtggaatcccaaaacgagctgcagaatcagctggacaaatgcaggaatgaaatgatgaccatgaccgagtcatacgagcaggagaagtacacattgcaaagagaggtcgagctcaagtcacgcatgctcgaaagccttagttgtgagtgtgaggctatcaaacagcagcagaagatgcatttggaaaagttggaagaacaactgtccaggagccatggacaggaagtcaacgagttgaaaacaaaaatcgagaagctcaaggtcgagctcgatgaggccagattatctgaaaagcagctgaagcatcaggtggaccatcagaaggagctgctttcttgcaagtctgaagaactcagagtgatgagtgaaagggtgcaggagtcgtag

SEQ ID NO: 195063 - DNA, 693 bp, Artificial Sequence
  derived and/or modified sequence
atggaggccgatatcataacaaatctcagatgccgcttgaaggaggcagaggaagaacgactgaaagccgcccagtatggtctgcaactggtggagagtcagaacgagttgcaaaatcagctggacaagtgccggaacgaaatgatgaccatgaccgagagctacgagcaggaaaagtacacactgcagcgcgaggttgaacttaagagccgcatgcttgagtcactcagctgtgagtgtgaggccattaaacagcaacagaagatgcatctggagaaactcgaggagcagttgagccggtcgcacggacaggaggtgaacgagctcaaaacaaaaatcgagaagctgaaggttgagctggacgaggcgcgcctctcagagaagcaactcaagcatcaggtggaccatcaaaaggaactcctgtcgtgcaaaagtgaagagctgagggtgatgagtgaacgcgtgcaggagagcatgtcatcagagatgctagccctgcagattgagctgaccgaaatggaatccatgaagaccacccttaaagaggaggtcaacgagctacagtatcggcaggagcaattagagcttttgattacaaatctgatgcgacaggtcgatcggctgaaggaggaaaaggaggaacgtgaaaaagaagcagtttcgtactataacgccctagagaaggctaggtag

SEQ ID NO: 195064 - DNA, 267 bp, Artificial Sequence
  derived and/or modified sequence
atggaagccgatatcattactaacctgagatgtagactcaaggaggccgaagaggaacggctgaaagctgctcaatacgggctgcagctggtggagtcacagaatgagctgcaaaaccagctcgacaagtgtagaaatgaaatgatgaccatgacagagtcttatgagcaagagaaatatactttgcagcgagaagtggagttgaagtccaggatgctcgaaagcctgtcttgcgagtgtgaggccattaagcagcaacagaagtag

SEQ ID NO: 195065 - DNA, 1818 bp, Artificial Sequence
  derived and/or modified sequence
atggaggccgacatcatcaccaacctgcgctgccgcctgaaggaggccgaggaggagcggctgaaggccgcccagtatggcctgcagctggtggagagccagaatgagctgcagaaccagctggacaagtgcagaaatgagatgatgaccatgacagagagctatgagcaggagaagtacaccctgcagcgggaggtggagctgaagagcaggatgctggagagcctgagctgtgaatgtgaggccatcaagcagcagcagaagatgcacctggagaagctggaggagcagctgagccgcagccacggccaggaggtgaatgagctgaagaccaagattgagaagctgaaggtggagctggatgaggcccggctgtctgagaagcagctgaagcaccaggtggaccaccagaaggagctgctgagctgcaagtctgaggagctgcgggtgatgtctgagcgggtgcaggagagcatgagcagcgagatgctggccctgcagatcgagctgacagagatggagagcatgaagaccaccctgaaggaggaggtgaatgagctgcagtaccggcaggagcagctggagctgctgatcaccaacctgatgaggcaggtggaccggctgaaggaggagaaggaggagcgggagaaggaggccgtgtcctactacaatgccctggagaaggcccgggtggccaaccaggacctgcaggtgcagctggaccaggccctgcagcaggccctggaccccaacagcaaaggaaacagcctgtttgctgaggtggaggaccggcgggccgccatggagcggcagctgatctccatgaaggtgaagtaccagagcctgaagaagcagaatgtgttcaaccgggagcagatgcagaggatgaagctgcagatcgccaccctgctgcagatgaagggcagccagacagaatttgagcagcaggagcggctgctggccatgctggagcagaagaatggagagatcaagcacctgctgggggagatccggaacctggagaagttcaagaacctgtatgacagcatggagagcaagcccagcgtggacagcggcaccctggaggacaacacctactacacagacctgctgcagatgaagctggacaacctgaacaaggagattgagagcaccaagggggagctgagcatccagaggatgaaggccctgtttgagagccagagggccctggacatcgagaggaagctgtttgccaatgaacgctgcctgcagctgtctgagagcgagaacatgaagctgcgggccaagctggatgagctgaagctgaagtatgagcctgaggagaccgtggaggtgcctgtgctgaagaagaggcgggaggtgctgcctgtggacatcaccacagccaaggatgcctgtgtgaacaacagcgccctgggcggggaggtgtaccgcctgcccccccagaaggaggagacccagagctgccccaacagcctggaggacaacaacctgcagctggagaagtctgtgtccatctacacccctgtggtgtccctgagcccccacaagaacctgcctgtggacatgcagctgaagaaggagaagaagtgtgtgaagctgattggagtgcctgcagatgctgaggccctgtctgagaggagcggcaacacccccaacagcccccggctggccgctgagagcaagctgcagacagaggtgaaggagggcaaggagaccagcagcaagctggagaaggagacctgcaagaagctgcaccccatcctgtatgtgagcagcaagagcaccccagagacccagtgcccccagcagtag

SEQ ID NO: 195066 - DNA, 1521 bp, Artificial Sequence
  derived and/or modified sequence
atggaggccgacatcatcaccaacctgcgctgccgcctgaaggaggccgaggaggagcggctgaaggccgcccagtatggcctgcagctggtggagagccagaatgagctgcagaaccagctggacaagtgcagaaatgagatgatgaccatgacagagagctatgagcaggagaagtacaccctgcagcgggaggtggagctgaagagcaggatgctggagagcctgagctgtgaatgtgaggccatcaagcagcagcagaagatgcacctggagaagctggaggagcagctgagccgcagccacggccaggaggtgaatgagctgaagaccaagattgagaagctgaaggtggagctggatgaggcccggctgtctgagaagcagctgaagcaccaggtggaccaccagaaggagctgctgagctgcaagtctgaggagctgcgggtgatgtctgagcgggtgcaggagagcatgagcagcgagatgctggccctgcagatcgagctgacagagatggagagcatgaaggtgaagtaccagagcctgaagaagcagaatgtgttcaaccgggagcagatgcagaggatgaagctgcagatcgccaccctgctgcagatgaagggcagccagacagaatttgagcagcaggagcggctgctggccatgctggagcagaagaatggagagatcaagcacctgctgggggagatccggaacctggagaagttcaagaacctgtatgacagcatggagagcaagcccagcgtggacagcggcaccctggaggacaacacctactacacagacctgctgcagatgaagctggacaacctgaacaaggagattgagagcaccaagggggagctgagcatccagaggatgaaggccctgtttgagagccagagggccctggacattgaaaggaagctgtttgccaatgaacgctgcctgcagctgtctgagagcgagaacatgaagctgcgggccaagctggatgagctgaagctgaagtatgagcctgaggagaccgtggaggtgcctgtgctgaagaagagaagagaggtgctgcctgtggacatcaccacagccaaggatgcctgtgtgaacaacagcgccctgggcggggaggtgtaccgcctgcccccccagaaggaggagacccagagctgccccaacagcctggaggacaacaacctgcagctggagaagtctgtgtccatctacacccctgtggtgtccctgagcccccacaagaacctgcctgtggacatgcagctgaagaaggagaagaagtgtgtgaagctgattggagtgcctgcagatgctgaggccctgtctgagaggagcggcaacacccccaacagcccccggctggccgctgagagcaagctgcagacagaggtgaaggagggcaaggagaccagcagcaagctggagaaggagacctgcaagaagctgcaccccatcctgtatgtgagcagcaagagcaccccagagacccagtgcccccagcagtag

SEQ ID NO: 195067 - DNA, 261 bp, Artificial Sequence
  derived and/or modified sequence
atggaggccgacatcatcaccaacctgcgctgccgcctgaaggaggccgaggaggagcggctgaaggccgcccagtatggcctgcagctggtggagagccagaatgagctgcagaaccagctggacaagtgcagaaatgagatgatgaccatgacagagagctatgagcaggagaagtacaccctgcagcgggaggtggagctgaagagcaggatgctggagagcctgagctgtgaatgtgaggccatcaagcagcagtag

SEQ ID NO: 195068 - DNA, 453 bp, Artificial Sequence
  derived and/or modified sequence
atggaggccgacatcatcaccaacctgcgctgccgcctgaaggaggccgaggaggagcggctgaaggccgcccagtatggcctgcagctggtggagagccagaatgagctgcagaaccagctggacaagtgcagaaatgagatgatgaccatgacagagagctatgagcaggagaagtacaccctgcagcgggaggtggagctgaagagcaggatgctggagagcctgagctgtgaatgtgaggccatcaagcagcagcagaagatgcacctggagaagctggaggagcagctgagccgcagccacggccaggaggtgaatgagctgaagaccaagattgagaagctgaaggtggagctggatgaggcccggctgtctgagaagcagctgaagcaccaggtggaccaccagaaggagctgctgagctgcaagtctgaggagctgcgggtgtag

SEQ ID NO: 195069 - DNA, 477 bp, Artificial Sequence
  derived and/or modified sequence
atggaggccgacatcatcaccaacctgcgctgccgcctgaaggaggccgaggaggagcggctgaaggccgcccagtatggcctgcagctggtggagagccagaatgagctgcagaaccagctggacaagtgcagaaatgagatgatgaccatgacagagagctatgagcaggagaagtacaccctgcagcgggaggtggagctgaagagcaggatgctggagagcctgagctgtgaatgtgaggccatcaagcagcagcagaagatgcacctggagaagctggaggagcagctgagccgcagccacggccaggaggtgaatgagctgaagaccaagattgagaagctgaaggtggagctggatgaggcccggctgtctgagaagcagctgaagcaccaggtggaccaccagaaggagctgctgagctgcaagtctgaggagctgcgggtgatgtctgagcgggtgcaggagagctag

SEQ ID NO: 195070 - DNA, 693 bp, Artificial Sequence
  derived and/or modified sequence
atggaggccgacatcatcaccaacctgcgctgccgcctgaaggaggccgaggaggagcggctgaaggccgcccagtatggcctgcagctggtggagagccagaatgagctgcagaaccagctggacaagtgcagaaatgagatgatgaccatgacagagagctatgagcaggagaagtacaccctgcagcgggaggtggagctgaagagcaggatgctggagagcctgagctgtgaatgtgaggccatcaagcagcagcagaagatgcacctggagaagctggaggagcagctgagccgcagccacggccaggaggtgaatgagctgaagaccaagattgagaagctgaaggtggagctggatgaggcccggctgtctgagaagcagctgaagcaccaggtggaccaccagaaggagctgctgagctgcaagtctgaggagctgcgggtgatgtctgagcgggtgcaggagagcatgagcagcgagatgctggccctgcagatcgagctgacagagatggagagcatgaagaccaccctgaaggaggaggtgaatgagctgcagtaccggcaggagcagctggagctgctgatcaccaacctgatgaggcaggtggaccggctgaaggaggagaaggaggagcgggagaaggaggccgtgtcctactacaatgccctggagaaggccaggtag

SEQ ID NO: 195071 - DNA, 267 bp, Artificial Sequence
  derived and/or modified sequence
atggaggccgacatcatcaccaacctgcgctgccgcctgaaggaggccgaggaggagcggctgaaggccgcccagtatggcctgcagctggtggagagccagaatgagctgcagaaccagctggacaagtgcagaaatgagatgatgaccatgacagagagctatgagcaggagaagtacaccctgcagcgggaggtggagctgaagagcaggatgctggagagcctgagctgtgaatgtgaggccatcaagcagcagcagaagtag

SEQ ID NO: 195072 - DNA, 1818 bp, Artificial Sequence
  derived and/or modified sequence
atggaggccgacatcatcaccaacctgcggtgccggctgaaggaggcggaagaggaacggctgaaagccgctcagtatggccttcagctcgtggagagccaaaatgagctgcagaatcagctggacaagtgcagaaacgagatgatgaccatgacggagagctatgaacaagagaagtataccctccagcgggaggtcgaactgaaaagccgcatgcttgaaagcctgtcatgtgagtgtgaggcgatcaagcagcaacagaagatgcatttagagaaacttgaggaacagctcagtcgctcccacgggcaggaggtgaatgagctgaaaacaaagattgaaaaattgaaggttgagcttgatgaggccaggctttctgaaaagcagttgaagcatcaggttgatcatcagaaggagctgctctcctgtaagtccgaggagcttagggtcatgtctgagagggttcaggagagcatgtcgtccgagatgttggcattacagatcgaactaaccgaaatggaatcgatgaagaccacactgaaagaagaggtaaatgagctgcaatatcggcaggagcagttagagttgctgattacaaatctgatgagacaggtggaccgtcttaaagaggaaaaggaggaaagagaaaaggaagctgttagttattacaatgcactcgagaaagccagagtggctaatcaggatctgcaggtccagttggatcaggcgctccaacaggccctcgatcctaacagcaagggcaatagtctgtttgctgaagttgaggacaggcgggccgccatggaacgacaactgattagcatgaaggttaaataccagtctctgaagaagcagaatgtgtttaacagagaacagatgcagcgcatgaagctccagatcgccaccctgctgcagatgaaaggatcacaaaccgaattcgagcagcaggaacgccttcttgccatgttggagcagaaaaacggtgagatcaagcacctcttaggcgaaatcaggaatctcgaaaagtttaagaacctctacgacagtatggaatcaaaaccatcagtggattcaggcactcttgaggacaacacctattacacggatctgttacaaatgaagctggataacttgaacaaagaaatcgagagcaccaaaggcgagttgtctattcagagaatgaaggcattattcgaaagccagcgggccttagatatagagcgtaagcttttcgctaacgagcgatgcctccagctgagcgaaagtgaaaacatgaaactgcgagctaaattggatgagctaaagctgaaatatgagccagaggagacagtcgaggtcccggtcttgaagaagagaagagaagtcttacctgtggacatcacgacagctaaggacgcatgcgtgaataactcagccttaggaggggaggtgtataggttaccaccccagaaagaggagacgcagtcctgtcctaattcactcgaagacaacaatcttcagctggaaaagtcagtctctatatacacacctgtagtgtcactcagtccccataagaatctcccggtcgacatgcagcttaaaaaagaaaaaaagtgcgtgaagctaattggcgttccagcggatgctgaggcactgtcagaacgctccgggaacacacctaactcaccccggctagcagccgagtcaaagctgcagacagaggtcaaggaaggtaaggaaacctcctcaaaattagagaaggaaacttgtaagaagctgcatccaatcctgtatgtttcttccaagtctactcccgagacacagtgcccccaacaatag

SEQ ID NO: 195073 - DNA, 1521 bp, Artificial Sequence
  derived and/or modified sequence
atggaggccgacatcatcaccaacctgcggtgccggctgaaggaggccgaagaggagcgtctgaaggccgcacagtacggacttcaactggtggaaagccaaaatgaattgcagaatcaacttgataagtgtcgaaacgagatgatgactatgaccgaaagctacgagcaggagaagtatactcttcaaagggaggtggaactcaaatcccgcatgctggaatctttgtcatgtgagtgtgaggctatcaaacaacagcagaaaatgcatctcgaaaaacttgaggagcagctatcccgcagccacggccaagaggtgaacgaactgaaaaccaagatcgaaaagctaaaggtggaattggatgaggccaggctgtcagagaaacaacttaagcaccaggtggatcaccagaaggaactgctgagctgtaaatctgaggaattgagagtcatgtccgaacgagtccaagaatctatgtcatctgaaatgctcgccttgcagatcgaactgactgagatggagtcgatgaaggtgaagtaccagagtctcaagaagcagaatgtttttaatcgagaacagatgcaaaggatgaaattacagatcgccaccctcctgcaaatgaaggggtctcagacagagttcgaacagcaggaacgtctgctggcgatgctggaacagaagaatggtgagatcaagcacctcttgggggagatcagaaatctcgaaaaattcaaaaacctttacgatagtatggagtcaaaacctagcgttgatagcgggaccctggaagacaacacatactatacggacttgctgcagatgaaactggacaatttgaataaggaaatcgaaagtaccaaaggtgagctgtcgatccagcggatgaaagctctattcgaatctcagagagcactggatatagagagaaagttattcgccaacgagcggtgcctgcagctctctgagtcagaaaacatgaagctgcgagccaaattagatgagttgaagctgaagtacgaaccggaggaaactgtggaagtaccggtgcttaaaaaaagacgggaggtattgcctgtcgatataacaacagctaaggatgcgtgtgtcaataactcagctctcggcggtgaagtctatagacttccacctcaaaaggaagaaacacagagctgccctaattcactcgaggataacaatctgcagctggagaagagcgtcagtatttatacaccagtcgtgtccctttcaccccacaagaatcttccggttgacatgcagctgaagaaagagaagaagtgtgttaaactcattggcgtccctgccgatgcagaggctctctccgagaggtctggcaatacaccaaactcaccgagacttgccgccgagagcaaattgcagactgaagtgaaagagggcaaggagacatcgagtaaactggagaaggaaacatgcaaaaagctccatcctattctttatgttagtagcaagagtacccctgagacccagtgcccacagcagtag

SEQ ID NO: 195074 - DNA, 261 bp, Artificial Sequence
  derived and/or modified sequence
atggaggccgacatcatcaccaacctgcggtgccggctgaaggaggccgaggaggagaggctgaaagctgctcaatacgggttgcagctggtggaatctcagaacgagctgcaaaatcagctggacaagtgccggaacgagatgatgaccatgaccgagagctatgaacaagagaaatacaccctgcagcgggaagttgagctgaagagtcgcatgctggaatcgctgtcctgtgagtgcgaagctataaagcaacaatag

SEQ ID NO: 195075 - DNA, 453 bp, Artificial Sequence
  derived and/or modified sequence
atggaggccgacatcatcaccaacctgcggtgccggctgaaggaggcggaggaagaacgcctaaaggcagcacagtatggactgcagcttgtggagagtcaaaatgagttacagaatcagctggacaagtgtaggaatgaaatgatgacgatgactgagtcctatgagcaggagaaatataccctgcagagagaggtggagttgaagtccaggatgttagagtcactttcttgcgaatgtgaggccattaaacagcagcagaagatgcacttggagaagctggaggaacagctaagtaggagtcacggccaggaagtgaacgaactgaaaactaaaattgaaaagctgaaggtggagctggacgaagctcgcctgtctgaaaaacagctcaaacaccaggtggaccatcaaaaagaactactgtcctgtaaaagtgaggagctgcgagtgtag

SEQ ID NO: 195076 - DNA, 477 bp, Artificial Sequence
  derived and/or modified sequence
atggaggccgacatcatcaccaacctgcggtgccggctgaaggaggccgaagaagagaggctgaaggcagctcagtacgggctacagctcgtggagtctcagaacgaactccagaaccagttggataaatgtcgcaacgagatgatgacaatgaccgagagttatgagcaggaaaaatacaccttgcagagagaagtagaacttaaatcacggatgttagaaagtctgtcctgcgaatgcgaagcaatcaaacagcaacagaaaatgcaccttgagaagttggaggaacagttgagccgctctcacgggcaggaggtcaacgagttgaagacaaaaatcgagaagctcaaagttgaactcgatgaggcaaggctgagtgaaaagcagctaaagcaccaggtggaccaccaaaaagagttactttcctgtaaatctgaggagctgcgggtcatgtcagaacgggtgcaagaaagttag

SEQ ID NO: 195077 - DNA, 693 bp, Artificial Sequence
  derived and/or modified sequence
atggaggccgacatcatcaccaacctgcggtgccggctgaaggaggctgaggaagagcggttgaaagcagcgcaatatggcttgcaactggttgagtcccaaaatgagctgcaaaaccagctggataagtgccgaaatgagatgatgactatgactgagtcatatgagcaagagaagtacactctgcagcgcgaagtggagttgaagagtagaatgttagagagcctctcgtgtgaatgtgaagctattaagcaacagcagaagatgcacctggagaagctcgaagagcagttgagtcgcagccacggccaagaggtgaacgagctgaaaacaaagatcgagaagttgaaggtggaactggacgaggcacgcctctcagagaaacagctgaaacaccaggtggatcatcagaaggaactcctcagttgcaaatccgaggaactccgtgtaatgtcagagcgggtacaggagagtatgtctagtgaaatgctggctcttcagatcgaactgacggagatggaaagcatgaagacaactctaaaagaagaggttaacgagttacagtatagacaggaacaactggaactcttgatcacaaacctgatgcggcaggtggatcggttaaaagaggagaaagaggagcgtgagaaggaggctgtgagttattacaacgcactggagaaagctaggtag

SEQ ID NO: 195078 - DNA, 267 bp, Artificial Sequence
  derived and/or modified sequence
atggaggccgacatcatcaccaacctgcggtgccggctgaaggaggcagaggaggagcgactgaaagccgcccagtacgggttacagctcgtcgaatctcagaacgagctgcagaaccagctagataagtgtaggaacgagatgatgactatgacggaatcatatgaacaggagaagtataccttgcagcgcgaagtagagctgaaatcccgaatgctggagagcttgagttgtgaatgtgaggcaattaagcaacaacagaaatag

SEQ ID NO: 195079 - DNA, 1818 bp, Artificial Sequence
  derived and/or modified sequence
atggaggcagatatcatcacaaaccttcgctgcagactcaaagaggccgaagaggaacggctcaaagccgctcagtacgggcttcagctggtcgagtctcaaaatgagctgcagaaccagctggacaaatgtcgcaacgagatgatgaccatgacagagtcctatgagcaggagaaatacacccttcaacgggaggttgagctaaaatcaagaatgctggagagccttagttgtgagtgtgaggctattaagcagcaacaaaaaatgcacctggagaagttggaggagcaactctctagatcacacgggcaggaggtgaatgaactgaaaacaaagattgaaaaattgaaggtggaactggatgaagccagattatccgagaagcagttaaaacaccaagtggatcatcaaaaagaattgctaagttgtaaatccgaagagttgcgagttatgagcgaacgggtccaggagtcaatgagctctgagatgttggcgcttcagatcgagcttacagagatggagtctatgaagactactctgaaggaggaggttaatgagctccagtatcgtcaggagcagctggaactcctaatcacaaaccttatgcgccaggtcgacagactcaaggaggagaaggaagagagggaaaaggaagccgtgagttactacaacgcgttggaaaaggccagagtggctaatcaggatctccaggtgcagctggaccaggccctgcagcaagccctagacccgaacagcaagggcaactctctctttgccgaggtggaggacaggagagcagcgatggagcgacagctgatttctatgaaggtgaaatatcagtccctgaagaagcagaacgtcttcaacagagaacagatgcagcgcatgaaattgcagatcgcgactctgctgcagatgaaaggatctcaaaccgagtttgagcaacaagagaggcttctggcaatgctcgaacaaaagaatggggagatcaaacacctgctcggcgaaatacggaatctcgaaaagtttaagaatctgtacgatagtatggagtctaagcccagtgtcgacagtgggaccttagaggacaacacatactacactgatctcctacaaatgaaattggacaatttaaacaaggaaatcgaaagtaccaaaggagaattgagtatccagcggatgaaggctttattcgaaagccaacgcgctctcgacatcgagaggaaactctttgcgaacgaacgatgcttgcaactcagcgagagcgagaatatgaagctgcgggcaaagcttgacgaactaaaacttaagtatgagcctgaggagaccgtggaagtgcctgtgttgaaaaagagaagggaggtgcttcccgttgatattaccaccgcgaaagacgcctgtgtgaacaattctgccctcgggggtgaagtgtataggcttcctccccagaaggaagaaacacagtcgtgtcccaatagtctcgaagataataatctgcagctggagaaatctgtctcaatttacacccccgtagtgagtttatccccacacaagaatttaccagtggatatgcaactgaagaaagaaaagaagtgtgtgaaattaataggagttcccgctgatgccgaggccctgtctgaaagaagtggtaacactcccaactctccaagactcgcagccgagtcaaagctgcaaacagaagttaaagagggcaaagaaaccagctcaaagctagaaaaagagacgtgtaagaagcttcatcccattctgtatgtgagttctaagagcacacccgaaacgcagtgccctcagcaatag

SEQ ID NO: 195080 - DNA, 1521 bp, Artificial Sequence
  derived and/or modified sequence
atggaggctgatattattacaaaccttcgctgcagactgaaggaagcagaggaggagagactgaaagcagctcagtacgggttgcagctcgttgagtctcagaatgaactccagaaccaactcgacaaatgtaggaacgagatgatgaccatgactgagagctacgagcaagagaagtacacactccagcgagaggttgaactcaagtcacggatgctggagtccctgagttgtgagtgcgaagccataaaacaacaacagaaaatgcacctcgagaagctcgaagagcagttgagccggtctcacgggcaggaggtcaatgaactgaagaccaagattgagaagctgaaggtggaacttgacgaggccaggctttccgaaaagcagctgaaacaccaagttgaccatcagaaggagctcctgtcttgcaaatccgaggaactgagggtgatgtcagagagggttcaagaaagtatgtcttctgagatgcttgctttgcaaattgagctgaccgaaatggaatctatgaaggtgaaatatcagagcctgaaaaagcaaaatgtgtttaatcgtgaacagatgcaacgaatgaaactccagatcgcaaccctgttgcagatgaagggaagccagactgaatttgaacagcaggagagattgttggccatgttagagcagaaaaatggggaaataaagcacctcctgggcgaaatccgaaatctggaaaagtttaagaacctgtatgattcaatggagtcgaagccctccgtggattcggggaccttggaagataatacatattataccgacttgctccagatgaaactggacaatctcaataaagaaatcgagagcacaaagggggagctgtctattcagcggatgaaagccttgtttgaaagccagcgagctctagacatcgaaagaaagctgttcgccaatgaacggtgcctccagctgtcggaaagtgagaacatgaaacttcgtgccaagcttgacgagctaaaactgaagtatgagccggaggagactgtggaggttccggtcttaaagaagcggcgtgaggtgctgccagtggacatcacaactgcaaaagatgcatgcgttaataattcagcgcttggtggagaagtgtatcgactccctccccaaaaggaggaaacccaatcttgccctaactcacttgaagacaacaatctgcaactggagaagagcgtgtccatttacactcctgttgtgtctctgtccccacacaagaatctgccagtggacatgcagctgaagaaggaaaagaagtgcgtgaaattaatcggcgtgcctgcagacgccgaagccctttcagaacgcagcggaaataccccaaactccccaaggctcgccgcagaatcgaagcttcaaactgaagtgaaggagggaaaagaaacctcctccaagctcgaaaaggagacatgtaagaagctccatcccattctctacgtgtccagtaaatctactcctgagactcagtgcccccagcagtag

SEQ ID NO: 195081 - DNA, 261 bp, Artificial Sequence
  derived and/or modified sequence
atggaggcagatattataacgaacctccggtgtcgtctcaaggaggctgaagaggaacgcctgaaagctgcccagtatggattacagttagttgagagccagaacgaactgcagaaccaactagacaaatgccggaatgaaatgatgactatgacggaatcctacgaacaagagaagtacacccttcagagggaagtggagcttaaatccaggatgctggagagtttaagctgcgagtgtgaggctattaagcagcaatag

SEQ ID NO: 195082 - DNA, 453 bp, Artificial Sequence
  derived and/or modified sequence
atggaggcagatattataacgaatcttaggtgccggctaaaggaagccgaagaagagaggcttaaggccgctcaatacggcctacaactcgtagaatcacagaatgagctccaaaatcaattggacaagtgcagaaatgagatgatgaccatgaccgagagttatgagcaggaaaagtatacactacagcgagaggtggaactcaagtctagaatgctggaatctctgagctgcgaatgtgaggccattaagcagcagcagaagatgcatctcgagaagctagaagaacagctctctcgaagccatggacaggaagtgaacgaactaaaaaccaagatcgagaagctcaaagtggagctggacgaggcacgcctgagcgaaaaacagctgaaacatcaggtcgatcatcagaaggagcttctttcatgtaagtctgaggaactacgagtctag

SEQ ID NO: 195083 - DNA, 477 bp, Artificial Sequence
  derived and/or modified sequence
atggaggccgacatcatcacaaatctgaggtgtagactgaaggaggctgaagaggagcggttgaaggcagctcagtacggtctgcagctggtagaatcccaaaacgagttacagaaccagctcgacaagtgcagaaatgaaatgatgacaatgaccgagtcttacgaacaggaaaaatacacactccaacgggaagtggagctgaagagcagaatgcttgagagccttagctgcgagtgcgaggcaatcaaacagcagcaaaagatgcatcttgagaaactggaggagcagctgagcaggagccacggacaagaagtgaacgagctgaagaccaaaatcgaaaagctgaaggtagagctcgacgaggccagattgagcgagaagcagctgaagcaccaggtggaccatcagaaggagcttttgtcctgtaaatctgaagagctgagggtgatgtccgaaagagtgcaggaaagctag

SEQ ID NO: 195084 - DNA, 693 bp, Artificial Sequence
  derived and/or modified sequence
atggaagctgacataatcacaaatctgcggtgccgtctgaaggaggccgaggaggagaggctgaaagcggctcagtatggcctgcagctggtcgaaagccaaaatgaattacaaaaccaactcgacaagtgccgaaacgagatgatgactatgacggaatcatacgagcaggagaaatatacgctacagcgagaggtggaactcaaaagccgaatgctggagtcactgagctgcgaatgcgaagctattaaacagcagcagaaaatgcacctcgagaaactggaggaacagctgagcagatctcacggccaagaagtgaatgaactgaagaccaaaatcgaaaaactgaaagttgagttggacgaagcccgtctgtccgaaaagcaactgaagcatcaggtagaccatcagaaagagctactatcctgcaagagcgaggaattacgggttatgtccgagagagttcaggagtctatgagtagtgagatgttggctctacagattgaactgaccgagatggagtcaatgaagacaacactgaaagaagaggtaaatgagctgcagtatagacaggagcaattagagctgctaatcactaatcttatgcgacaggttgaccgcctcaaagaggagaaagaggagagagagaaggaagccgtctcctactacaatgcactggaaaaggcaagatag

SEQ ID NO: 195085 - DNA, 267 bp, Artificial Sequence
  derived and/or modified sequence
atggaggcagatatcattactaacctccgctgccgactgaaagaagccgaagaagagcgcctcaaggccgctcagtacggtctgcagttagtggaatctcagaatgaactgcagaaccaacttgataagtgcagaaacgagatgatgaccatgaccgaatcatacgagcaggaaaaatacacactccaacgggaagtcgagctcaagtcgaggatgcttgagagcttgtcatgcgagtgcgaagccattaagcagcagcagaagtag

SEQ ID NO: 195086 - DNA, 711 bp, Artificial Sequence
  derived and/or modified sequence
atgcgcagtagctgtaggagggggtgggcgctccattgggcgtttctcttggtttttcctttccgcgcggcttgggcggacgtctcgtgagacgtgggacttctcgcgggaactgcattcaaatatcccaggcgcttactcgagagctagctgagcgaatgggccggcgactgtggagttagcgtcctcaatgtggacgccctgagctcccattaggagccgctggctgcggcagcaggggactagcgtgagagtttcatgagggaggagcttttttttcgtccattttgttccctaatgaatctgaactgcccagaatggaacctagtatataaggcattcaagaaatactcgttcagtgaatgactacattgacttgagacatgggggaacatcttgcaatgacctggtgccctttgaaggcaaagttggctaaaaaaaagaaaagaacatggaggcagatataatcacaaatcttcgatgcaggctcaaagaggctgaagaagagcgactaaaagctgcacagtatggtttacaactagtagagagtcaaaatgaattacagaatcaattggataaatgtcgtaatgaaatgatgaccatgactgagagttatgaacaagaaaaatatacccttcaaagagaagttgaactcaagagtcgaatgttagaaagtttgagctgcgaatgtgaagctattaaacaacaaca

SEQ ID NO: 195087 - DNA, 623 bp, Artificial Sequence
  derived and/or modified sequence
atcccaggcgcttactcgagagctagctgagcgaatgggccggcgactgtggagttagcgtcctcaatgtggacgccctgagctcccattaggagccgctggctgcggcagcaggggactagcgtgagagttttatttcctctatttacagttggctaaaaaaaagaaaagaacatggaggcagatataatcacaaatcttcgatgcaggctcaaagaggctgaagaagagcgactaaaagctgcacagtatggtttacaactagtagagagtcaaaatgaattacagaatcaattggataaatgtcgtaatgaaatgatgaccatgactgagagttatgaacaagaaaaatatacccttcaaagagaagttgaactcaagagtcgaatgttagaaagtttgagctgcgaatgtgaagctattaaacaacaacaaaaaatgcacctggagaaattggaagaacaactaagcagaagccatggacaggaagtgaatgaactaaaaactaagatagaaaaactgaaagtggaattagatgaagccaggcttagtgaaaagcagctgaagcaccaagtagatcatcagaaggaactcctctcttgtaaatcagaggaactgcgcgt

SEQ ID NO: 195088 - DNA, 637 bp, Artificial Sequence
  derived and/or modified sequence
cttatacactgggttccgagccggtcttatcttccgctggaccacctcgccgccctcagggattctggacaaatatggaacgttgggtcggttgccgggtcctcaaaattataaccgccactggatctgcgctgtgcgttggctaaaaaaaagaaaagaacatggaggcagatataatcacaaatcttcgatgcaggctcaaagaggctgaagaagagcgactaaaagctgcacagtatggtttacaactagtagagagtcaaaatgaattacagaatcaattggataaatgtcgtaatgaaatgatgaccatgactgagagttatgaacaagaaaaatatacccttcaaagagaagttgaactcaagagtcgaatgttagaaagtttgagctgcgaatgtgaagctattaaacaacaacaaaaaatgcacctggagaaattggaagaacaactaagcagaagccatggacaggaagtgaatgaactaaaaactaagatagaaaaactgaaagtggaattagatgaagccaggcttagtgaaaagcagctgaagcaccaagtagatcatcagaaggaactcctctcttgtaaatcagaggaactgcgcgtaatgtctgaacgtgtgcaggaaagcat

SEQ ID NO: 195089 - DNA, 896 bp, Artificial Sequence
  derived and/or modified sequence
tgagcgaatgggccggcgactgtggagttagcgtcctcaatgtggacgccctgagctcccattaggagccgctggctgcggcagcaggggactagcgtgagagggattctggacaaatatggaacgttgggtcggttgccgggtcctcaaaattataaccgccactggatctgcgctgtgcgttggctaaaaaaaagaaaagaacatggaggcagatataatcacaaatcttcgatgcaggctcaaagaggctgaagaagagcgactaaaagctgcacagtatggtttacaactagtagagagtcaaaatgaattacagaatcaattggataaatgtcgtaatgaaatgatgaccatgactgagagttatgaacaagaaaaatatacccttcaaagagaagttgaactcaagagtcgaatgttagaaagtttgagctgcgaatgtgaagctattaaacaacaacaaaaaatgcacctggagaaattggaagaacaactaagcagaagccatggacaggaagtgaatgaactaaaaactaagatagaaaaactgaaagtggaattagatgaagccaggcttagtgaaaagcagctgaagcaccaagtagatcatcagaaggaactcctctcttgtaaatcagaggaactgcgcgtaatgtctgaacgtgtgcaggaaagcatgtcttcagagatgctggctcttcaaattgagctgacagaaatggagagtatgaagaccaccctcaaagaagaagtgaatgaactacaatacagacaagaacagctagaacttcttattactaacctaatgcgccaggtagaccggcttaaagaggaaaaagaggagcgagagaaagaagcagtttcttactataatgccctagagaaagctcgtg

SEQ ID NO: 195090 - DNA, 552 bp, Artificial Sequence
  derived and/or modified sequence
ctcgcgggaactgcattcaaatatcccaggcgcttactcgagagctagctgagcgaatgggccggcgactgtggagttagcgtcctcaatgtggacgccctgagctcccattaggagccgctggctgcggcagcaggggactagcgtgagagaatggaacctagtatataaggcattcaagaaatactcgttcagtgaatgactacattgacttgagacatgggggaacatcttgcaatgacctggtgccctttgaaggcaaagttggctaaaaaaaagaaaagaacatggaggcagatataatcacaaatcttcgatgcaggctcaaagaggctgaagaagagcgactaaaagctgcacagtatggtttacaactagtagagagtcaaaatgaattacagaatcaattggataaatgtcgtaatgaaatgatgaccatgactgagagttatgaacaagaaaaatatacccttcaaagagaagttgaactcaagagtcgaatgttagaaagtttgagctgcgaatgtgaagctattaaacaacaacaaaaaa

SEQ ID NO: 195091 - DNA, 2668 bp, Artificial Sequence
  derived and/or modified sequence
acatgcgcagtagctgtaggagggggtgggcgctccattgggcgtttctcttggtttttcctttccgcgcggcttgggcggacgtctcgtgagacgtgggacttctcgcgggaactgcattcaaatatcccaggcgcttactcgagagctagctgagcgaatgggccggcgactgtggagttagcgtcctcaatgtggacgccctgagctcccattaggagccgctggctgcggcagcaggggactagcgtgagagttggctaaaaaaaagaaaagaacatggaggcagatataatcacaaatcttcgatgcaggctcaaagaggctgaagaagagcgactaaaagctgcacagtatggtttacaactagtagagagtcaaaatgaattacagaatcaattggataaatgtcgtaatgaaatgatgaccatgactgagagttatgaacaagaaaaatatacccttcaaagagaagttgaactcaagagtcgaatgttagaaagtttgagctgcgaatgtgaagctattaaacaacaacaaaaaatgcacctggagaaattggaagaacaactaagcagaagccatggacaggaagtgaatgaactaaaaactaagatagaaaaactgaaagtggaattagatgaagccaggcttagtgaaaagcagctgaagcaccaagtagatcatcagaaggaactcctctcttgtaaatcagaggaactgcgcgtaatgtctgaacgtgtgcaggaaagcatgtcttcagagatgctggctcttcaaattgagctgacagaaatggagagtatgaagaccaccctcaaagaagaagtgaatgaactacaatacagacaagaacagctagaacttcttattactaacctaatgcgccaggtagaccggcttaaagaggaaaaagaggagcgagagaaagaagcagtttcttactataatgccctagagaaagctcgtgtagcaaatcaagatcttcaggtacagttggaccaggcactccagcaagccttggatcccaatagtaaaggcaactctttgtttgcagaggtggaagatcgaagggcagcaatggaacgtcagctcatcagtatgaaagtcaagtatcagtcactaaagaagcaaaatgtatttaacagagaacagatgcagagaatgaagttacaaattgccacgttgctacagatgaaagggtctcaaactgaatttgagcagcaggaacggttgcttgccatgttggagcagaagaatggtgaaataaaacatcttttaggtgaaattagaaatctggagaaatttaagaatttatatgacagtatggaatctaagccttcagtcgactctggtactctggaagataacacctattatacagatttacttcagatgaagctggataacttaaacaaagaaattgaaagcactaaaggtgaattgtccatacagcgaatgaaagcattatttgagagccagcgggctctagatattgagcgaaaactttttgcaaatgaaagatgcctccagctttcagaaagtgaaaatatgaaactgagagctaaactagatgaattgaaactaaaatatgaacctgaagagacagttgaagtgcctgtactgaaaaagaggcgtgaggtgctccctgtggatataaccaccgctaaagatgcatgtgtcaacaacagtgctctcgggggagaagtttatcgattaccgcctcagaaagaggagacacagtcctgccctaacagtttagaagataacaacttgcaattagaaaaatcagtttctatatacacaccagtagtcagtctctctcctcacaaaaatctgcccgtggatatgcagctgaagaaggaaaagaaatgtgtgaaactcataggagttcccgctgacgctgaggccttaagtgaaagaagtggaaacacccctaactctcccaggttagctgctgaatcaaagcttcaaacagaagttaaagaaggaaaagaaacttcaagcaaattggaaaaagaaacttgtaagaaattacaccctattctatatgtgtcttctaaatctactccagagacccagtgccctcaacagtaaagacttgtctttaataagagtacggtgccacttgcctcaaaagttactatggtgcttaagattgtcttgatctgacatatatcaccttctgggttatttactcattgtgccaggacctggcattttcatgtgcctttgaccaagtgttcagaatttgcttgactctaacctggagagcttcttaagtgatgccccttcatggagcttctatgacagtgaataaactattaattgaaggaaaatgttataattaatgtatctatttgctgcattgtatatggattaaatgataaaaaacaagtaatctaccctcagagccatgtatttgagaatgcttcaatcatattttcctatgtacttttttttataaacttagttttagactatgttgtaaaaatgggaaggttgtaaactatgttgtaaaaataggaaatgtggcttaaaatatatacattatattgtttcaggattttgtcagtgtttaaagaaccaatgttcatctttgtatttatatacatgatttaaattttgtctaaaattttaaataaaactgcagtgatttatccttaaa

SEQ ID NO: 195092 - DNA, 2368 bp, Artificial Sequence
  derived and/or modified sequence
acatgcgcagtagctgtaggagggggtgggcgctccattgggcgtttctcttggtttttcctttccgcgcggcttgggcggacgtctcgtgagacgtgggacttctcgcgggaactgcattcaaatatcccaggcgcttactcgagagctagctgagcgaatgggccggcgactgtggagttagcgtcctcaatgtggacgccctgagctcccattaggagccgctggctgcggcagcaggggactagcgtgagagttggctaaaaaaaagaaaagaacatggaggcagatataatcacaaatcttcgatgcaggctcaaagaggctgaagaagagcgactaaaagctgcacagtatggtttacaactagtagagagtcaaaatgaattacagaatcaattggataaatgtcgtaatgaaatgatgaccatgactgagagttatgaacaagaaaaatatacccttcaaagagaagttgaactcaagagtcgaatgttagaaagtttgagctgcgaatgtgaagctattaaacaacaacaaaaaatgcacctggagaaattggaagaacaactaagcagaagccatggacaggaagtgaatgaactaaaaactaagatagaaaaactgaaagtggaattagatgaagccaggcttagtgaaaagcagctgaagcaccaagtagatcatcagaaggaactcctctcttgtaaatcagaggaactgcgcgtaatgtctgaacgtgtgcaggaaagcatgtcttcagagatgctggctcttcaaattgagctgacagaaatggagagtatgaaggtcaagtatcagtcactaaagaagcaaaatgtatttaacagagaacagatgcagagaatgaagttacaaattgccacgttgctacagatgaaagggtctcaaactgaatttgagcagcaggaacggttgcttgccatgttggagcagaagaatggtgaaataaaacatcttttaggtgaaattagaaatctggagaaatttaagaatttatatgacagtatggaatctaagccttcagtcgactctggtactctggaagataacacctattatacagatttacttcagatgaagctggataacttaaacaaagaaattgaaagcactaaaggtgaattgtccatacagcgaatgaaagcattatttgagagccagcgggctctagatattgagcgaaaactttttgcaaatgaaagatgcctccagctttcagaaagtgaaaatatgaaactgagagctaaactagatgaattgaaactaaaatatgaacctgaagagacagttgaagtgcctgtactgaaaaagaggcgtgaggtgctccctgtggatataaccaccgctaaagatgcatgtgtcaacaacagtgctctcgggggagaagtttatcgattaccgcctcagaaagaggagacacagtcctgccctaacagtttagaagataacaacttgcaattagaaaaatcagtttctatatacacaccagtagtcagtctctctcctcacaaaaatctgcccgtggatatgcagctgaagaaggaaaagaaatgtgtgaaactcataggagttcccgctgacgctgaggccttaagtgaaagaagtggaaacacccctaactctcccaggttagctgctgaatcaaagcttcaaacagaagttaaagaaggaaaagaaacttcaagcaaattggaaaaagaaacttgtaagaaattacaccctattctatatgtgtcttctaaatctactccagagacccagtgccctcaacagtaaagacttgtctttaataagagtacggtgccacttgcctcaaaagttactatggtgcttaagattgtcttgatctgacatatatcaccttctgggttatttactcattgtgccaggacctggcattttcatgtgcctttgaccaagtgttcagaatttgcttgactctaacctggagagcttcttaagtgatgccccttcatggagcttctatgacagtgaataaactattaattgaaggaaaatgttataattaatgtatctatttgctgcattgtatatggattaaatgataaaaaacaagtaatctaccctcagagccatgtatttgagaatgcttcaatcatattttcctatgtacttttttttataaacttagttttagactatgttgtaaaaatgggaaggttgtaaactatgttgtaaaaataggaaatgtggcttaaaatatatacattatattgtttcaggattttgtcagtgtttaaagaaccaatgttcatctttgtatttatatacatgatttaaattttgtctaaaattttaaataaaactgcagtgatttatcctt

SEQ ID NO: 195093 - DNA, 1818 bp, Artificial Sequence
  derived and/or modified sequence
atggaggccgacatcatcaccaacctgagatgcagactgaaggaggccgaggaggagagactgaaggccgcccagtacggcctgcagctggtggagagccagaacgagctgcagaaccagctggacaagtgcagaaacgagatgatgaccatgaccgagagctacgagcaggagaagtacaccctgcagagagaggtggagctgaagagcagaatgctggagagcctgagctgcgagtgcgaggccatcaagcagcagcagaagatgcacctggagaagctggaggagcagctgagcagaagccacggccaggaggtgaacgagctgaagaccaagatcgagaagctgaaggtggagctggacgaggccagactgagcgagaagcagctgaagcaccaggtggaccaccagaaggagctgctgagctgcaagagcgaggagctgagagtgatgagcgagagagtgcaggagagcatgagcagcgagatgctggccctgcagatcgagctgaccgagatggagagcatgaagaccaccctgaaggaggaggtgaacgagctgcagtacagacaggagcagctggagctgctgatcaccaacctgatgagacaggtggacagactgaaggaggagaaggaggagagagagaaggaggccgtgagctactacaacgccctggagaaggccagagtggccaaccaggacctgcaggtgcagctggaccaggccctgcagcaggccctggaccccaacagcaagggcaacagcctgttcgccgaggtggaggacagaagagccgccatggagagacagctgatcagcatgaaggtgaagtaccagagcctgaagaagcagaacgtgttcaacagagagcagatgcagagaatgaagctgcagatcgccaccctgctgcagatgaagggcagccagaccgagttcgagcagcaggagagactgctggccatgctggagcagaagaacggcgagatcaagcacctgctgggcgagatcagaaacctggagaagttcaagaacctgtacgacagcatggagagcaagcccagcgtggacagcggcaccctggaggacaacacctactacaccgacctgctgcagatgaagctggacaacctgaacaaggagatcgagagcaccaagggcgagctgagcatccagagaatgaaggccctgttcgagagccagagagccctggacatcgagagaaagctgttcgccaacgagagatgcctgcagctgagcgagagcgagaacatgaagctgagagccaagctggacgagctgaagctgaagtacgagcccgaggagaccgtggaggtgcccgtgctgaagaagagaagagaggtgctgcccgtggacatcaccaccgccaaggacgcctgcgtgaacaacagcgccctgggcggcgaggtgtacagactgcccccccagaaggaggagacccagagctgccccaacagcctggaggacaacaacctgcagctggagaagagcgtgagcatctacacccccgtggtgagcctgagcccccacaagaacctgcccgtggacatgcagctgaagaaggagaagaagtgcgtgaagctgatcggcgtgcccgccgacgccgaggccctgagcgagagaagcggcaacacccccaacagccccagactggccgccgagagcaagctgcagaccgaggtgaaggagggcaaggagaccagcagcaagctggagaaggagacctgcaagaagctgcaccccatcctgtacgtgagcagcaagagcacccccgagacccagtgcccccagcagtag

SEQ ID NO: 195094 - DNA, 1521 bp, Artificial Sequence
  derived and/or modified sequence
atggaggccgacatcatcaccaacctgagatgcagactgaaggaggccgaggaggagagactgaaggccgcccagtacggcctgcagctggtggagagccagaacgagctgcagaaccagctggacaagtgcagaaacgagatgatgaccatgaccgagagctacgagcaggagaagtacaccctgcagagagaggtggagctgaagagcagaatgctggagagcctgagctgcgagtgcgaggccatcaagcagcagcagaagatgcacctggagaagctggaggagcagctgagcagaagccacggccaggaggtgaacgagctgaagaccaagatcgagaagctgaaggtggagctggacgaggccagactgagcgagaagcagctgaagcaccaggtggaccaccagaaggagctgctgagctgcaagagcgaggagctgagagtgatgagcgagagagtgcaggagagcatgagcagcgagatgctggccctgcagatcgagctgaccgagatggagagcatgaaggtgaagtaccagagcctgaagaagcagaacgtgttcaacagagagcagatgcagagaatgaagctgcagatcgccaccctgctgcagatgaagggcagccagaccgagttcgagcagcaggagagactgctggccatgctggagcagaagaacggcgagatcaagcacctgctgggcgagatcagaaacctggagaagttcaagaacctgtacgacagcatggagagcaagcccagcgtggacagcggcaccctggaggacaacacctactacaccgacctgctgcagatgaagctggacaacctgaacaaggagatcgagagcaccaagggcgagctgagcatccagagaatgaaggccctgttcgagagccagagagccctggacatcgagagaaagctgttcgccaacgagagatgcctgcagctgagcgagagcgagaacatgaagctgagagccaagctggacgagctgaagctgaagtacgagcccgaggagaccgtggaggtgcccgtgctgaagaagagaagagaggtgctgcccgtggacatcaccaccgccaaggacgcctgcgtgaacaacagcgccctgggcggcgaggtgtacagactgcccccccagaaggaggagacccagagctgccccaacagcctggaggacaacaacctgcagctggagaagagcgtgagcatctacacccccgtggtgagcctgagcccccacaagaacctgcccgtggacatgcagctgaagaaggagaagaagtgcgtgaagctgatcggcgtgcccgccgacgccgaggccctgagcgagagaagcggcaacacccccaacagccccagactggccgccgagagcaagctgcagaccgaggtgaaggagggcaaggagaccagcagcaagctggagaaggagacctgcaagaagctgcaccccatcctgtacgtgagcagcaagagcacccccgagacccagtgcccccagcagtag

SEQ ID NO: 195095 - protein, 342 aa, Artificial Sequence
  derived and/or modified sequence
MPFLLGLRQDKEACVGTNNQSYICDTGHCCGQSQCCNYYYELWWFWLVWTIIIILSCCCVCHHRRAKHRLQAQQRQHEINLIAYREAHNYSALPFYFRFLPNYLLPPYEEVVNRPPTPPPPYSAFQLQQQQLLPPQCGPAGGSPPGIDPTRGSQGAQSSPLSEPSRSSTRPPSIADPDPSDLPVDRAATKAPGMEPSGSVAGLGELDPGAFLDKDAECREELLKDDSSEHGAPDSKEKTPGRHRRFTGDSGIEVCVCNRGHHDDDLKEFNTLIDDALDGPLDFCDSCHVRPPGDEEEGLCQSSEEQAREPGHPHLPRPPACLLLNTINEQDSPNSQSSSSPS

SEQ ID NO: 195096 - DNA, 1029 bp, Artificial Sequence
  derived and/or modified sequence
atgccatttctgctgggcctcaggcaggataaggaggcctgcgttggcactaacaaccaaagctacatatgcgataccggacactgctgtgggcagtcacagtgctgtaattactactatgagctgtggtggttttggctcgtgtggaccatcattattatcctctcctgttgctgtgtgtgccaccatcggagggccaaacaccggctgcaggcgcagcagcgccagcatgagattaatctcatcgcctaccgtgaggcacacaactattctgctctccccttttatttccgctttctacctaattatttgctgcccccctatgaggaagtagtcaaccggcctcccacccccccaccaccatattcagcttttcagcttcaacagcaacaactgctgccaccacaatgcggacctgccggggggagcccccccggcatcgaccctactcgcggctcgcagggagcgcagtctagtccattatcagagcccagtcgctcgtccacccgccccccttccatagccgatcccgacccctcggatcttcccgtcgacagagccgctacaaaagcaccggggatggaaccaagcggctccgtggccggcttgggagaactagatcctggcgcttttttagacaaggatgccgaatgccgagaggaactgctgaaggacgatagcagtgaacatggggctcccgattccaaggaaaaaacacctggcagacacaggcgctttaccggggactccggtatagaagtctgcgtctgcaaccgaggccatcatgacgacgatttgaaggagttcaatacgctgatcgacgacgccttggatggacctttagatttttgcgattcatgtcatgtacggcctcctggggacgaagaggagggcttgtgtcaatcaagcgaggagcaggcacgggaacccggccacccccacctgcctcgacctccagcttgcctgcttctaaataccataaatgaacaagacagtccaaactcccagagcagttcctccccttcctag

SEQ ID NO: 195097 - DNA, 1029 bp, Artificial Sequence
  derived and/or modified sequence
atgcccttcctgctgggcctgcggcaggacaaggaggcctgtgtgggcaccaacaaccagagctacatctgtgacaccggccactgctgcggccagagccagtgctgcaactactactatgagctgtggtggttctggctggtgtggaccatcatcatcatcctgagctgctgctgcgtgtgccaccaccggcgggccaagcaccggctgcaggcccagcagaggcagcacgagatcaacctgattgcctaccgggaggcccacaactacagcgccctgcccttctacttccgcttcctgcccaactacctgctgcccccctatgaggaggtggtgaacagaccacccaccccacctccaccctacagcgccttccagctgcagcagcagcagctgctgcccccccagtgtggccctgctgggggcagccccccaggcatcgaccccacccggggcagccagggcgcccagagcagccccctgtctgagcccagccgcagcagcaccaggcctccttccattgctgaccctgaccccagcgacctgcctgtggacagagctgccaccaaggcccctggcatggagcccagcggctctgtggccggcctgggggagctggaccccggggccttcctggacaaggatgctgaatgtcgggaggagctgctgaaggatgacagcagcgagcacggggccccagacagcaaggagaagaccccaggccgccaccggcgcttcaccggggacagcggcatcgaggtgtgtgtgtgcaacagaggccaccatgatgatgacctgaaggagttcaacaccctgattgatgatgccctggatggccccctggacttctgtgacagctgccacgtgcggcccccaggagatgaggaggagggcctgtgccagagcagcgaggagcaggcccgggagcccggccacccccacctgccccggcccccagcctgcctgctgctgaacaccatcaatgagcaggacagccccaacagccagagcagcagcagccccagctag

SEQ ID NO: 195098 - DNA, 1029 bp, Artificial Sequence
  derived and/or modified sequence
atgcccttcctgctgggcctgcggcaggacaaggaggcctgcgtgggaactaataatcaatcatatatttgcgatactggtcattgctgcgggcaaagccagtgctgcaactactactacgaattatggtggttttggttggtgtggacgattattatcatactttcctgttgttgcgtttgtcaccataggcgcgctaagcaccgcctgcaagcccagcagcgccagcatgagatcaacctgatagcctacagggaagctcacaactacagtgcgctacctttttattttcgtttcctgcccaattacctccttcctccttatgaagaagtggtgaaccgcccccccacacctccacctccttactctgcctttcagcttcagcaacagcagctgctgccaccgcagtgtgggcccgccggagggtcacccccaggtatcgatccaacccgcggctcacagggggcacagtctagccccttatctgaaccctcacggagctctacgcgacctccatccattgccgacccagacccctcagacctccctgtagatagagcagcaacgaaggctcctggcatggagcccagtggcagcgtggctgggctgggggagttggaccctggagcctttctggacaaagatgccgagtgccgggaagaattgcttaaggatgatagttcagagcatggcgctccagacagcaaggagaagactccagggcgacacagaagatttacaggcgactctggaatcgaagtttgcgtttgtaacagaggccaccacgatgacgacctgaaggagttcaataccctcatagacgacgcactggatggtccacttgacttttgtgactcgtgccatgttcgacccccaggtgatgaagaggagggcctgtgccagagcagcgaggagcaggccagggagccaggccacccacatcttcctagaccgccggcctgtctcctgttgaacactattaatgaacaggatagtccaaatagccagtcaagctccagcccatcctag

SEQ ID NO: 195099 - DNA, 1029 bp, Artificial Sequence
  derived and/or modified sequence
atgccgttcctattaggacttcggcaggataaagaggcttgcgtcggtacgaataaccagtcctacatttgcgatacaggccactgctgtgggcagtctcagtgctgcaattattactacgagctgtggtggttttggctcgtgtggaccattattattatcctgagctgctgttgcgtctgccaccacagacgagcaaagcacaggctgcaggcccagcagaggcagcacgagatcaacctaatcgcatatagggaggcccacaattattccgccctccctttctactttagattcctcccgaactatctgctgccaccttatgaggaggtcgtcaatcgccctcctacccctcccccaccttacagcgctttccagctgcagcagcagcagctgctccctccccagtgcgggccagcaggcggttctccacccggaatcgaccctactaggggaagccagggcgcacagtcaagtcccttgtctgagccatcacggagctcaacgagacccccttcgatagccgacccagacccatcagatttgcctgtcgaccgggcagcaacaaaagcccctgggatggagcccagcggctccgtggccggactgggggagctggaccctggcgcatttttggataaagacgctgagtgtagagaggaactgttgaaggacgacagcagtgaacatggggcaccagattcaaaggagaagacccctgggcgtcaccggagattcaccggggattctggaattgaggtatgcgtttgcaacagaggccatcacgatgatgaccttaaagaatttaataccctgatagatgatgcccttgatggacccctggacttctgcgattcttgtcacgttcgaccacctggcgacgaagaggaaggattatgccagtcttcggaggagcaggcccgtgagccgggacatccccacttaccacgcccaccggcttgcctgcttcttaacaccataaacgaacaggactcccccaattcccagtcctcatcatcccccagttag

SEQ ID NO: 195100 - DNA, 4104 bp, Artificial Sequence
  derived and/or modified sequence
tttactttgtctgctttgctaaagaaggccggtgaaccaggaccaccgcacacacaggcccaccaggggcaatgctcattccaagaccttaacttttaagagccctttgttccaacgttagtgtggacgatgctcttgcaggatgcctttccttttgggtcttagacaggataaggaagcctgtgtgggtaccaacaatcaaagctacatctgtgacacaggacactgctgtggacagtctcagtgctgcaactactactatgaactctggtggttctggctggtgtggaccatcatcatcatcctgagctgctgctgtgtttgccaccaccgccgagccaagcaccgccttcaggcccagcagcggcaacatgaaatcaacctgatcgcttaccgagaagcccacaattactcagcgctgccattttatttcaggtttttgccaaactatttactacctccttatgaggaagtggtgaaccgacctccaactcctcccccaccatacagtgccttccagctacagcagcagcagctgctgcctccacagtgtggccctgcaggtggcagtcccccgggcatcgatcccaccaggggatcccagggggcacagagcagccccttgtctgagcccagcagaagcagcacaagacccccaagcatcgctgaccctgatccctctgacctaccagttgaccgagcagccaccaaagccccagggatggagcccagtggctctgtggctggcctgggggagctggacccgggggccttcctggacaaagatgcagaatgtagggaggagctgctgaaagatgacagctctgaacacggcgcacccgacagcaaagagaagacgcctgggagacatcgccgcttcacaggtgactcgggcattgaagtgtgtgtgtgcaaccggggccaccatgacgatgacctcaaagagttcaacacactcatcgatgatgctctggatgggcccctggacttctgcgacagctgccatgtgcggccccctggtgatgaggaggaaggcctctgtcagtcctctgaggagcaggctcgagagcctgggcacccgcacctgccacggccgcccgcatgcctgctgctgaacaccatcaacgagcaggactctcccaactcccagagcagcagctcccccagctagagcaggtcctgccagcacccagcaacttggcaaagcaaccagggtaggggagaaccacgagagaagcattaagtgactttcaaagactttcagagtacagccacttggttcctttttgtttgttttccttctcctctcctgcattttcctccatctccaggtacagttcggggtgtggatgcctcttcctccacaagggcacagtgttgtggagggctaagttggttctgtgactcattcctcataccctaactccatctcctttctttaaagtcaaatctcacctacctgtttgggtcagagagatgtgttttaaaagcccccaaggaaggaggctgggactgtgccctgacatgattcttggtgatggaataggtttgtgctctgattctagtttaagagaacgttgctgtatctcagtccaggagaggcagcccatcttggccctggatgaagaaggaaacccacagaggcccagggcttgtcattgggctgccagtgtctgccaagccagcattgagctaatcctgtgggaggatgagagctactgggccgttgtatgataggttggtaggggcttgttgatctgtcaaattccaggtgacaagatctatgcaccccatgcgtccttgaggggcctcttccccgcaggctctggctggccgcaggctggttctggtgtgaaaggttatactgccttttctttgtttgtttgtttttttctctaaaaacaaacagcaaaagacagctgaaaacaagaacttcaccggtgggcaggcaagaattctcttctggaaaatgacgtttgtggctctttcccaagttggccttcaaagagcctgcctgctgttgagccagaagatgtctcgtgtgaaggctggggtggcggctgtcttggaacctctgtgagcaggaggccctaagccgcagcagtggatagaggtgcagctctctgcctctctgccctttggtctgtgttcacaggtgacccgtgtcagcctgcatcgcaagcacacaccctgcgggccttcaagtctcactgttccgtatgaggaaacagacagcggactgaggaagcgatggccccagagaaagggcccctgtagcctggctctcacacagtattttatctttgattctgaataaatattttttgtggggttttttttttttttttggtggcagttgtttgttttaaactgaccacttggaagaaacaccttggttatctgtggttttcatgccttgtccctgcctctacccccaccccttttgagtcgggtgactcatttttctgtgtagagactcggtggcccaggcaggaggtgaaagcagccatccggaaggccctggggacccttgtgcctgttgctcgccttcaggtcaccagctgagctgcgataggaaaatctgaatggaggcagcaaacagccaaaacaaacattccccacccggccctgtgcatatgaagtctttcttcccccaactcttgaacgatgatgatattcagacgaagcattgatgttatggaagaaagaaagaaacaaacaaaatatatatatatatgtccaaaaacagacaaatccaagggtgtgaggtaaacgagtgtctgcatttagattccacaaaaccaaaatccatgttgaacaaagttaagtccgtacacagtgactttttgggtgagccgtgtgtgtctgtctgttgtgtgtgtgcctcaagccctgttttcctgtgaagatactttgagtggcagccattctctccacgtgaaccacacgtctggagcacagacaggcctctcaaggtcattgatcttacgcatttactgtttaccgaacaaatgtctgactgtgtactcgggtgtactccgcagcattgtcgactgcagtcccctgtgtttgccagagatactgtgctcgaagtagaggttttactctactcatcactgcgatttgcacattgctccgtggacactcggaggcctgcgttctgttccctataaatggaagcgtgctctgagcctgtctgcctccctcggctgctgctggtcctcagtaccagcgcccgggggtgtccacaaccacttgggacagaagaaggtggaatttcagacagaagcttgactgggtcttcaatgacaggcttggactagctgtggcccagacatcggccctgcccagaattgccaggaggaggctttgcaggctctagaggagccgcagggcctgcctgcctctggtgagtccaacaggcacaagcaagctggcgtgtggccagaggtagccggagtgtgtcacagcccctcagatgcctttccttccacctttttttattttttaagaatcccaaataactcactgaagtgtctcaaaggcgaacaagttttaccaaaatgaatcctttttcagttaacagatcaaatggatgagttctgagcctctcaagttcctttccccagttagagtggggaactgggcaagtgttaactgtgggactcactgcagcgtcctatcctaaaggcacgagaagacggaaatgcaacctgcggagctgggcttggttcccaggtcacagtttggcccccgctacaggatgctgccctgctcagagagagatttaatagggagctgaaggaatcgttagggggccagggagatgtgactgaggctggctttccacgtgaatgagacggggtcggtggagggtttggtgctacagccagtcagaagatttgcaaatgcgaacacattcctgtgtgaggcacgttaccctttgtcagttattgtgaatatgtgtattttaagcaataagattcagctggtcagacttttctgggcagtctcagtgacgcatttcctgtgctgtgattgttctgaagacagagtggctctaaccactgtgagaagcccaaataaaaattgatcccaaaaatg

SEQ ID NO: 195101 - DNA, 1029 bp, Artificial Sequence
  derived and/or modified sequence
atgcccttcctgctgggcctgagacaggacaaggaggcctgcgtgggcaccaacaaccagagctacatctgcgacaccggccactgctgcggccagagccagtgctgcaactactactacgagctgtggtggttctggctggtgtggaccatcatcatcatcctgagctgctgctgcgtgtgccaccacagaagagccaagcacagactgcaggcccagcagagacagcacgagatcaacctgatcgcctacagagaggcccacaactacagcgccctgcccttctacttcagattcctgcccaactacctgctgcccccctacgaggaggtggtgaacagaccccccacccccccccccccctacagcgccttccagctgcagcagcagcagctgctgcccccccagtgcggccccgccggcggcagcccccccggcatcgaccccaccagaggcagccagggcgcccagagcagccccctgagcgagcccagcagaagcagcaccagaccccccagcatcgccgaccccgaccccagcgacctgcccgtggacagagccgccaccaaggcccccggcatggagcccagcggcagcgtggccggcctgggcgagctggaccccggcgccttcctggacaaggacgccgagtgcagagaggagctgctgaaggacgacagcagcgagcacggcgcccccgacagcaaggagaagacccccggcagacacagaagattcaccggcgacagcggcatcgaggtgtgcgtgtgcaacagaggccaccacgacgacgacctgaaggagttcaacaccctgatcgacgacgccctggacggccccctggacttctgcgacagctgccacgtgagaccccccggcgacgaggaggagggcctgtgccagagcagcgaggagcaggccagagagcccggccacccccacctgcccagaccccccgcctgcctgctgctgaacaccatcaacgagcaggacagccccaacagccagagcagcagcagccccagctag

SEQ ID NO: 195102 - protein, 602 aa, Artificial Sequence
  derived and/or modified sequence
MERSLHRVSLGSRRAHPDLSFYLTTFGQLRLSIDAQDRVLLLHIIEGKGLISKQPGTCDPYVKISLIPEDSRLRHQKTQTVPDCRDPAFHEHFFFPVQEEDDQKRLLVTVWNRASQSRQSGLIGCMSFGVKSLLTPDKEISGWYYLLGEHLGRTKHLKVARRRLRPLRDPLLRMPGGGDTENGKKLKITIPRGKDGFGFTICCDSPVRVQAVDSGGPAERAGLQQLDTVLQLNERPVEHWKCVELAHEIRSCPSEIILLVWRMVPQVKPGPDGGVLRRASCKSTHDLQSPPNKREKNCTHGVQARPEQRHSCHLVCDSSDGLLLGGWERYTEVAKRGGQHTLPALSRATAPTDPNYIILAPLNPGSQLLRPVYQEDTIPEESGSPSKGKSYTGLGKKSRLMKTVQTMKGHGNYQNCPVVRPHATHSSYGTYVTLAPKVLVFPVFVQPLDLCNPARTLLLSEELLLYEGRNKAAEVTLFAYSDLLLFTKEDEPGRCDVLRNPLYLQSVKLQEGSSEDLKFCVLYLAEKAECLFTLEAHSQEQKKRVCWCLSENIAKQQQLAASPPDSKKLHPFGSLQQEMGPVNSTNATQDRSFTSPGQTLIG

SEQ ID NO: 195103 - DNA, 1809 bp, Artificial Sequence
  derived and/or modified sequence
atggagagatccctgcaccgcgtgagtctgggctctcggcgcgcgcatcccgatttatcattctatttgacaacttttgggcagctgcgcttgagtatcgacgctcaggaccgcgtactgttacttcatataattgagggcaaaggcttaatatccaagcagcctggcacctgcgacccgtacgtcaaaataagtctcattccggaggacagccgcctcaggcatcaaaaaacacaaacagtacccgattgccgggaccccgcattccacgagcattttttcttcccagtccaggaggaggatgatcaaaagaggttacttgtgacggtgtggaatcgcgcttctcagtccagacagtctgggctgatcgggtgtatgtcatttggagtgaagtcgctgctgacgcctgacaaagagattagtggctggtattaccttctgggtgaacacctgggaagaacaaaacacttgaaggtggccaggaggcggctgaggccgttacgggatccactgctcaggatgccaggcgggggagatactgaaaatgggaagaagctgaaaattaccatccccagagggaaggacggttttggctttacaatttgttgcgatagtccggtgcgagtccaggccgtcgacagcgggggccccgcagagcgcgctgggcttcagcagctggacaccgtgcttcagctaaacgagaggcctgtggagcattggaaatgcgtcgagctcgctcacgaaataaggtcatgtccgtcagaaatcattctacttgtatggagaatggtcccacaggttaagcccgggcccgatggcggcgtgctgaggagagcctcctgcaagagcactcatgacttgcagtcacccccaaacaaaagagagaaaaactgcacacacggagttcaggcgcgaccagaacagagacacagctgtcacctggtctgtgattccagcgacggattgcttttaggaggttgggagcgatacacagaggtggcaaagcggggtggccagcatacgctgcccgccctcagccgtgctactgcgcccacggatccgaactacataattctagctcccctgaatcccggctcacagttgctgcggcctgtctatcaagaggacacaatccctgaggagtcaggaagcccaagcaagggcaagtcttacactggtcttggcaaaaaaagccgtcttatgaaaaccgtgcagactatgaaggggcacggcaactaccagaattgcccggtggtccggccccacgcgactcattccagctatggaacatatgtgaccttggcccccaaggtcctcgtattccctgtcttcgttcaacctctggacctctgtaaccctgctcggacgctcctcctgagcgaggagctactgctgtatgaaggtagaaacaaggccgccgaggtgactctatttgcttactccgacctactgctgttcactaaagaggacgaaccaggaagatgtgacgtacttcgaaaccctctgtacctgcagtccgtgaaactgcaagagggaagctccgaggacctcaaattttgcgtcctgtatcttgccgaaaaggccgaatgcctgtttacacttgaggcacacagccaggaacaaaagaagagggtgtgttggtgcctctctgagaatattgcgaagcaacaacaattggctgcttctccaccagacagcaagaagttgcaccctttcggctctcttcagcaagaaatgggacctgtgaatagcactaacgctacgcaggaccgcagtttcacttcccccgggcagaccctcattggctag

SEQ ID NO: 195104 - DNA, 1809 bp, Artificial Sequence
  derived and/or modified sequence
atggagaggagcctgcaccgggtgtccctgggcagcagaagagcccacccagacctgtccttctacctgaccaccttcggccagctgcggctgagcattgatgcccaggacagagtgctgctgctgcacatcatcgagggcaagggcctcatcagcaagcagcccggcacctgtgacccctacgtgaagatcagcctcatccctgaggacagccggctgcggcaccagaagacccagacagtgcctgactgccgggaccctgccttccacgagcacttcttcttccctgtgcaggaggaggatgaccagaagaggctgctggtgacagtgtggaacagagccagccagagccggcagagcggcctgattggctgcatgagctttggagtgaagagcctgctgaccccagacaaggagatcagcggctggtactacctgctgggggagcacctgggccgcaccaagcacctgaaggtggcccggcggcggctgcggcccctgcgggaccccctgctgaggatgcctgggggcggggacacagaaaatggcaagaagctgaagatcaccatcccccggggcaaggatggcttcggcttcaccatctgctgtgacagccctgtgcgggtgcaggccgtggacagcggcggccctgctgagagagctggcctgcagcagctggacacagtgctgcagctgaatgaaagacctgtggagcactggaagtgtgtggagctggcccacgagatccgcagctgccccagcgagatcatcctgctggtgtggaggatggtgccccaggtgaagccaggcccagatggcggcgtgctgcggcgggccagctgcaagagcacccatgacctgcagagcccccccaacaagcgggagaagaactgcacccacggcgtgcaggcccggcctgagcagaggcacagctgccacctggtgtgtgacagcagtgatggcctgctgctgggcggctgggagcgctacacagaggtggccaagagaggaggccagcacaccctgcctgccctgagccgggccacagcccccacagaccccaactacatcatcctggcccccctgaaccctggcagccagctgctgcggcctgtgtaccaggaggacaccatccctgaggagagcggcagccccagcaagggcaagagctacacaggcctgggcaagaagagccggctgatgaagacagtgcagaccatgaagggccacggcaactaccagaactgccctgtggtgcggccccacgccacccacagcagctatggcacctacgtgaccctggcccccaaggtgctggtgtttcctgtgtttgtgcagcccctggacctgtgcaacccagcccggaccctgctgctgtctgaggagctgctgctgtatgagggcaggaacaaggctgctgaggtgaccctgtttgcctacagcgacctgctgctcttcaccaaggaggatgagcccggccgctgtgatgtgctgaggaaccccctgtacctgcagagcgtgaagctgcaggagggcagcagcgaggacctgaagttctgtgtgctgtacctggccgagaaggcagaatgtctcttcaccctggaggcccacagccaggagcagaagaagagggtgtgctggtgcctgtctgaaaatattgccaagcagcagcagctggccgccagccccccagacagcaagaagctgcaccccttcggcagcctgcagcaggagatgggccctgtgaacagcaccaatgccacccaggacaggagcttcaccagccctggccagaccctgattggatag

SEQ ID NO: 195105 - DNA, 1809 bp, Artificial Sequence
  derived and/or modified sequence
atggagcggagcctgcaccgggtgagcctgggcagccggcgggcccaccccgacctgtctttttacctcactacattcggtcagctgcgccttagcattgacgctcaggatcgcgtccttctcttgcacataatcgagggtaaagggctgatctctaaacaaccagggacctgcgacccctacgtgaaaatttccctgataccagaagatagcagactacggcaccagaaaacccagaccgtgcctgattgccgcgatcctgccttccatgagcatttttttttccctgttcaggaggaggatgaccagaaaagacttctggtgaccgtgtggaaccgggcatctcagagccggcagtcaggtttaattgggtgcatgtcatttggagtaaagtccctcttgacgcctgacaaggaaatctcaggatggtattatctgctgggcgagcacttggggcggacaaagcatcttaaggtggcaagaagaagactgagaccattgagggatcctcttctgagaatgcctggtggtggggacacagagaacggcaaaaaactgaaaataacaatcccccggggaaaggatggcttcgggtttacgatttgctgcgactcacccgtccgggttcaggccgttgatagcgggggtccggcggagagagccggtctacaacaacttgatactgttctacagctgaacgaaagacctgtcgaacattggaagtgcgtagaacttgcccacgagattcggagctgcccatctgagattattctcctggtgtggaggatggtccctcaagttaagcctgggcccgacggaggcgttctgaggagagcctcatgcaagtctacccacgatttacagtcaccccctaacaagcgggaaaagaactgcacccacggggttcaagccaggcccgagcagcggcacagctgtcaccttgtctgcgacagctctgatgggctcctcttgggggggtgggaaagatacaccgaagtggcaaagcgagggggccaacacaccttgccggcactgagcagggccaccgctcctacagaccccaactatattattcttgcgcccctgaatccgggcagccagctcctgcgccccgtgtaccaggaggacacaattcccgaagaaagcggatccccgtccaagggaaaaagctatacgggactggggaaaaagagtcggctcatgaagactgtgcagactatgaaaggccacggtaactaccagaattgtccggtagttagaccacatgccacccactcttcttacggaacgtatgtgacccttgcaccgaaagtcctggtctttccagtcttcgttcagccgctcgatttatgcaacccagcacgcaccctgttattaagcgaggagctgcttctgtacgaagggcgaaataaagcggctgaggtcacactgtttgcatactccgacctgctactttttactaaggaggatgaaccaggtcgctgtgatgtgctgcggaacccactgtacttgcagagtgtgaaactgcaggaggggtccagcgaagaccttaaattttgcgttctgtacctagcggaaaaggctgagtgccttttcacactggaggcccacagccaggagcaaaaaaagcgcgtgtgctggtgcctatctgagaatatcgcgaagcagcagcaacttgcagcctcgcctcctgactccaagaagctacacccctttggttctctccaacaggaaatgggccccgtgaatagcacgaacgcgactcaggaccgtagttttactagcccgggacagacactgatcggatag

SEQ ID NO: 195106 - DNA, 1809 bp, Artificial Sequence
  derived and/or modified sequence
atggagcgttcattgcacagggtgagtcttggcagccggagggctcatcccgatctgtctttctacttaaccacgtttggtcagctaaggctatccatcgatgcgcaggatcgtgtacttctgttacacatcatcgaggggaaaggcctcatttcaaaacagcccggtacatgtgacccttatgtcaagatatctctcattcccgaggattctcggcttcgacaccaaaaaacacagaccgtgccagattgccgagatcctgcgttccatgaacacttcttcttcccggtgcaggaagaggacgatcagaagcggctactcgtgactgtatggaatcgcgctagccagtcccgccagtccggcctgataggttgtatgtccttcggtgtgaaatccctgctgacccctgataaagaaatctctggatggtattaccttctgggcgagcatcttgggcgtaccaagcacctaaaagtggccaggaggcgtctgaggcccttgcgggatcctctgcttcggatgccaggagggggagatactgagaacgggaaaaagcttaagatcactatacccagaggaaaggacggctttggattcacaatctgctgtgattccccagttcgcgtgcaggccgtggacagcggaggcccagctgagagagcaggcctgcagcagctcgataccgttctccaactcaacgagagacctgtggagcactggaagtgcgttgagctggcccacgaaatacggagttgtccttcggagatcatcctgctagtctggcggatggttccccaggtgaaaccagggccagacggtggcgtgctgcgtagagcctcctgtaaatccacacatgatctgcagtcccccccaaacaagagggaaaagaactgcacacatggtgtccaggcgaggcccgagcagcgacactcatgtcacctggtctgcgactcgagcgacggcttgctacttggcggatgggagagatatactgaggtcgctaaacgcggaggacagcatactttacccgctctgtctagggcaactgcccctacggacccgaattacatcattttggcacccctgaatccaggctcacagctccttaggcccgtttaccaggaagacaccattcccgaggagtccggcagcccctccaaaggaaagtcgtacactgggctgggaaagaagagccggttaatgaaaacggtgcagactatgaaaggtcacggcaactatcaaaattgtccagtggtccgcccacacgcgacgcattcgagctacggaacctacgtaacccttgcacccaaggttctggtcttccctgtgttcgtgcaaccgctggatctctgcaatcctgcacgtaccctgctgctgtccgaagagttactcctgtacgagggaaggaataaggctgccgaagtgacattattcgcctatagcgatctgctgctgtttaccaaggaagacgagccaggtcggtgcgacgtgttgaggaaccccctctatctgcagtccgtcaagctacaggaggggagctcggaagacctgaagttctgtgtgttataccttgctgagaaagccgaatgtctgttcacactcgaggcacactctcaagaacagaaaaaaagagtgtgctggtgtctgtcagagaacatcgctaagcagcaacaactagccgcttctccccctgacagtaaaaagctacacccttttggctcactgcaacaagagatggggcctgtgaacagcacaaatgcgacccaagacaggtcctttaccagccctggacagactcttattggttag

SEQ ID NO: 195107 - DNA, 2542 bp, Artificial Sequence
  derived and/or modified sequence
ctccggttactggggagcaacacagccgcctcgggttgcagacgctcctgtccgggtcgcagtgggacgccatggagcgctccctgcaccgcgtctccctcgggagccggcgtgcccacccggacttgtccttctacctcaccacctttggtcagctgaggctgtccattgatgcccaggaccgggttctgctgcttcacattatagaaggtaaaggcctgatcagcaaacagcctggcacctgtgatccgtatgtgaagatttctttgatccctgaagatagtagactacgccaccagaagacgcagaccgttccagactgcagagacccggctttccacgagcacttcttctttcctgtccaagaggaggatgatcagaagcgtctcttggttactgtgtggaacagggccagccagtccagacagagtggactcattggctgcatgagctttggggtgaagtctctcctgactccagacaaggagatcagtggttggtactacctcctaggggagcacctgggccggaccaagcacttgaaggtggccaggcggcgactgcggccgctgagagacccgctgctgagaatgccaggaggtggggacactgagaatgggaagaaactaaagatcaccatcccgaggggaaaggacggctttggcttcaccatctgctgcgactctccagttcgagtccaggccgtggattccgggggtccggcggaacgggcagggctgcagcagctggacacggtgctgcagctgaatgagaggcctgtggagcactggaaatgtgtggagctggcccacgagatccggagctgccccagtgagatcatcctactcgtgtggcgcatggtcccccaggtcaagccaggaccagatggcggggtcctgcggcgggcctcctgcaagtcgacacatgacctccagtcaccccccaacaaacgggagaagaactgcacccatggggtccaggcacggcctgagcagcgccacagctgccacctggtatgtgacagctctgatgggctgctgctcggcggctgggagcgctacaccgaggtggccaagcgcgggggccagcacaccctgcctgcactgtcccgtgccactgcccccaccgaccccaactacatcatcctggccccgctgaatcctgggagccagctgctccggcctgtgtaccaggaggataccatccccgaagaatcagggagtcccagtaaagggaagtcctacacaggcctggggaagaagtcccggctgatgaagacagtgcagaccatgaagggccacgggaactaccaaaactgcccggttgtgaggccgcatgccacgcactcaagctatggcacctacgtcaccctggcccccaaagtcctggtgttccctgtctttgttcagcctctagatctctgtaatcctgcccggaccctcctgctgtcagaggagctgctgctgtatgaagggaggaacaaggctgccgaggtgacactgtttgcctattcggacctgctgctcttcaccaaggaggacgagcctggccgctgcgacgtcctgaggaaccccctctacctccagagtgtgaagctgcaggaaggttcttcagaagacctgaaattctgcgtgctctatctagcagagaaggcagagtgcttattcactttggaagcgcactcgcaggagcagaagaagagagtgtgctggtgcctgtcggagaacatcgccaagcagcaacagctggcagcatcacccccggacagcaagaaactccaccctttcggctctctccagcaggagatggggccggtcaactcaaccaatgccacccaggatagaagctttacctcaccaggacagactctgattggctgagcaaacccaagggcgggactctgcttctggcaacttaaccctttcttgggcatcccctaccacacagtaacctcacctcaactggacctgaaacagaggaccaagatggtgggtctagggtcatctgaagggagtggtcccaagggtgcatgtggatgtcaacagaaggaccacaatggtgtgagaggccttgtgggcatgcagagactggcagcagaaagtcccaagaggagaggactcagaggcttcttccttccaaggaggaggaggaggaggacattccacatctgggcttccagtggtggctcccggacctgccttgggggcagcaggagaggttgggagaggtcaccctgatgaagaacaatgccatgatctgctgctgccagaggacatctccgcccatccactcattttccacctgtacacattggctcattcattcgatggatatttcgggtgcatctactttatgccaggctctatgctaggagctggggatactgtggagaaaaagtcggatatggtctcgctctcatcaagatttcagtctagctgggagtgagcgttaaataagtcaataccaacacacacacgtgcacacacgtgatggcaagctgtgatcatctatgaaagaaaaaacacagatttctttaagaggg

SEQ ID NO: 195108 - DNA, 1809 bp, Artificial Sequence
  derived and/or modified sequence
atggagagaagcctgcacagagtgagcctgggcagcagaagagcccaccccgacctgagcttctacctgaccaccttcggccagctgagactgagcatcgacgcccaggacagagtgctgctgctgcacatcatcgagggcaagggcctgatcagcaagcagcccggcacctgcgacccctacgtgaagatcagcctgatccccgaggacagcagactgagacaccagaagacccagaccgtgcccgactgcagagaccccgccttccacgagcacttcttcttccccgtgcaggaggaggacgaccagaagagactgctggtgaccgtgtggaacagagccagccagagcagacagagcggcctgatcggctgcatgagcttcggcgtgaagagcctgctgacccccgacaaggagatcagcggctggtactacctgctgggcgagcacctgggcagaaccaagcacctgaaggtggccagaagaagactgagacccctgagagaccccctgctgagaatgcccggcggcggcgacaccgagaacggcaagaagctgaagatcaccatccccagaggcaaggacggcttcggcttcaccatctgctgcgacagccccgtgagagtgcaggccgtggacagcggcggccccgccgagagagccggcctgcagcagctggacaccgtgctgcagctgaacgagagacccgtggagcactggaagtgcgtggagctggcccacgagatcagaagctgccccagcgagatcatcctgctggtgtggagaatggtgccccaggtgaagcccggccccgacggcggcgtgctgagaagagccagctgcaagagcacccacgacctgcagagcccccccaacaagagagagaagaactgcacccacggcgtgcaggccagacccgagcagagacacagctgccacctggtgtgcgacagcagcgacggcctgctgctgggcggctgggagagatacaccgaggtggccaagagaggcggccagcacaccctgcccgccctgagcagagccaccgcccccaccgaccccaactacatcatcctggcccccctgaaccccggcagccagctgctgagacccgtgtaccaggaggacaccatccccgaggagagcggcagccccagcaagggcaagagctacaccggcctgggcaagaagagcagactgatgaagaccgtgcagaccatgaagggccacggcaactaccagaactgccccgtggtgagaccccacgccacccacagcagctacggcacctacgtgaccctggcccccaaggtgctggtgttccccgtgttcgtgcagcccctggacctgtgcaaccccgccagaaccctgctgctgagcgaggagctgctgctgtacgagggcagaaacaaggccgccgaggtgaccctgttcgcctacagcgacctgctgctgttcaccaaggaggacgagcccggcagatgcgacgtgctgagaaaccccctgtacctgcagagcgtgaagctgcaggagggcagcagcgaggacctgaagttctgcgtgctgtacctggccgagaaggccgagtgcctgttcaccctggaggcccacagccaggagcagaagaagagagtgtgctggtgcctgagcgagaacatcgccaagcagcagcagctggccgccagcccccccgacagcaagaagctgcaccccttcggcagcctgcagcaggagatgggccccgtgaacagcaccaacgccacccaggacagaagcttcaccagccccggccagaccctgatcggctag

SEQ ID NO: 195109 - protein, 526 aa, Artificial Sequence
  derived and/or modified sequence
MVNEGPNQEESDDTPVPESALQADPSVSVHPSVSVHPSVSINPSVSVHPSSSAHPSALAQPSGLAHPSSSGPEDLSVIKVSRRRWAVVLVFSCYSMCNSFQWIQYGSINNIFMHFYGVSAFAIDWLSMCYMLTYIPLLLPVAWLLEKFGLRTIALTGSALNCLGAWVKLGSLKPHLFPVTVVGQLICSVAQVFILGMPSRIASVWFGANEVSTACSVAVFGNQLGIAIGFLVPPVLVPNIEDRDELAYHISIMFYIIGGVATLLLILVIIVFKEKPKYPPSRAQSLSYALTSPDASYLGSIARLFKNLNFVLLVITYGLNAGAFYALSTLLNRMVIWHYPGEEVNAGRIGLTIVIAGMLGAVISGIWLDRSKTYKETTLVVYIMTLVGMVVYTFTLNLGHLWVVFITAGTMGFFMTGYLPLGFEFAVELTYPESEGISSGLLNISAQVFGIIFTISQGQIIDNYGTKPGNIFLCVFLTLGAALTAFIKADLRRQKANKETLENKLQEEEEESNTSKVPTAVSEDHL

SEQ ID NO: 195110 - DNA, 1581 bp, Artificial Sequence
  derived and/or modified sequence
atggtgaacgagggccccaaccaggaggagagcgacgacacccccgtgcccgagagcgccctgcaggccgaccccagcgtgagcgtgcaccccagcgtgagcgtgcaccccagcgtgagcatcaaccccagcgtgagcgtgcaccccagcagcagcgcccaccccagcgccctggcccagcccagcggcctggcccaccccagcagcagcggccccgaggacctgagcgtgatcaaggtgagcagaagaagatgggccgtggtgctggtgttcagctgctacagcatgtgcaacagcttccagtggatccagtacggcagcatcaacaacatcttcatgcacttctacggcgtgagcgccttcgccatcgactggctgagcatgtgctacatgctgacctacatccccctgctgctgcccgtggcctggctgctggagaagttcggcctgagaaccatcgccctgaccggcagcgccctgaactgcctgggcgcctgggtgaagctgggcagcctgaagccccacctgttccccgtgaccgtggtgggccagctgatctgcagcgtggcccaggtgttcatcctgggcatgcccagcagaatcgccagcgtgtggttcggcgccaacgaggtgagcaccgcctgcagcgtggccgtgttcggcaaccagctgggcatcgccatcggcttcctggtgccccccgtgctggtgcccaacatcgaggacagagacgagctggcctaccacatcagcatcatgttctacatcatcggcggcgtggccaccctgctgctgatcctggtgatcatcgtgttcaaggagaagcccaagtacccccccagcagagcccagagcctgagctacgccctgaccagccccgacgccagctacctgggcagcatcgccagactgttcaagaacctgaacttcgtgctgctggtgatcacctacggcctgaacgccggcgccttctacgccctgagcaccctgctgaacagaatggtgatctggcactaccccggcgaggaggtgaacgccggcagaatcggcctgaccatcgtgatcgccggcatgctgggcgccgtgatcagcggcatctggctggacagaagcaagacctacaaggagaccaccctggtggtgtacatcatgaccctggtgggcatggtggtgtacaccttcaccctgaacctgggccacctgtgggtggtgttcatcaccgccggcaccatgggcttcttcatgaccggctacctgcccctgggcttcgagttcgccgtggagctgacctaccccgagagcgagggcatcagcagcggcctgctgaacatcagcgcccaggtgttcggcatcatcttcaccatcagccagggccagatcatcgacaactacggcaccaagcccggcaacatcttcctgtgcgtgttcctgaccctgggcgccgccctgaccgccttcatcaaggccgacctgagaagacagaaggccaacaaggagaccctggagaacaagctgcaggaggaggaggaggagagcaacaccagcaaggtgcccaccgccgtgagcgaggaccacctgtag

SEQ ID NO: 195111 - DNA, 3629 bp, Artificial Sequence
  derived and/or modified sequence
gggagaggactctgcgggcgaagtggctgcgcaaggagagaacttttcctgcacaaggaacgcctcgtggggagacccaaggcaggagcggtccggagccggctgcggcgtgtgcggccggccttgggacagcgatcgccgcgggtggcaacagagagccccaagcaaaagtgggagcaggagcttggaggtgagcacaggaagccccacttgaggcttttacgcagcctctagtctctgtttcttctggaataggcaagtgtcctttcaactctaagagaccagcagaggccactgtcccttaagactgccggagtcctcaccacttctccaggattccagaggagactgtggcgatggtgaatgaaggtcccaaccaggaagagagcgatgacacccctgtgccggagtccgcactccaagcggaccccagcgtctcggtccatcccagcgtctcggtccatcccagcgtctccatcaaccccagcgtctctgtccaccccagcagttcggcccaccccagtgccttagcccaacccagtggcttggctcaccccagtagctcgggccctgaggacctcagcgtgatcaaggtgagcaggcgccgttgggccgtggtcctggtgtttagctgctactccatgtgcaactcctttcagtggatccagtacggctccatcaataacatcttcatgcacttctacggtgtcagtgcctttgccattgactggctgtccatgtgctacatgctgacttacatccctctgctcctgccagtggcttggctgctggagaagttcggcctgcgcaccattgctctcactggctcggctctcaactgcctgggggcctgggtgaagctgggcagcctgaagccgcatctctttccggtcaccgtggtgggccagctcatctgctctgtggcccaggttttcatcctgggcatgccctcccgcatcgcttccgtctggttcggggctaatgaggtttcaacagcctgctccgtggctgtctttggcaatcagcttggaattgcgattgggttcttggtccctcctgttttggtacccaacattgaagaccgggacgagcttgcctaccacatcagcatcatgttctatataataggaggtgtggccactctcctcctcatccttgtcatcattgtgttcaaggagaaacctaaatatccccccagcagggcccaatccctgagctatgccttgacctctcctgatgcctcatacttaggttccatcgcccggctcttcaaaaatctcaactttgtgctgcttgtcatcacctatggtctgaatgctggtgctttttatgccttgtccactcttctgaatcgcatggtgatctggcactacccgggggaagaagtgaatgctggaagaattggcctgacgatcgtcattgcaggaatgcttggggctgtgatctcaggaatctggctggataggtccaaaacctacaaagagacaaccctggtagtctatatcatgacactggtgggcatggtggtgtacacgtttaccttgaacctgggacacctgtgggtagtgttcatcactgctggcacaatgggcttctttatgactggctatctcccactgggatttgagtttgctgtggagctcacgtacccagaatcagaaggcatctcctccggcctcctcaacatatctgcacaggtatttgggatcatctttaccatctcccagggccagattattgacaactatggaaccaagcctgggaacatcttcctgtgtgtgttccttactcttggagcagccctcactgcattcattaaggcagatctccggagacagaaagcaaacaaagaaactcttgagaacaaactccaagaggaggaggaggagagcaacaccagcaaagtgcccactgctgtgtcagaggatcatctctgagaggaaggtggtgacaactcagggaacacgaacaccccaccttttccttcagcacagctctcaccgccagcacaaagggcttcgctagagatgtttttggagggaatcagtgggactatttgtggcatggatggcctattcctcctagaacccacgtaagagcttggatgatttagttggagaaaattgcacctatcaccaaatgcaaatttgattcccacctccacccccttttaggttatgggagttggtgttgggacagggtggcagagaatattggagtcaatcctagcttggtctcttgccttccctcttttcctccatccatcgtggacaatgcctgcaaaattttcacaggaagaaagcctattcaggatattaacttgaaatttccagtgtcctaagagcctctcatgaagcccagttctaataagtggcaagctgctctgccggggtcatctcctgggtcatcggactgattgctcaagttctgcaggagaggaagcaccattagaacaactccatcagaacagctccaccgggacttgtgggcctaaattttcctggcctaacgggtctgtctccaaaccctctttcctaagagctgagcaaaccaaccataataaacttgacaaaagactttgttgtggccatgacagagataccgactcaggagggctacctacctaggtgtgatcatgctgggggctaccttctgagtatatttgtgaaagcacatatttgggaactctggtagcttgagttgggaatgggaaggttcttttttacagaagtacttccccagggacttctgtgtgtcacagtcacctctgatgcctttatcttgatgttgcattgggaatctcagccatcagcccaagtgcttgttttattccaaggcagggtaatccccgtcaacttactctaacctttgctgaaaactaatcttgattcattctactctgaaaatccaaaggtgcttctgagagataagagggaaggggtagaaggaaaggtgccccttgaaatgggaattgagcctgttagaattaaaagcttatctcacctctgctggggacagtatttgcaccaccaacccctctcctcacctgctttgagcgataatctttatcagatattctaaacttaaagggattccctttaaaccaactcaagctgatctttcctatctagcctgctgtttggctgtactcatgggctttggtaatatctcctaaaaatgaggttttggtaatttttcctatgcattgggcaactgtgatcgtgaccactgtgctgtcttgctccagccactgccctggcctcagcatatcagggcagcctgtgctggctgcaatactgtggtgcttgggccactgcctgagaggagccaggtttgtgtgtgtctgcatgtgtgtgtgtgtgtgtttgtacagattcaagcaatggatgcaaggaacatgctgtatgtaatagaagaaagaagtccacgttttcggcagaagtagtgagtcagtgtggaagagaggtgagggtgtgctttactttttgataaagagaaagatgtttactcataaacccttcaaaaggtattaacaaaatgtttaccaaacctattgctttattttaaaaacataatttgtgttttctatttgtaagatctgacatttcgaggcaataaaaacttctcag

SEQ ID NO: 195112 - DNA, 1581 bp, Artificial Sequence
  derived and/or modified sequence
atggttaatgaggggccaaaccaggaagagtccgacgatacccctgttccggagtccgctctacaggcagacccgagtgtgagcgtccacccaagcgtgagcgtccaccctagtgtgtccatcaatccttcagtgtccgtgcatcctagttcgtccgcccacccctctgcccttgcccaaccatctggactggcccacccgtcgagctcgggaccagaggacctcagtgtgattaaggtgagccgcaggcgctgggccgtggttctcgtgttctcctgttactcgatgtgtaattccttccagtggatacagtatggcagtatcaataacatcttcatgcacttttacggcgtaagcgcatttgcgatcgattggttatccatgtgctatatgctgacatatatcccattgcttttacccgttgcttggctgttagagaaatttggactgcgcacaatcgcccttaccgggtctgcccttaattgtcttggcgcctgggtgaagttaggatccctaaaaccccatctgtttcctgtaactgtagtgggacagctcatttgcagtgtcgctcaggtcttcatcctaggtatgccatcccggattgcatccgtgtggttcggcgcaaatgaggtgagtaccgcatgttctgttgccgtattcggtaaccagctcggcatagccatcggctttctggtgcccccagtcctagtccccaacattgaggacagggacgagttggcgtatcacatctcaataatgttctatattatcggcggagtcgctactctgctgctgattctcgtgatcatcgtgtttaaagagaagcccaagtatcccccttccagagcccagtcattatcatacgccctcactagtccagacgctagctacctgggaagtatcgctaggttgtttaagaatctcaacttcgtcttgctcgtgataacgtatggactgaacgccggtgccttctacgctttgagcacactactgaatcggatggttatctggcactacccaggcgaggaggttaatgccgggcgaattggcctgacgatcgtcattgccggcatgctgggcgccgttatctctggcatttggctggataggagtaaaacctacaaggagacaactctcgtggtatatatcatgaccctggtggggatggttgtctacactttcacactcaacctgggacacctgtgggtcgttttcatcaccgccggcaccatgggtttcttcatgacgggctacctccccctggggttcgagtttgcagtggagctaacctaccccgaaagtgaaggaattagttccggcctactgaacataagtgctcaggtctttggtattatttttacaatttcacaaggacagattatagacaattatgggaccaagccggggaacatttttctttgcgtgttcctcaccctcggggctgccctgaccgccttcatcaaagcggacctcagacggcagaaagccaataaggagacattggaaaacaaactccaggaggaggaagaagaaagcaacacctctaaggttcccaccgctgtgagcgaagaccacctctag

SEQ ID NO: 195113 - DNA, 1581 bp, Artificial Sequence
  derived and/or modified sequence
atggtgaatgaaggccccaaccaggaggagagtgatgacacccctgtgcctgagagcgccctgcaggccgaccccagcgtgtctgtgcaccccagcgtgtctgtgcaccccagcgtgtccatcaaccccagcgtgtctgtgcaccccagcagcagcgcccaccccagcgccctggcccagcccagcggcctggcccaccccagcagcagcggccctgaggacctgagcgtcatcaaggtgtccagaagacgctgggccgtggtgctggtgttcagctgctacagcatgtgcaacagcttccagtggatccagtatggcagcatcaacaacatcttcatgcacttctacggcgtgtctgcctttgccatcgactggctgtccatgtgctacatgctgacctacatccccctgctgctgcctgtggcctggctgctggagaagtttggcctgcggaccatcgccctgaccggcagcgccctgaactgcctgggcgcctgggtgaagctgggcagcctgaagccccacctgtttcctgtgacagtggtgggccagctgatctgcagcgtggcccaggtgttcatcctgggcatgcccagcagaattgcctctgtgtggtttggagccaatgaggtgtccacagcctgcagcgtggccgtgtttggaaaccagctgggcatcgccatcggcttcctggtgccccctgtgctggtgcccaacattgaagatagagatgagctggcctaccacatcagcatcatgttctacatcattggaggagtggccaccctgctgctgatcctggtgatcatcgtgttcaaggagaagcccaagtacccacccagccgggcccagagcctgtcctatgccctgaccagcccagatgccagctacctgggcagcatcgcccggctcttcaagaacctgaactttgtgctgctggtgatcacctacggcctgaatgctggggccttctacgccctgagcaccctgctgaacaggatggtgatctggcactacccaggagaggaggtgaatgccggcagaattggcctgaccatcgtgattgctggcatgctgggcgctgtgatcagcggcatctggctggacaggagcaagacctacaaggagaccaccctggtggtgtacatcatgaccctggtgggcatggtggtgtacaccttcaccctgaacctgggccacctgtgggtggtgttcatcacagctggcaccatgggcttcttcatgacaggctacctgcccctgggctttgaatttgctgtggagctgacctacccagagagcgagggcatcagcagcggcctgctgaacatcagcgcccaggtgtttggcatcatcttcaccatcagccagggccagatcatcgacaactacggcaccaagccaggcaacatcttcctgtgtgtgttcctgaccctgggcgccgccctgacagccttcatcaaggctgacctgcggcggcagaaggccaacaaggagaccctggagaacaagctgcaggaggaggaggaggagagcaacaccagcaaggtgcccacagctgtgtctgaggaccacctgtag

SEQ ID NO: 195114 - DNA, 1581 bp, Artificial Sequence
  derived and/or modified sequence
atggtgaacgagggccccaaccaggaggagagcgacgacacccccgtgcctgagtcagcgctgcaagccgacccctccgttagcgtccatccgagcgtttctgtccacccctcagtctctatcaacccctctgtctccgtccacccttctagcagcgcacacccgtccgcattagcacagccctcggggctggctcacccgtcaagtagtggaccagaggacctaagcgtgatcaaggtgtcaagacgccgctgggctgtcgtgttggtcttcagctgctatagcatgtgtaacagcttccagtggattcagtatggatctattaacaatatattcatgcacttttatggggttagtgccttcgccattgattggttgtcgatgtgctacatgctgacctatataccgctgctactgccagtggcctggctgctggaaaagttcggcctcagaacgattgctctgactgggagcgctctgaattgcctcggagcctgggtcaaattgggtagtctaaaaccacacttgttcccagtcactgtagtaggccaactgatctgtagcgtggctcaggtgttcatcctggggatgccttcacggattgcaagcgtttggttcggcgcgaacgaggtgagtaccgcatgttctgtggcagtgttcggaaaccagctaggaatcgcgatcggctttctggttcccccggtgcttgtcccaaacatagaggatagagacgagctggcgtatcatatctcaattatgttttacattatcggaggagtggcaactttgctgctgatcctagttattattgtctttaaggaaaaacccaagtaccctccaagcagagcgcagtccctgtcctatgctctcacttcccctgatgctagttatcttggctcaattgcccgcctgttcaagaatcttaattttgtactgttggtgatcacctacggactgaacgctggagcgttctacgcactgtcgaccttactgaatcgtatggttatttggcactaccctggggaagaggtgaacgccgggcgaatcggcttgacaattgtgattgccggaatgttgggcgctgtgatctctggcatctggctggatcggtcaaagacctacaaggaaaccacccttgtcgtgtatataatgaccctggtcggtatggtggtgtatacctttactctcaatctgggacatctgtgggtggtttttattactgctggcacaatgggcttcttcatgaccggatacctgccattgggtttcgaattcgctgttgagcttacctaccccgagagcgagggcatctcgtctggattgctgaacatctcggcccaggtgttcggcattatattcactatctctcaggggcagataatcgacaattacgggaccaaacctggcaacatattcctgtgcgtgttcctgacattgggtgccgcacttacagccttcatcaaagctgatcttaggagacagaaggccaacaaagagactctcgagaataagctccaggaggaggaggaggagagcaatacgtccaaagtcccaacagccgtgtcagaagaccatctttag

SEQ ID NO: 195115 - DNA, 1581 bp, Artificial Sequence
  derived and/or modified sequence
atggtcaacgaagggcctaaccaagaagagagtgacgacactccggtgccagagtcagccctgcaggccgacccctctgtaagtgtccatcctagcgtgagtgtgcacccatctgtttctatcaacccaagcgtgtccgttcacccttcaagttctgcacacccatcagcattagctcagccgtctggactggcccatccgtccagctcgggcccagaagacttgtccgtcatcaaggtgagtaggcggaggtgggcagtggtgctggttttcagctgttattcgatgtgcaattcgttccaatggatccagtatggcagcatcaacaatatcttcatgcacttctatggcgtgtccgcatttgccattgattggctttccatgtgttatatgcttacttacatcccccttttgttgcctgttgcatggttgctggagaaatttggtttgcggaccattgctctcacaggaagcgctctgaactgtcttggtgcttgggttaagctgggttccctgaagccccatcttttcccagtcaccgtggttgggcagttgatttgctcagtggcacaggtcttcatcttaggaatgccttctaggatcgcctcggtgtggtttggcgcaaacgaggtctctaccgcttgttccgttgcagtgtttggcaatcagctcggaatcgcaatcggatttctggttccacccgtactggtccccaatattgaggaccgagacgaactcgcttaccatatttcaatcatgttctacattattggcggagtggccacacttctcctgattttggtcataatcgtgttcaaagagaaacccaaatatccccctagccgggctcaatcactgtcctacgctcttaccagccccgacgcgtcatacttagggtcaatagccaggctgttcaaaaatttaaactttgtgttgttagtcattacctacggcctcaatgccggagcattttacgcgctttccacactgctcaaccgcatggttatttggcactaccctggggaagaagtcaatgccggacggatcggattgaccatcgtgatcgctggaatgttgggagccgtcatctcaggaatctggctggatagatcgaagacctacaaggagaccacactggttgtgtacatcatgactttggttgggatggtcgtgtacacctttactcttaatctcgggcacctgtgggttgtgttcatcactgctggcacaatggggtttttcatgacaggttatctccccctgggattcgaattcgcagttgagctgacatatcccgagagcgaaggcatctcgtcgggcctgctgaatatatccgcccaggtgttcgggattatctttactatctcacaaggacaaatcattgataactacgggacgaaaccagggaacatatttctctgcgtttttcttactctcggggcagccctaacagccttcatcaaagccgatctgagaagacagaaggcaaacaaagaaactttggagaataagctgcaagaggaggaagaggagagcaatacctccaaagtgccaacagcggtaagcgaggaccacctctag

SEQ ID NO: 195116 - protein, 199 aa, Artificial Sequence
  derived and/or modified sequence
MENFRKVRSEEAPAGCGAEGGGPGSGPFADLAPGAVHMRVKEGSKIRNLMAFATASMAQPATRAIVFSGCGRATTKTVTCAEILKRRLAGLHQVTRLRYRSVREVWQSLPPGPTQGQTPGEPAASLSVLKNVPGLAILLSKDALDPRQPGYQPPNPHPGPSSPPAAPASKRSLGEPAAGEGSAKRSQPEPGVADEDQTA

SEQ ID NO: 195117 - DNA, 600 bp, Artificial Sequence
  derived and/or modified sequence
atggagaattttcgaaaggtgcggtccgaggaagctcccgccggatgtggcgccgaagggggcggtccaggcagtggaccgtttgccgatctcgcaccaggggccgtccatatgagagtgaaggagggatctaaaatcaggaacctcatggcatttgctacagcctctatggcacagcctgccactcgagcaattgtattcagtgggtgtggccgcgctactactaaaaccgtcacttgcgctgagatcctgaagcgtcgtctcgcaggattgcaccaggtgaccaggctgaggtaccgttccgtcagggaagtctggcagagcctacctcctgggccaacgcagggccagactcccggggaacccgccgccagtttgtcagtgctgaaaaacgtgcccggcctcgcgatactgctgtctaaagacgctctggatccccgacagcctggctaccagccccctaaccctcaccccggaccgtcaagccctcccgctgcgcccgccagcaaaagatcacttggggaacctgcggcaggcgaggggagtgctaagaggtcccagcccgaaccaggagtggccgatgaagatcagaccgcttag

SEQ ID NO: 195118 - DNA, 600 bp, Artificial Sequence
  derived and/or modified sequence
atggagaactttcggaaggtgaggtccgaggaagcacctgcaggatgcggcgctgaaggaggaggtcctgggtccggtccattcgctgacttagctccgggcgccgttcatatgagggttaaggaggggtccaagataagaaacctgatggcttttgctaccgcgagcatggcccagcctgctacgagagccatagttttctcggggtgcggacgggcgactaccaaaaccgtgacttgcgcagagattctcaagcggcggctggcaggcttacatcaggttacccgactgcgttaccggtcggtgagagaagtctggcaatctttacctcctgggccgacccaggggcaaacgccgggcgagcccgccgcttcactatctgtgctcaagaacgtgccaggtctggccatcctgctttccaaggacgccctggacccaagacagccaggctatcagccgccaaatccacatcccggtcccagctcccctcctgcagcccctgcgtctaaacgaagtctcggcgaaccagctgctggtgaggggtctgcaaaacgatcacagccggaaccgggcgtggctgatgaggaccagactgcttag

SEQ ID NO: 195119 - DNA, 600 bp, Artificial Sequence
  derived and/or modified sequence
atggagaacttcaggaaggtgcgctctgaggaggccccagctggctgtggggctgagggcggcggccctggcagcggcccctttgctgacctggcccctggagctgtgcacatgagggtgaaggagggcagcaagatccggaacctgatggcctttgccacagcctccatggcccagcctgccacccgggccatcgtgttcagcggctgcggccgggccaccaccaagacagtgacctgtgccgagatcctgaagaggcggctggccggcctgcaccaggtgacccggctgcgctacagatctgtgcgggaggtgtggcagagcctgcccccaggccccacccagggccagaccccaggagagcctgctgccagcctgtctgtgctgaagaatgtgcccggcctggccatcctgctgagcaaggatgccctggacccccggcagcccggctaccagccccccaacccccaccctggccccagcagccccccagctgccccagccagcaagaggagcctgggggagcctgctgctggggagggcagcgccaagaggagccagcctgagcccggggtggctgatgaggaccagacagcctag

SEQ ID NO: 195120 - DNA, 3049 bp, Artificial Sequence
  derived and/or modified sequence
cttttcagaagaggtcacgcccgcttccccacgcgcctcggggaacagcctggcccaaagcctcactcctcacgtcccaggggtggacgggggtccgggagcctcgagctccgggcaggcgtggcgaggctgaagtctgggtcttccgcgccccgcgaggaccacgccgcgacgtaatcgcccgcggggaggcgcggagtggagccgcagccagctcctcccgcactctgctgaccgcgcactagctgtccttgaggcaagaatacttgggagcggaaaaaaggtgggggtgttccccggggcgggggaggaggggcaaggccccagcaagcctcttggaaatctctccctgggaggggacgaggggcggccttcagttgcaaatgggaagggctcggataccggatttgaagcagtgtttgcacggcaagcgcagcttttatttagactgccggtttgtgagggttggctctcagagcgctgatggcgattatagtggaacttcaccttcacctgctcatgcgccccgcagcgcgcccgctcccacgcccgcgtagctgaggacccagactcgccaggaaaggctagtgaggctggggcccgggcgggcccggccgggccgggtcaggggaggggcctggcggcaggggcggggcctcagctaaaggcgcggagcacccggcgccgagagcgctgagtagagcggcgcccgctcgagagaagtggggccgagatcgcgccgtcccagcccgcccgccggcgtctgcgctgctccggcgcccttacccctgctggcccttgcaaggcgcgaccggcggccatgcagccccggggctgaggccgccccatggcaaagccggcggtcccggcgacgacggcgcatggagaacttccgtaaggtgcgctccgaagaggcgccagcggggtgcggggccgagggaggcggcccgggctccggccccttcgcagacctggcgccgggcgcggtgcacatgcgggtcaaggaaggcagcaagatccggaacctgatggccttcgccaccgccagcatggcgcagccagccacgcgcgccatcgtcttcagcggctgcggccgggccaccaccaaaaccgtcacgtgcgccgagatcctcaagcgccgcctggcgggcctgcaccaggtcacgcggctgcgctaccggagcgtacgcgaggtgtggcagagcctcccgcctgggcccacgcagggtcagacgcctggcgagccggccgctagtctcagcgtacttaagaacgtgcccggcctcgccatcctactttccaaggacgcgctggatccgcgacagcccggctaccagcccccgaatccccatcctggtccctcgtccccgccagccgcgccagcgtccaagaggagcctaggggaacccgcagctggagaaggctccgcgaagcgatcgcaacccgagccaggggttgcggacgaggatcagacggcctgaaactccggactgtgggccacctagtccggcaggatcttccgccagcgcctccaccttcagatgtacctccagcctttcactcctcggtcctccggagcccacaacctggacacagctcctcaagacaggtagcatggaccttaaggcgacaagagaggggccccaggagtggcaggagaggatccccgaccaccctagggaaacttcgtgcgataattgctgcttatgcccgtgttgcgtgaagacacggaacttcaccttttctgggaccttctttgggggagaatggtggacagtgggattctggaaacttgtttgggacccccaagggttaaagccacccagcattcacgaagagcacctgaagtatggaagctgagaagagttattggaatcacccccaccgttgacagaggaaggcagggggtgagaattaactgcttgagggtaggagagtctgagatgtgggggccctattccgctccccgccctgggacagttttcctttctagttttctttcccctgcttcagaggagcatctctgagggttctagctcttttaacaccccttttccccctgctggcccagagggagacccaggactgaactctccaggcctcctcccctgagccctgcagctggctggagtcttgcttccaataaaacaagcacaaaaatggctgtgtcccccattttttttctaaccacccgcctgtgcagagacagctctcgcctggccccttgtgtctcccctcccctccagccttgcgtcctgagtctttggagtcttcagggtcaggcacagagactgaacagcttcaaaatggtgcaaggcactgcccagtccctggcttcttcctctctcctcccccactccgccctcccgggctggccctggcctcagaggctgttgcaaatgggggcccgtgtacccctgtacatcgccactaagggaaagggagcggcacattgtttttctgggaggggaaggaaggagtggaaggacagcatcgatgaactctcctggaggtcactgcaaagggtggcagaccctgctgaggtccctgaatctgcagcctccagacaataaactgaaccttacccagaaggctggcacaaagcccccagctctgtgggtaggatctccccttcactgccctctctctgagaaaggacagcacacccttgggaaagggggaggagagagactgagcacaaatccactgctggaaattactattcagcagagaagctgggtcttgggctgtgaatcactgcaggcctcctgataagctgctgcctccagccctgcacagctgtctgttgagagataacagcctcataagcttctctgcccaactccaagccagctggggggtgggggtgctgctgtgtgctggaagagctctggtgagttgggggtggcatacagccccaggatctcagaagcagatctcatcccatgcaactcagcagcacccctggaaagggggagatgcggaagaatgtatttataagtcattttgctggcagaaccctgaaataaatcctgctggtgacaagaga

SEQ ID NO: 195121 - DNA, 1184 bp, Artificial Sequence
  derived and/or modified sequence
caaagccggcggtcccggcgacgacggcgcatggagaacttccgtaaggtgcgctccgaagaggcgccagcggggtgcggggccgagggaggcggcccgggctccggccccttcgcagacctggcgccgggcgcggtgcacatgcgggtcaaggaaggcagcaagatccggaacctgatggccttcgccaccgccagcatggcgcagccagccacgcgcgccatcgtcttcagcggctgcggccgggccaccaccaaaaccgtcacgtgcgccgagatcctcaagcgccgcctggcgggcctgcaccaggtcacgcggctgcgctaccggagcgtacgcgaggtgtggcagagcctcccgcctgggcccacgcagggtcagacgcctggcgagccggccgctagtctcagcgtacttaagaacgtgcccggcctcgccatcctactttccaaggacgcgctggatccgcgacagcccggctaccagcccccgaatccccatcctggtccctcgtccccgccagccgcgccagcgtccaagaggagcctaggggaacccgcagctggagaaggctccgcgaagcgatcgcaacccgagccaggggttgcggacgaggatcagacggcctgaaactccggactgtgggccacctagtccggcaggatcttccgccagcgcctccaccttcagatgtacctccagcctttcactcctcggtcctccggagcccacaacctggacacagctcctcaagacaggtagcatggaccttaaggcgacaagagaggggccccaggagtggcaggagaggatccccgaccaccctagggaaacttcgtgcgataattgctgcttatgcccgtgttgcgtgaagacacggaacttcaccttttctgggaccttctttgggggagaatggtggacagtgggattctggaaacttgtttgggacccccaagggttaaagccacccagcattcacgaagagcacctgaagtatggaagttttcctttctagttttctttcccctgcttcagaggagcatctctgagggttctagctcttttaacaccccttttccccctgctggcccagagggagacccaggactgaactctccaggcctcctcccctgagccctgcagctggctggagtcttgcttccaataaaacaagcacaaaa

SEQ ID NO: 195122 - DNA, 600 bp, Artificial Sequence
  derived and/or modified sequence
atggagaacttccggaaggtgcggagcgaggaggcccccgccggctgcggtgcggaggggggcgggcctggcagtggccccttcgccgacttggccccaggggctgtgcatatgagggtaaaggaaggatctaaaattcggaatctgatggcctttgcgacggccagcatggcccagcctgcaaccagggcaatcgtattttccgggtgcggcagggctacaacaaaaaccgtcacatgtgcagaaatcttgaagaggagattggccggactccaccaagtaacacgcctgaggtaccgatctgtgagagaggtctggcaaagccttcccccaggacccactcagggccagaccccaggtgaacccgcagcctctctttcagtcttgaaaaatgttccaggtctggccatcctccttagcaaggatgcgctcgatccccgacaacccggctaccagcctccaaacccacatccaggcccctcatcaccgccagctgcaccagcttctaaaaggtcgctgggagagccagcggctggcgaggggtcagctaaacgaagccagccggagcccggcgtggccgatgaggaccagaccgcatag

SEQ ID NO: 195123 - DNA, 600 bp, Artificial Sequence
  derived and/or modified sequence
atggagaacttccggaaggtgcggagcgaggaggcccccgccggctgcggcgccgagggaggtggacctggctcagggccttttgccgacctggcgcccggtgctgtacacatgcgggtaaaggaaggatccaagataaggaatctgatggctttcgcaaccgcgtctatggcccagccggccaccagagccatagtgttcagtggctgcggtcgtgccaccaccaagacggtaacttgcgcagagatcctgaaaagacggctcgccggcctgcaccaagttacaaggctgagatatcgaagtgtccgcgaggtgtggcagtcactgccccctggcccaacccagggtcagacccctggggagccggcagcgtcattgtctgtcctgaaaaacgtgcccggcctagccattctgctttctaaagacgctcttgaccctcggcagccggggtatcaaccacccaacccgcaccccggcccgtctagccccccagcagccccagcctctaagcgtagcctgggtgagcccgcagcaggcgagggttccgccaagagaagtcagcccgaacccggggtggctgatgaggaccagactgcctag

SEQ ID NO: 195124 - DNA, 600 bp, Artificial Sequence
  derived and/or modified sequence
atggagaacttccggaaagtgaggtccgaggaagccccagctggatgtggcgctgaaggcggtggaccaggttctggcccatttgccgatttggctcccggagcagtacatatgagagttaaagagggtagcaagatccgtaacctcatggccttcgcgaccgcttcaatggctcagccggcaacacgggcaattgttttttctgggtgtgggagggcaaccacaaaaaccgtaacgtgtgcggaaattctgaagcgcaggctggctgggctccaccaggtgacacgtctaagatataggtctgtaagagaagtgtggcagagcttgcccccaggtccgacccaaggacagacacccggtgaacccgctgctagtttgtcagtgctaaaaaacgttcctggcctcgcaatcttgctgagcaaagacgccttggatccacgtcagccaggctatcagccacctaatcctcatcctggcccatcaagtccgcctgccgcaccagcttcaaagagatcgctcggcgaacctgccgcaggtgagggatccgcgaaaaggagccaacctgaaccgggagtggcagatgaggaccaaactgcctag

SEQ ID NO: 195125 - DNA, 600 bp, Artificial Sequence
  derived and/or modified sequence
atggagaatttcaggaaagtccgctccgaggaagccccagcaggttgtggtgccgaaggcggaggtcccggtagcggcccttttgcggatttggcacccggagctgtgcatatgagggtaaaagaggggagtaaaatccggaatttaatggcctttgccaccgcaagcatggcccagccagccacacgggctatcgtgttcagcggctgtggtcgcgctactactaagactgttacgtgtgctgaaatcctaaagagaagactggctggtctgcatcaggttacccgactcagataccgctccgtgcgggaggtatggcagagcctgccgcctgggcctacccaaggacagacacccggtgaaccagcggcttccctgtctgtgctgaagaatgtccctggactcgctatcctgctaagcaaggatgccttggacccgcgacagccaggataccaacctcccaatcctcaccctggtccaagcagtcccccagctgccccagcgagcaaaaggagcctgggggaacccgcagctggcgaaggtagcgctaaacgctcccagccagaacccggagtggccgacgaggatcaaacggcttag

SEQ ID NO: 195126 - DNA, 600 bp, Artificial Sequence
  derived and/or modified sequence
atggagaacttcagaaaggtgagaagcgaggaggcccccgccggctgcggcgccgagggcggcggccccggcagcggccccttcgccgacctggcccccggcgccgtgcacatgagagtgaaggagggcagcaagatcagaaacctgatggccttcgccaccgccagcatggcccagcccgccaccagagccatcgtgttcagcggctgcggcagagccaccaccaagaccgtgacctgcgccgagatcctgaagagaagactggccggcctgcaccaggtgaccagactgagatacagaagcgtgagagaggtgtggcagagcctgccccccggccccacccagggccagacccccggcgagcccgccgccagcctgagcgtgctgaagaacgtgcccggcctggccatcctgctgagcaaggacgccctggaccccagacagcccggctaccagccccccaacccccaccccggccccagcagcccccccgccgcccccgccagcaagagaagcctgggcgagcccgccgccggcgagggcagcgccaagagaagccagcccgagcccggcgtggccgacgaggaccagaccgcctag

SEQ ID NO: 195127 - protein, 1801 aa, Artificial Sequence
  derived and/or modified sequence
MSDDIRKRFEFPNSLIQSQAVGHLIAAVLKENGFSEKIHQSTNQTPALNLLWEKCCSDNVVVRTACCEGLVALVAQDHAEFSYVLNGILNLIPSTRNTHGLIKAIMHLLQMQALKEGQGGEKNIQSIYTIRNHPHPLITVLEHRPDCWPVFLQQLTAFFQQCPERLEVSCIQIMAPFLWYLYCEPSQLQEYAKLRLALLKVLLQPQVLCDKDQPSILEQQILQLCCDIVPCLQVKDLIQTTEAMMFIEEVCLSLLRHPVFWKIQLTQMSLQLLCVSEVSLKITGECSSSIHLLEHSVELLKEDFPVELVIIGIALLLLQTPASQQKPILNLALKLLSVTEDQKIPKSSLLLVMPILQILSSTALEDCISVDEEGPSRQQLALNLLEMIQQECYRDDHQKLSYKLVCPVTSMYGTIFTAWRILEVMTDSSAASDWLASVESLLPITAVIPAPAFLLLAHLLVEDKGQNLHQILKVTTELAQADSSQVPNLIPVLMFKLGRPLEPILYNDILYTLPKLGVHKVCIGQILRIIQLLGTTPRLRAVTLRLLTSLWEKQDRVYPELQRFMAVSDVPSLSVGKEVQWEKLIAKAASIRDICKQRPYQHGADMLAAISQVLNECTKPDQATPAALVLQGLHALCQAEVVCIRSTWNALSPKLSCDTRPLILKTLSELFSLVPSLTVNTTEYENFKVQVLSFLWTHTQNKDPIVANAAYRSLANFTAGEHTILHLPEKIRPEIPIPEELDDDEDVEDVDLSVPGSCYLKLLSLTPPLVLPALEEFFTSLVKQEMVNMPRGIYHSALKGGARSDQGKTVAGIPNFILKMYETNKQPGLKPGLAGGMLFCYDVSMYQSKDGKPLNRLMASRGRSFKQTSLALVHEVHIQLSEWHRAIFLPQAWLAYMNRAYHAILQGRLGELELQLKHGKEEPEEVQYKKSTAWLWVRDMLTDEITKAAAKESPVVKGNALLALSSLAVVVSRHEASLSSDSDGLLEVQPNFLSMKEWVSMVLDTLLVIVDSHYQPRGQLLSWFYYKSYSGENTASAIARSAAATALSLLVPVFIISCKEKVEEILNMLTARLPGKPSADESQAVQIHMGLALGMFLSRLCEEKLSDISGQEMNLLLMKSLDALENCCFDTSLEYNTGCILGVGLVLSLMSHSSQMQSRVHVAALLRKLSAHVDDSGSQSRTFQEVLAYTLSCVCTSAFSAGIIEATEAEDVMNKLRLLVENSQQTSGFALALGNIVHGLSVCGHGKAEDLGSKLLPAWIRIVLTEGTPTMLCLAALHGMVALVGSEGDVMQLKSEAIQTSHFQGRLNEVIRTLTQVISVSGVIGLQSNAVWLLGHLHLSTLSSSQSRASVPTDYSYLPESSFIGAAIGFFITGGKKGPESVPPSLLKVVMKPIATVGESYQYPPVNWAALLSPLMRLNFGEEIQQLCLEIMVTQAQSSQNAAALLGLWVTPPLIHSLSLNTKRYLLISAPLWIKHISDEQILGFVENLMVAVFKAASPLGSPELCPSALHGLSQAMKLPSPAHHLWSLLSEATGKIFDLLPNKIRRKDLELYISIAKCLLEMTDDDANRIAQVTKSNIEKAAFVKLYLVSQGRFPLVNLTDMLSVAVQHREKEVLAWMILHSLYQARIVSHANTGVLKRMEWLLELMGYIRNVAYQSTSFHNTALDKALDFFLLIFATAVVAWADHTAPLLLGLSASWLPWHQENGPAGPVPSFLGRSPMHRVTLQEVLTLLPNSMALLLQKEPWKEQTQKFIDWLFSIMESPKEALSAQSRDLLKATLLSLRVLPEFKKKAVWTRAYGW

SEQ ID NO: 195128 - DNA, 5406 bp, Artificial Sequence
  derived and/or modified sequence
atgagcgacgacatcagaaagagattcgagttccccaacagcctgatccagagccaggccgtgggccacctgatcgccgccgtgctgaaggagaacggcttcagcgagaagatccaccagagcaccaaccagacccccgccctgaacctgctgtgggagaagtgctgcagcgacaacgtggtggtgagaaccgcctgctgcgagggcctggtggccctggtggcccaggaccacgccgagttcagctacgtgctgaacggcatcctgaacctgatccccagcaccagaaacacccacggcctgatcaaggccatcatgcacctgctgcagatgcaggccctgaaggagggccagggcggcgagaagaacatccagagcatctacaccatcagaaaccacccccaccccctgatcaccgtgctggagcacagacccgactgctggcccgtgttcctgcagcagctgaccgccttcttccagcagtgccccgagagactggaggtgagctgcatccagatcatggcccccttcctgtggtacctgtactgcgagcccagccagctgcaggagtacgccaagctgagactggccctgctgaaggtgctgctgcagccccaggtgctgtgcgacaaggaccagcccagcatcctggagcagcagatcctgcagctgtgctgcgacatcgtgccctgcctgcaggtgaaggacctgatccagaccaccgaggccatgatgttcatcgaggaggtgtgcctgagcctgctgagacaccccgtgttctggaagatccagctgacccagatgagcctgcagctgctgtgcgtgagcgaggtgagcctgaagatcaccggcgagtgcagcagcagcatccacctgctggagcacagcgtggagctgctgaaggaggacttccccgtggagctggtgatcatcggcatcgccctgctgctgctgcagacccccgccagccagcagaagcccatcctgaacctggccctgaagctgctgagcgtgaccgaggaccagaagatccccaagagcagcctgctgctggtgatgcccatcctgcagatcctgagcagcaccgccctggaggactgcatcagcgtggacgaggagggccccagcagacagcagctggccctgaacctgctggagatgatccagcaggagtgctacagagacgaccaccagaagctgagctacaagctggtgtgccccgtgaccagcatgtacggcaccatcttcaccgcctggagaatcctggaggtgatgaccgacagcagcgccgccagcgactggctggccagcgtggagagcctgctgcccatcaccgccgtgatccccgcccccgccttcctgctgctggcccacctgctggtggaggacaagggccagaacctgcaccagatcctgaaggtgaccaccgagctggcccaggccgacagcagccaggtgcccaacctgatccccgtgctgatgttcaagctgggcagacccctggagcccatcctgtacaacgacatcctgtacaccctgcccaagctgggcgtgcacaaggtgtgcatcggccagatcctgagaatcatccagctgctgggcaccacccccagactgagagccgtgaccctgagactgctgaccagcctgtgggagaagcaggacagagtgtaccccgagctgcagagattcatggccgtgagcgacgtgcccagcctgagcgtgggcaaggaggtgcagtgggagaagctgatcgccaaggccgccagcatcagagacatctgcaagcagagaccctaccagcacggcgccgacatgctggccgccatcagccaggtgctgaacgagtgcaccaagcccgaccaggccacccccgccgccctggtgctgcagggcctgcacgccctgtgccaggccgaggtggtgtgcatcagaagcacctggaacgccctgagccccaagctgagctgcgacaccagacccctgatcctgaagaccctgagcgagctgttcagcctggtgcccagcctgaccgtgaacaccaccgagtacgagaacttcaaggtgcaggtgctgagcttcctgtggacccacacccagaacaaggaccccatcgtggccaacgccgcctacagaagcctggccaacttcaccgccggcgagcacaccatcctgcacctgcccgagaagatcagacccgagatccccatccccgaggagctggacgacgacgaggacgtggaggacgtggacctgagcgtgcccggcagctgctacctgaagctgctgagcctgaccccccccctggtgctgcccgccctggaggagttcttcaccagcctggtgaagcaggagatggtgaacatgcccagaggcatctaccacagcgccctgaagggcggcgccagaagcgaccagggcaagaccgtggccggcatccccaacttcatcctgaagatgtacgagaccaacaagcagcccggcctgaagcccggcctggccggcggcatgctgttctgctacgacgtgagcatgtaccagagcaaggacggcaagcccctgaacagactgatggccagcagaggcagaagcttcaagcagaccagcctggccctggtgcacgaggtgcacatccagctgagcgagtggcacagagccatcttcctgccccaggcctggctggcctacatgaacagagcctaccacgccatcctgcagggcagactgggcgagctggagctgcagctgaagcacggcaaggaggagcccgaggaggtgcagtacaagaagagcaccgcctggctgtgggtgagagacatgctgaccgacgagatcaccaaggccgccgccaaggagagccccgtggtgaagggcaacgccctgctggccctgagcagcctggccgtggtggtgagcagacacgaggccagcctgagcagcgacagcgacggcctgctggaggtgcagcccaacttcctgagcatgaaggagtgggtgagcatggtgctggacaccctgctggtgatcgtggacagccactaccagcccagaggccagctgctgagctggttctactacaagagctacagcggcgagaacaccgccagcgccatcgccagaagcgccgccgccaccgccctgagcctgctggtgcccgtgttcatcatcagctgcaaggagaaggtggaggagatcctgaacatgctgaccgccagactgcccggcaagcccagcgccgacgagagccaggccgtgcagatccacatgggcctggccctgggcatgttcctgagcagactgtgcgaggagaagctgagcgacatcagcggccaggagatgaacctgctgctgatgaagagcctggacgccctggagaactgctgcttcgacaccagcctggagtacaacaccggctgcatcctgggcgtgggcctggtgctgagcctgatgagccacagcagccagatgcagagcagagtgcacgtggccgccctgctgagaaagctgagcgcccacgtggacgacagcggcagccagagcagaaccttccaggaggtgctggcctacaccctgagctgcgtgtgcaccagcgccttcagcgccggcatcatcgaggccaccgaggccgaggacgtgatgaacaagctgagactgctggtggagaacagccagcagaccagcggcttcgccctggccctgggcaacatcgtgcacggcctgagcgtgtgcggccacggcaaggccgaggacctgggcagcaagctgctgcccgcctggatcagaatcgtgctgaccgagggcacccccaccatgctgtgcctggccgccctgcacggcatggtggccctggtgggcagcgagggcgacgtgatgcagctgaagagcgaggccatccagaccagccacttccagggcagactgaacgaggtgatcagaaccctgacccaggtgatcagcgtgagcggcgtgatcggcctgcagagcaacgccgtgtggctgctgggccacctgcacctgagcaccctgagcagcagccagagcagagccagcgtgcccaccgactacagctacctgcccgagagcagcttcatcggcgccgccatcggcttcttcatcaccggcggcaagaagggccccgagagcgtgccccccagcctgctgaaggtggtgatgaagcccatcgccaccgtgggcgagagctaccagtacccccccgtgaactgggccgccctgctgagccccctgatgagactgaacttcggcgaggagatccagcagctgtgcctggagatcatggtgacccaggcccagagcagccagaacgccgccgccctgctgggcctgtgggtgaccccccccctgatccacagcctgagcctgaacaccaagagatacctgctgatcagcgcccccctgtggatcaagcacatcagcgacgagcagatcctgggcttcgtggagaacctgatggtggccgtgttcaaggccgccagccccctgggcagccccgagctgtgccccagcgccctgcacggcctgagccaggccatgaagctgcccagccccgcccaccacctgtggagcctgctgagcgaggccaccggcaagatcttcgacctgctgcccaacaagatcagaagaaaggacctggagctgtacatcagcatcgccaagtgcctgctggagatgaccgacgacgacgccaacagaatcgcccaggtgaccaagagcaacatcgagaaggccgccttcgtgaagctgtacctggtgagccagggcagattccccctggtgaacctgaccgacatgctgagcgtggccgtgcagcacagagagaaggaggtgctggcctggatgatcctgcacagcctgtaccaggccagaatcgtgagccacgccaacaccggcgtgctgaagagaatggagtggctgctggagctgatgggctacatcagaaacgtggcctaccagagcaccagcttccacaacaccgccctggacaaggccctggacttcttcctgctgatcttcgccaccgccgtggtggcctgggccgaccacaccgcccccctgctgctgggcctgagcgccagctggctgccctggcaccaggagaacggccccgccggccccgtgcccagcttcctgggcagaagccccatgcacagagtgaccctgcaggaggtgctgaccctgctgcccaacagcatggccctgctgctgcagaaggagccctggaaggagcagacccagaagttcatcgactggctgttcagcatcatggagagccccaaggaggccctgagcgcccagagcagagacctgctgaaggccaccctgctgagcctgagagtgctgcccgagttcaagaagaaggccgtgtggaccagagcctacggctggtag

SEQ ID NO: 195129 - DNA, 5406 bp, Artificial Sequence
  derived and/or modified sequence
atgtccgacgatatcagaaagcgcttcgaatttcctaatagcttaattcaatcacaggctgtcgggcacctaattgccgcagtcctcaaagaaaacggcttctcagaaaagatacaccagtctaccaaccaaacccccgcccttaacctcctgtgggagaagtgctgttctgacaatgttgttgtgagaacagcttgttgcgagggactagtggcactggtcgcgcaggaccacgccgaattcagttacgtgttaaacggtatactgaatcttattccttcgacacgcaacactcacggcctgattaaggctatcatgcacctcctgcagatgcaagcactgaaggaaggtcagggtggcgaaaagaatatccaatccatttacacaataaggaatcatccacacccgcttatcaccgtgctggagcatcggcccgactgttggcccgtatttctgcagcagctcaccgctttttttcagcagtgcccagaaaggcttgaagttagctgcatccaaatcatggcgccctttctttggtacctgtactgcgagcctagccaactacaggaatatgctaaattgcggctcgccctgctgaaagtgctgttacaaccccaggtcctctgtgacaaagatcagcctagcatactggagcagcagattctgcagttatgttgcgatatagtgccatgtctgcaggtgaaggatctcatccaaaccactgaggctatgatgttcatagaagaggtctgccttagccttttaaggcaccctgtgttttggaagattcagttgactcagatgagcttacagcttttatgcgtgtccgaggtctccctgaagatcaccggtgaatgctcttcctccatacatctgctcgaacacagcgtcgagttgctcaaagaggatttcccggtggaactcgtcataattgggattgccttactgctgctgcaaactccggcttcccagcagaagcccatcctcaacctcgcccttaagttgttatcggtaaccgaagaccagaaaatccctaagtcatccttgctgctggtcatgcccatcctgcagatcttgagctcaaccgccttggaggattgtatttctgtcgatgaagagggaccaagccgccagcagttagccctcaatctgctggagatgatccagcaggagtgctaccgcgatgatcaccagaagctttcttacaaactggtgtgtcccgtgacaagcatgtatggtaccatatttactgcatggagaatcttggaagtaatgaccgacagctctgctgcatctgactggctggcctctgtagaaagtctcctgccaatcaccgccgtgataccagcacccgcattcttactcctggctcatctacttgtggaggataaagggcaaaatttacaccagattttgaaagtgactacagaactggctcaggctgattcatcccaggtgcccaatctgatacccgtgctaatgttcaaacttggtcgacccctggagcctatactgtataatgatattctgtatactctcccaaaattgggcgtccataaggtttgtattgggcagattctgcgcatcatccaacttctgggtaccacccctaggctgcgggctgtgacgctgagactccttaccagcctgtgggaaaagcaggacagggtatacccagagctacagcggttcatggcagtgtccgacgttccatccttgagtgttggaaaggaagtacagtgggaaaagttaatcgccaaagcagcatccatccgggacatatgtaagcagaggccatatcagcatggggccgatatgctggctgcgatctcccaggtcctgaacgagtgtaccaaacccgatcaagccacgccggccgccctggtcttgcagggattgcacgcactttgtcaggccgaagtagtgtgtatccggtccacctggaacgccctctcccccaagcttagttgtgatacgcgccccctcatcttgaagacactgtccgaactctttagtcttgtgccatccttgacagtaaatacaaccgagtacgaaaactttaaggtgcaggtgctctcgtttctctggacacacacccagaacaaggatccgattgtggccaatgctgcatataggagcttagcgaatttcaccgctggggagcacaccattctacatctgccagagaagattcggcctgagattcccattcctgaagaactcgacgatgatgaggatgtggaggacgtcgatctgtccgtgccagggagctgttacttaaaactcttatccctcactccacccctggtgttaccagcactggaggagtttttcacgtcactcgtgaaacaggagatggtcaatatgcctagagggatttaccacagcgccctgaaaggtggcgctaggagcgaccaggggaagactgtcgctggaatccctaatttcatccttaaaatgtacgaaaccaacaaacagcctgggttgaagcctggcctcgccggcggcatgctgttttgctacgacgtgtctatgtatcagagcaaggatggcaaacccctgaacagattgatggccagccgcggtaggtccttcaagcagacgagcttagcgttggtccatgaagtgcatattcagctaagcgagtggcacagggctatcttcctgccccaggcctggttagcatacatgaacagggcatatcatgctatactgcagggcagactgggtgagcttgaactccagctgaaacacggcaaagaggaaccagaagaggtccagtataagaaatcgactgcctggctgtgggtccgagacatgctgacagatgagatcaccaaagctgctgccaaggaaagccccgtggttaaaggaaatgctctgctggcactttccagccttgcagtagttgtttcccggcacgaagcaagcttgtcctctgactcggacggactgctggaagtgcagcctaatttccttagcatgaaagagtgggtgtctatggtcttggataccctcttggtgatcgtggattcccattaccagcctaggggccaactcctctcttggttttactataagtcatacagcggtgagaacaccgcatccgcgatcgccaggagcgctgccgctactgcattgtcgctcctggtcccggtcttcattatcagctgcaaagagaaagtggaggagatattaaacatgctcaccgcgcggctcccaggaaagcctagcgccgatgaaagccaggccgtgcagatccatatgggccttgctctcgggatgttcctgtctagactgtgcgaggaaaaactgtctgatatcagcggacaggagatgaatttgttacttatgaagtcgcttgacgcccttgaaaactgctgttttgacactagcctcgaatacaacactggctgtattcttggcgtagggctcgtcctctctcttatgagccactcctctcaaatgcaaagtagagtgcacgtcgcagccctgctgcgtaagttgtctgcccacgtggacgatagtggttcacaaagtaggaccttccaagaggtgttggcttacacactgagctgcgtgtgcaccagcgctttcagcgcaggaattatagaagccactgaggccgaggatgtgatgaataagttgcgcttactggttgagaacagtcagcagaccagcgggttcgcccttgcacttgggaacatcgtgcacggccttagcgtatgtggccacggcaaagcagaggatcttggatccaagctgctgcctgcttggatccgcatagtgctgaccgaggggaccccaactatgctgtgcctggcagcgctccatggcatggtcgcactggtcggcagcgaaggagacgttatgcagctgaaaagtgaggctattcagactagccactttcagggccgtctgaatgaggttatacgtacactgactcaagtgattagtgtgtccggcgtaatcggactgcagagcaatgctgtgtggctgctgggccatctccatcttagtaccctgtcatcatctcagtctagggcctcggtgcctacagattacagctacttgcctgaatcgtcatttatcggagcagccatcggctttttcatcacaggaggcaagaagggcccagaatctgtccctccatcactacttaaggtggtgatgaagccaatcgccacagttggcgagagctaccagtacccccccgtaaactgggcagctctgctatccccactcatgaggctgaacttcggggaggaaattcagcagctctgcctggagataatggttacacaggcccagtccagccagaatgctgccgcactgctgggactatgggttaccccccccctcatccatagcttgtcccttaacacaaagaggtatttgctaatatccgcacccctgtggatcaaacacatttccgacgagcagatcttgggctttgtggagaatctcatggtcgctgtttttaaggcagcttcaccactcggctcgccggaactgtgtccaagcgccttgcacgggttgtcacaagccatgaagttgccctctccagcccaccacctttggtccctcctgagtgaggcaactggaaaaattttcgatctgttgcccaacaaaatccggagaaaagatctagaactctacattagcatcgccaagtgcttgctcgaaatgactgacgatgatgcaaaccgcatcgcccaagtaacgaaaagcaatattgagaaggccgcctttgtgaagctgtatctcgtaagccaaggcagatttccactggtaaatcttacagatatgctaagcgtagcagtgcaacacagggagaaagaggtgttggcttggatgattttgcacagcctgtaccaggcccgcatcgtttcccatgctaatactggggtcctgaagcgcatggagtggctgctggagttgatgggctacatacgcaatgtagcgtatcagagtactagctttcacaacactgctctggataaggctctggacttctttttattgatattcgcaaccgctgtggttgcctgggcagaccatactgctccactactcctcggactcagcgcttcctggctgccctggcaccaagagaacggacctgccggaccagttccatccttcctcggaaggtctccaatgcaccgtgtcacactgcaggaggtccttacattattgcccaactctatggctctgttgctccagaaagagccatggaaagaacagacccagaagttcatagattggctgttcagtattatggaatccccgaaagaggccctatccgcccaaagcagagaccttttgaaggctacactcctgtctctccgggtgctgccggaattcaaaaaaaaggccgtgtggactcgagcttatgggtggtag

SEQ ID NO: 195130 - DNA, 5406 bp, Artificial Sequence
  derived and/or modified sequence
atgagtgacgatattaggaagcgcttcgagttcccaaattctttaattcagtcccaagccgtcggccacctgatagccgccgtcctcaaggaaaacggctttagtgaaaagattcatcaatccaccaatcaaacaccagccctgaacctgctatgggagaaatgctgttccgataatgtagtcgttcggacggcatgctgtgaaggtcttgtggccctagtggcacaggaccacgccgaattttcatacgtgctaaatggaattctaaacttaatcccctcaaccaggaacacccatggcctgatcaaggctattatgcacctgttgcaaatgcaggccctcaaggagggccaggggggcgagaaaaacattcagtcaatatataccatccggaaccatcctcatcctcttataacagttctggagcataggcccgactgctggccggtttttctgcaacagcttaccgctttcttccagcagtgcccagaacgcttagaggtgtcctgcatccagattatggccccatttttatggtacttgtattgcgagccatcccagctccaggaatatgcaaagctgcgactcgccctgctgaaggtgctcttacagccacaggtgctatgcgacaaggaccagccatctatcctcgagcagcagatattgcagctgtgctgtgatatagtgccctgtcttcaagttaaagatctgatacagacaacagaggcaatgatgtttattgaggaagtctgtctaagcctgctccgccatcctgtgttctggaagatccagcttacgcagatgagtttacaattgctgtgcgtgagcgaggtttctctcaaaattacaggtgaatgcagttccagtatacacctgctcgaacattcagtcgaattgttaaaggaggacttccccgttgaacttgtcattatcgggattgcactacttctgctacagaccccggcaagtcaacagaagcctatactgaatttagccctcaagcttctgtcggtcaccgaggatcagaagataccaaagtcttccttgctcctggttatgccaattctgcagatactgagttcaaccgccttggaagactgcatttcagtggacgaggagggaccttcccggcaacaactggctctgaatctgctcgagatgatccagcaagaatgctacagagatgatcaccagaagttaagttataagctggtgtgcccggttactagtatgtatgggacaatcttcaccgcatggcgtatcctcgaggtcatgacagacagtagtgccgcctctgactggctggcgtcagtggaaagcctcttgccaataaccgctgttattcctgcccctgcatttcttctcctggcacacttattagtggaggataaaggtcagaatctccatcaaatacttaaggtgaccacagagcttgcacaggcggactcgagccaggtgccaaatttgattcccgtcttgatgttcaaattaggccgccctctggaacccattttgtataacgacatcctctatacgcttcccaagttaggggttcacaaggtatgcattggccagattctgcggattatccagctgctgggaacaactccacgcttacgagctgtaaccctcagattgctcacttctctctgggagaagcaggatcgcgtgtaccccgagctgcaacgctttatggcagtgagcgacgtgccatctctgtccgtgggaaaagaggtccaatgggagaaattgatcgccaaagcagcgagcatccgggacatctgtaaacagagaccataccagcacggtgccgacatgcttgcggccatctctcaggtactcaacgagtgcacaaaaccggatcaggccacgcctgccgccttagtgctgcaaggtctgcacgccctgtgccaagcagaggttgtctgtattcgctccacctggaacgcactgagccccaaactatcttgtgatacaagacccctgatactgaagacgcttagtgagttatttagcctggtcccttctctcacagtaaatactactgagtatgaaaactttaaggtgcaggtcctatctttcctctggacgcacacccagaacaaggatcccattgtagccaatgccgcttatagatctttggctaactttacagctggagaacatactattcttcatcttcccgaaaagatccggcccgagattccgattcccgaggagcttgacgatgacgaagacgtcgaggatgtggatctcagcgtccctggtagctgctatctgaagctgctgagtctcactcctcctctcgtactccccgccttagaagagttctttactagcctggtaaagcaagaaatggtgaatatgccgagaggcatttaccatagcgcgctaaaaggtggcgcccgctctgaccaaggaaagacagtggccggcattcctaatttcatcctgaaaatgtatgagactaataagcaacccggcctgaagcccgggctcgcaggaggtatgctgttctgttatgacgtgagcatgtatcagtcaaaggacggcaagccccttaatcgactgatggcgtcccgcgggcgttctttcaagcagacctcgctggcccttgtgcacgaggttcatattcagctaagcgaatggcatcgggccattttcctgccccaagcttggttggcgtatatgaatcgggcgtatcatgcgattctgcaggggcggttgggggagctggagctccagctgaaacacgggaaagaggagcccgaggaggtgcagtacaagaagtctaccgcttggttgtgggttcgtgacatgctgaccgatgagattactaaagccgcagccaaagagagtcctgttgtgaaagggaatgccctgcttgctttaagttctctcgccgttgtggtgagccggcacgaggcttcactgagcagcgatagcgatggactcctggaggtccagccgaatttcctttcaatgaaagagtgggtgtctatggtgctcgacactttattggtgatagtcgattcacattatcagccccgcggtcaactgttgagttggttctattacaaatcttattctggagaaaacacggcttccgccattgccaggagtgctgccgccaccgccctgtccctgcttgtgccggtgtttataatttcatgtaaagagaaggtggaggagatcctcaatatgctgaccgctaggctcccaggaaaaccttctgcagatgagagtcaggcagtccagattcatatggggttggccttagggatgttcctcagccgattgtgcgaagaaaaactgtcagatatctcaggccaagagatgaacctgctactgatgaaatccctggatgccctggaaaactgctgttttgacacatccctggaatacaacacaggttgcattctcggcgtggggctggtcttatcccttatgtcacactcttctcaaatgcagtcccgcgtgcacgtcgccgccctgcttcggaagctgtccgctcatgttgatgactctgggagtcagtccaggacttttcaggaagtactcgcttacacgctgtcttgcgtgtgtacgtccgccttctcggcaggcatcattgaggcgaccgaggcagaggatgtgatgaacaagctgagactgctcgtcgagaacagccagcagactagtgggttcgcgctggcactggggaatattgtccatggactttcagtgtgcgggcatgggaaggccgaggacctcggcagcaagctgctgccagcatggattagaatagtcttgacggaaggaacacctactatgctttgtctcgcagccctccatggcatggtcgccctggtgggaagcgagggcgacgtgatgcagctgaaatcagaagccatacagactagccactttcagggacgattgaatgaggtaattcgaacactgacccaggtgatctccgtatctggggtcattggcttgcagagcaatgcagtgtggctcctagggcacctgcatctgagtacactctcaagttcccagtcacgggcctctgtgcccacagattatagctacctccctgagagctcgtttatcggcgccgctatcggcttcttcatcacaggaggcaaaaaaggccccgagagtgttcctccttcccttttgaaggtggtgatgaagcccatagctactgtaggagagtcgtatcagtaccccccagtgaattgggctgccctgctaagtcctttgatgagactcaacttcggggaagagatccagcagctttgcctagagataatggtgacgcaggctcagagctcccaaaatgcagctgctctccttggtctatgggtgacaccgcctctgattcacagcctatctttgaacaccaagcgctacctcttaatatccgcacccctgtggatcaagcatattagcgatgagcagatactcggcttcgttgagaacctgatggtcgccgtgtttaaggcagccagccccctggggagcccagaattgtgtccgagtgcattacatggactgtcccaggccatgaagctgccgtcccccgcacatcacctttggtctctcctcagtgaagccaccggtaagattttcgacctcttgccaaacaagattcgccgcaaggacttggaattatacataagcatagcaaagtgtcttctggagatgaccgacgacgatgctaacaggattgcacaggttaccaagtctaatattgagaaagccgcttttgtgaagttatatttggtatcccagggaagattcccattggtgaacttgaccgatatgttgagcgtggcggtccagcaccgggagaaggaagtccttgcctggatgattctgcattccctgtaccaggccaggattgtatctcacgccaacactggggtcctgaagaggatggagtggcttttagaactcatgggatatatccggaatgttgcataccaaagcacgtccttccacaatacggcactcgataaggccctggatttcttcctgctgatctttgcaactgccgttgtggcatgggcagatcatactgcgccattgttgctgggtctcagtgcttcatggctcccttggcaccaggagaacgggcccgccgggcccgttccttccttcctgggtcggtcacccatgcacagagtgaccctgcaggaggtgttgactttacttcccaactccatggcattactactacaaaaggaaccatggaaagaacagactcagaaattcatcgactggttgtttagcatcatggagtcgcccaaggaggccctttcagcacagtcacgtgatctgcttaaggcgacactgctgagtctgagagtactaccagagttcaaaaagaaagccgtgtggacaagggcctatggctggtag

SEQ ID NO: 195131 - DNA, 5725 bp, Artificial Sequence
  derived and/or modified sequence
atgtcagatgatatcaggaaaaggtttgaatttccaaattctcttatccaatcacaggctgtgggtcatcttattgctgcagtcctaaaggaaaatggtttttcagaaaagattcaccaatctacaaatcagactcctgctttgaacttgctgtgggagaagtgttgcagtgacaatgtagtggttcgaacagcctgctgtgaaggtctggtggcactcgttgctcaggatcatgcagagttcagctatgttctcaatgggatactcaacttgattccatcaaccagaaatacacatggcttgataaaagccattatgcacttactacaaatgcaagctcttaaggaaggacaaggtggggaaaagaatattcagagtatatataccattagaaatcatcctcatcctttgataactgtgcttgaacacagacctgattgctggccagtgtttttgcagcagctgacagcgtttttccagcagtgccctgaaaggttagaagtttcatgcattcaaataatggcaccatttctgtggtatctgtattgtgaaccatctcagttacaagaatatgctaaactccgactagccctgctgaaagtcttacttcaaccccaggttctttgtgacaaagatcaaccatcaatactggaacagcagatacttcaactgtgttgtgacatagttccatgtttgcaggtaaaagatttgatacagacaacagaggcgatgatgtttattgaggaagtatgtttaagccttttgcgtcatcctgttttctggaaaattcagcttacccagatgagtcttcagctgctgtgtgtcagtgaagtcagcttaaagataactggtgaatgttcatcttcaattcaccttttagagcacagtgttgaacttctgaaggaggattttcctgttgaactggtcataattggaatagctttactacttctacagactccagcaagtcagcagaagccaatcttaaatctagctttgaagctcctctctgttactgaggatcagaaaatcccaaagtcctctctgctgctagtgatgccaattctgcagatactatcttctactgccttggaagactgtatatctgtggatgaagaaggtccctctaggcagcagttggctctaaaccttttggaaatgatacagcaggaatgttacagagatgaccaccaaaagctctcctacaagcttgtgtgccctgtaaccagtatgtatggtacaatatttacagcctggaggattcttgaagtaatgacagactcgtctgctgcaagtgactggttggcttcagtagagtcattgcttcctattactgctgtgatccctgcgcctgcctttcttctgctggctcacctccttgttgaagacaaaggacaaaatcttcaccaaatactcaaggtcactacagaattagcccaagcagattcctcccaggtgccaaatctgattccagttttgatgttcaaattgggaagaccactggaacctatattatataatgatatattgtatactttacctaagcttggtgttcacaaggtgtgtataggacaaattctacgaataatacaactacttggaaccacaccacgactaagagctgtcactttgcgcttgctgacatctttgtgggaaaagcaggaccgagtctatcctgaactgcagcgtttcatggctgtgtctgatgtaccttctctttcggtgggcaaggaagtccaatgggagaaactgattgcaaaagcagcatcaatcagagatatatgtaagcagaggccatatcaacatggtgcagatatgttggcagctatttctcaagtgttgaatgaatgcaccaagcctgatcaagctactccagcagccttggtattacagggtcttcatgcactctgtcaagctgaggttgtttgcattcgctccacttggaatgctctctctccaaagctgagttgtgacacaagacctctcattctgaagacactgagtgaactattttctctagttccttccttaacggtcaatacaactgaatatgagaattttaaagttcaagtcctcagcttcctctggactcatactcaaaacaaggacccaattgtagcaaatgctgcatatagatccctggccaactttactgcaggagaacacaccattcttcatctgcctgaaaagataagaccagaaattcccattcctgaagagttagatgacgatgaagatgttgaggatgtggatctttcagttcctggctcttgctatctcaaactgttgtcactcactccccctttggttttaccagctttggaggaattttttacatcacttgtgaagcaagaaatggtgaatatgcctcgtgggatatatcactctgcattaaaaggaggtgcccgctcagaccaaggaaagactgtagcaggaatccccaattttatattgaaaatgtatgaaacaaacaagcaaccaggactgaaacctggccttgcaggtggtatgttattttgctatgatgtttccatgtatcagagtaaagatggaaaaccattgaacagactgatggccagcagagggcgaagtttcaagcagacttcacttgctcttgtacatgaggttcatatccagctttcagagtggcaccgtgcaatttttcttccacaggcctggcttgcatacatgaatcgagcttatcatgccattttacagggaagactaggagagctggagttgcagttaaaacatggaaaagaagaacctgaggaggtgcagtacaaaaaaagcacagcctggctctgggttagagacatgctgactgatgagatcaccaaggcagctgcaaaggagagtccggtagtgaaaggcaatgcgctgttagctctaagcagccttgctgtcgtcgtatctagacatgaagccagcctctcctcagactctgacgggctcctggaggttcaacctaatttcctttcaatgaaagagtgggtttccatggtacttgatacactcttggtcattgtggatagccattaccaacccagagggcaacttctctcctggttttattataagtcctattctggtgaaaacacagctagtgccattgcccgttctgctgccgccacggctttgtctctccttgtgccagttttcattatctcttgcaaagagaaggttgaggaaatcctgaacatgctgactgccaggttacctgggaaaccaagtgctgatgagtctcaagccgtgcaaatccacatgggccttgctttagggatgtttctctctcgcttgtgtgaagagaaactcagtgatatatctggccaagagatgaaccttcttctgatgaagtcgttggatgccctggaaaattgctgctttgacactagtcttgaatacaacacgggctgtatattgggagttggacttgttctgtccctcatgagccacagcagccaaatgcagtcccgcgttcacgtagcagcattgctccggaagctgtctgcgcacgtagatgacagcgggagccagagcagaacgtttcaggaggtccttgcctacacacttagctgtgtatgtacatcagcgttcagtgctggaattattgaggctacagaggctgaggatgttatgaacaagcttcgactgttagtggagaatagccagcagacttcaggttttgccctggctttaggaaacatagttcatggattgtctgtgtgtggacatggaaaagctgaagacttgggcagcaaactactccctgcctggatcagaattgttctaacagagggcactcccacaatgctttgtctggcagctcttcatggcatggtggccttggtaggctctgaaggggatgtaatgcagctgaaatcagaagccatccagacctctcattttcaaggcagacttaatgaagtcattagaaccttaactcaggtcattagtgtctctggggtgattggtctccagtcaaatgcagtctggcttcttggacatcttcatctatctactctatcctcaagtcaaagtagagcctctgttcctactgactatagctacttgcctgaaagcagttttattggagcagctattggcttcttcattacaggaggaaaaaaaggtcctgaatctgtgcctccttcccttcttaaagtagtgatgaaacccatagcaactgttggagaaagctaccaatatcctcctgtgaactgggctgcacttctctctccacttatgaggctaaattttggtgaagagatccagcaactgtgccttgaaattatggtgacccaggcacagtcatcccagaatgcagctgcactattgggcttgtgggtgacaccaccactgatccacagtctgagtctgaataccaagagatatctcctgatatctgcacctctgtggataaaacacatctctgatgaacagatcctgggttttgttgaaaatttaatggtggcagtttttaaagcagcttccccacttggaagtcctgagctatgcccaagtgctttacacggtctgagccaggccatgaaactgcccagccctgcccaccacctctggagtctgctctctgaagctactgggaaaatttttgacctcctgccaaataagattcggagaaaggatctagagctgtatatcagcatagcaaaatgcctcttagaaatgacagatgatgatgccaatcggatcgcccaggttactaagagcaacatagaaaaagctgcctttgtcaaactgtacttagtctctcaaggacgattccccttggtgaacctgaccgatatgctgagcgttgctgtgcagcaccgtgagaaagaggtgttggcctggatgattctgcacagcttataccaggcacggattgtgagccatgccaatacgggcgttttgaagagaatggagtggctcttggaactgatgggttatattagaaatgttgcttaccagtcaacatcctttcacaatacggctcttgacaaggctttggacttcttcttgctgatatttgcaaccgcagtggttgcatgggctgaccacactgcccctctcctcctcggcctcagtgccagttggttgccatggcatcaggagaatggcccggctgggccagtaccaagcttccttggcaggagtccaatgcacagggtcactctgcaggaggttctcactctccttcccaatagcatggctctgctgctgcagaaagagccatggaaggaacagacccagaagttcattgactggctattcagcatcatggaaagccctaaagaagccctctcagcacagtccagggatcttttgaaagccaccctgctgtccttgagagttctcccagagtttaagaagaaagctgtatggaccagagcatatggttggtgaacagttttgcagtaaccagcagcattctcagctggatgaggaaaaccatataagtggaagaagtttttcagaattcatgcctggtattgctgagacatgatgcagagagttaagggtcatgaaaagatggccacatcactgacagcttgacacatgcctcctaagagaggagtgcattgctttagtacccgggccagttgagactgaaacaggaacttggattttctttatttggcttgagttcaatgtggagattttctttgtgaaagcttgaagatattatcttctccctgctaaattccagtaaaataatgttgtc

SEQ ID NO: 195132 - DNA, 6096 bp, Artificial Sequence
  derived and/or modified sequence
gttcgagcttcccggctgctttgtttacctaatcaagcctgggcaatggcgggcgcccctcccgcagcctcgctgccgccttgcaggttgatctcagactgctgtgctagcaatcagtgagactccgtgggcgtaggactctccaagccagtgagatgaactcggtatctcagatggaaatgcagaaatcaccgtcttctccatcgctcacgctgggagctgtagaccggagctgttcctattcggccatctttgctcctccctgcaactaactccattcttaattgaccatcaaggaaatttccatccacacagattagcagttgaaaatgaagctgcacacatacatgtaagagaagcaaaaatgtcagatgatatcaggaaaaggtttgaatttccaaattctcttatccaatcacaggctgtgggtcatcttattgctgcagtcctaaaggaaaatggtttttcagaaaagattcaccaatctacaaatcagactcctgctttgaacttgctgtgggagaagtgttgcagtgacaatgtagtggttcgaacagcctgctgtgaaggtctggtggcactcgttgctcaggatcatgcagagttcagctatgttctcaatgggatactcaacttgattccatcaaccagaaatacacatggcttgataaaagccattatgcacttactacaaatgcaagctcttaaggaaggacaaggtggggaaaagaatattcagagtatatataccattagaaatcatcctcatcctttgataactgtgcttgaacacagacctgattgctggccagtgtttttgcagcagctgacagcgtttttccagcagtgccctgaaaggttagaagtttcatgcattcaaataatggcaccatttctgtggtatctgtattgtgaaccatctcagttacaagaatatgctaaactccgactagccctgctgaaagtcttacttcaaccccaggttctttgtgacaaagatcaaccatcaatactggaacagcagatacttcaactgtgttgtgacatagttccatgtttgcaggtaaaagatttgatacagacaacagaggcgatgatgtttattgaggaagtatgtttaagccttttgcgtcatcctgttttctggaaaattcagcttacccagatgagtcttcagctgctgtgtgtcagtgaagtcagcttaaagataactggtgaatgttcatcttcaattcaccttttagagcacagtgttgaacttctgaaggaggattttcctgttgaactggtcataattggaatagctttactacttctacagactccagcaagtcagcagaagccaatcttaaatctagctttgaagctcctctctgttactgaggatcagaaaatcccaaagtcctctctgctgctagtgatgccaattctgcagatactatcttctactgccttggaagactgtatatctgtggatgaagaaggtccctctaggcagcagttggctctaaaccttttggaaatgatacagcaggaatgttacagagatgaccaccaaaagctctcctacaagcttgtgtgccctgtaaccagtatgtatggtacaatatttacagcctggaggattcttgaagtaatgacagactcgtctgctgcaagtgactggttggcttcagtagagtcattgcttcctattactgctgtgatccctgcgcctgcctttcttctgctggctcacctccttgttgaagacaaaggacaaaatcttcaccaaatactcaaggtcactacagaattagcccaagcagattcctcccaggtgccaaatctgattccagttttgatgttcaaattgggaagaccactggaacctatattatataatgatatattgtatactttacctaagcttggtgttcacaaggtgtgtataggacaaattctacgaataatacaactacttggaaccacaccacgactaagagctgtcactttgcgcttgctgacatctttgtgggaaaagcaggaccgagtctatcctgaactgcagcgtttcatggctgtgtctgatgtaccttctctttcggtgggcaaggaagtccaatgggagaaactgattgcaaaagcagcatcaatcagagatatatgtaagcagaggccatatcaacatggtgcagatatgttggcagctatttctcaagtgttgaatgaatgcaccaagcctgatcaagctactccagcagccttggtattacagggtcttcatgcactctgtcaagctgaggttgtttgcattcgctccacttggaatgctctctctccaaagctgagttgtgacacaagacctctcattctgaagacactgagtgaactattttctctagttccttccttaacggtcaatacaactgaatatgagaattttaaagttcaagtcctcagcttcctctggactcatactcaaaacaaggacccaattgtagcaaatgctgcatatagatccctggccaactttactgcaggagaacacaccattcttcatctgcctgaaaagataagaccagaaattcccattcctgaagagttagatgacgatgaagatgttgaggatgtggatctttcagttcctggctcttgctatctcaaactgttgtcactcactccccctttggttttaccagctttggaggaattttttacatcacttgtgaagcaagaaatggtgaatatgcctcgtgggatatatcactctgcattaaaaggaggtgcccgctcagaccaaggaaagactgtagcaggaatccccaattttatattgaaaatgtatgaaacaaacaagcaaccaggactgaaacctggccttgcaggtggtatgttattttgctatgatgtttccatgtatcagagtaaagatggaaaaccattgaacagactgatggccagcagagggcgaagtttcaagcagacttcacttgctcttgtacatgaggttcatatccagctttcagagtggcaccgtgcaatttttcttccacaggcctggcttgcatacatgaatcgagcttatcatgccattttacagggaagactaggagagctggagttgcagttaaaacatggaaaagaagaacctgaggaggtgcagtacaaaaaaagcacagcctggctctgggttagagacatgctgactgatgagatcaccaaggcagctgcaaaggagagtccggtagtgaaaggcaatgcgctgttagctctaagcagccttgctgtcgtcgtatctagacatgaagccagcctctcctcagactctgacgggctcctggaggttcaacctaatttcctttcaatgaaagagtgggtttccatggtacttgatacactcttggtcattgtggatagccattaccaacccagagggcaacttctctcctggttttattataagtcctattctggtgaaaacacagctagtgccattgcccgttctgctgccgccacggctttgtctctccttgtgccagttttcattatctcttgcaaagagaaggttgaggaaatcctgaacatgctgactgccaggttacctgggaaaccaagtgctgatgagtctcaagccgtgcaaatccacatgggccttgctttagggatgtttctctctcgcttgtgtgaagagaaactcagtgatatatctggccaagagatgaaccttcttctgatgaagtcgttggatgccctggaaaattgctgctttgacactagtcttgaatacaacacgggctgtatattgggagttggacttgttctgtccctcatgagccacagcagccaaatgcagtcccgcgttcacgtagcagcattgctccggaagctgtctgcgcacgtagatgacagcgggagccagagcagaacgtttcaggaggtccttgcctacacacttagctgtgtatgtacatcagcgttcagtgctggaattattgaggctacagaggctgaggatgttatgaacaagcttcgactgttagtggagaatagccagcagacttcaggttttgccctggctttaggaaacatagttcatggattgtctgtgtgtggacatggaaaagctgaagacttgggcagcaaactactccctgcctggatcagaattgttctaacagagggcactcccacaatgctttgtctggcagctcttcatggcatggtggccttggtaggctctgaaggggatgtaatgcagctgaaatcagaagccatccagacctctcattttcaaggcagacttaatgaagtcattagaaccttaactcaggtcattagtgtctctggggtgattggtctccagtcaaatgcagtctggcttcttggacatcttcatctatctactctatcctcaagtcaaagtagagcctctgttcctactgactatagctacttgcctgaaagcagttttattggagcagctattggcttcttcattacaggaggaaaaaaaggtcctgaatctgtgcctccttcccttcttaaagtagtgatgaaacccatagcaactgttggagaaagctaccaatatcctcctgtgaactgggctgcacttctctctccacttatgaggctaaattttggtgaagagatccagcaactgtgccttgaaattatggtgacccaggcacagtcatcccagaatgcagctgcactattgggcttgtgggtgacaccaccactgatccacagtctgagtctgaataccaagagatatctcctgatatctgcacctctgtggataaaacacatctctgatgaacagatcctgggttttgttgaaaatttaatggtggcagtttttaaagcagcttccccacttggaagtcctgagctatgcccaagtgctttacacggtctgagccaggccatgaaactgcccagccctgcccaccacctctggagtctgctctctgaagctactgggaaaatttttgacctcctgccaaataagattcggagaaaggatctagagctgtatatcagcatagcaaaatgcctcttagaaatgacagatgatgatgccaatcggatcgcccaggttactaagagcaacatagaaaaagctgcctttgtcaaactgtacttagtctctcaaggacgattccccttggtgaacctgaccgatatgctgagcgttgctgtgcagcaccgtgagaaagaggtgttggcctggatgattctgcacagcttataccaggcacggattgtgagccatgccaatacgggcgttttgaagagaatggagtggctcttggaactgatgggttatattagaaatgttgcttaccagtcaacatcctttcacaatacggctcttgacaaggctttggacttcttcttgctgatatttgcaaccgcagtggttgcatgggctgaccacactgcccctctcctcctcggcctcagtgccagttggttgccatggcatcaggagaatggcccggctgggccagtaccaagcttccttggcaggagtccaatgcacagggtcactctgcaggaggttctcactctccttcccaatagcatggctctgctgctgcagaaagagccatggaaggaacagacccagaagttcattgactggctattcagcatcatggaaagccctaaagaagccctctcagcacagtccagggatcttttgaaagccaccctgctgtccttgagagttctcccagagtttaagaagaaagctgtatggaccagagcatatggttggtgaacagttttgcagtaaccagcagcattctcagctggatgaggaaaaccatataagtggaagaagtttttcagaattcatgcctggtattgctgagacatgatgcagagagttaagggtcatgaaaagatggccacatcactgacagcttgacacatgcctcctaagagaggagtgcattgctttagtacccgggccagttgagactgaaacaggaacttggattttctttatttggcttgagttcaatgtggagattttctttgtgaaagcttgaagatattatcttctccctgctaaattccagtaaaataatgttgtcaattttg

SEQ ID NO: 195133 - DNA, 5406 bp, Artificial Sequence
  derived and/or modified sequence
atgtctgatgacatcaggaagagatttgagttccccaacagcctcatccagagccaggccgtgggccacctgattgctgctgtgctgaaggaaaatggcttcagcgagaagatccaccagagcaccaaccagaccccagccctgaacctgctgtgggagaagtgctgcagcgacaacgtggtggtgaggacagcctgctgtgagggcctggtggccctggtggcccaggaccatgctgagttctcctatgtgctgaatggcatcctgaacctgatccccagcaccaggaacacccacggcctcatcaaggccatcatgcacctgctgcagatgcaggccctgaaggagggccagggcggggagaagaacatccagagcatctacaccatccggaaccacccccaccccctcatcaccgtgctggagcacaggccagactgctggcctgtgttcctgcagcagctgacagccttcttccagcagtgcccagagcggctggaggtgtcctgcatccagatcatggcccccttcctgtggtacctgtactgtgagcccagccagctgcaggagtatgccaagctgcggctggccctgctgaaggtgctgctgcagccccaggtgctgtgtgacaaggaccagcccagcatcctggagcagcagatcctgcagctgtgctgtgacatcgtgccctgcctgcaggtgaaggacctgatccagaccacagaggccatgatgtttattgaggaggtgtgcctgagcctgctgcggcaccctgtgttctggaagatccagctgacccagatgagcctgcagctgctgtgtgtgtctgaggtgtccctgaagatcactggagaatgtagcagcagcatccacctgctggagcacagcgtggagctgctgaaggaggacttccctgtggagctggtgatcattggaattgccctgctgctgctgcagaccccagccagccagcagaagcccatcctgaacctggccctgaagctgctgtctgtgacagaggaccagaagatccccaagagcagcctgctgctggtgatgcccatcctgcagatcctgagcagcacagccctggaggactgcatctctgtggatgaggagggccccagccggcagcagctggccctgaacctgctggagatgatccagcaggagtgctacagagatgaccaccagaagctgagctacaagctggtgtgccctgtgacctccatgtatggcaccatcttcaccgcctggaggatcctggaggtgatgacagacagcagcgctgccagtgactggctggcctctgtggagagcctgctgcccatcacagctgtgatcccagccccagccttcctgctgctggcccacctgctggtggaggacaagggccagaacctgcaccagatcctgaaggtgaccacagagctggcccaggccgacagcagccaggtgcccaacctgatccctgtgctgatgttcaagctgggccggcccctggagcccatcctgtacaatgacatcctgtacaccctgcccaagctgggcgtgcacaaggtgtgcatcggccagatcctgcgcatcatccagctgctgggcaccaccccccggctgcgggctgtgaccctgcggctgctgaccagcctgtgggagaagcaggacagagtgtacccagagctgcagcgcttcatggctgtgtctgatgtgcccagcctgtctgtgggcaaggaggtgcagtgggagaagctgattgccaaggccgccagcatccgggacatctgcaagcagaggccctaccagcacggggctgacatgctggccgccatcagccaggtgctgaatgaatgtaccaagccagaccaggccaccccagctgccctggtgctgcagggcctgcacgccctgtgccaggccgaggtggtgtgcatccgcagcacctggaatgccctgagccccaagctgagctgtgacacccggcccctcatcctgaagaccctgtctgagctgttcagcctggtgcccagcctgactgtgaacaccacagaatatgagaacttcaaggtgcaggtgctgtccttcctgtggacccacacccagaacaaggaccccatcgtggccaatgctgcctaccgcagcctggccaacttcaccgctggggagcacaccatcctgcacctgcctgagaagatccggcctgagatccccatccctgaggagctggatgatgatgaagatgtggaggatgtggacctgtctgtgcccggcagctgctacctgaagctgctgagcctgaccccacccctggtgctgcctgccctggaggagttcttcaccagcctggtgaagcaggagatggtgaacatgccccggggcatctaccacagcgccctgaagggcggggcccggagtgaccagggcaagacagtggccggcatccccaacttcatcctgaagatgtatgagaccaacaagcagcccggcctgaagccaggcctggccggcggcatgctgttctgctatgatgtgtccatgtaccagagcaaggatggcaagcccctgaaccggctgatggccagccggggccgctccttcaagcagaccagcctggccctggtgcatgaggtgcacatccagctgtctgagtggcaccgggccatcttcctgccccaggcctggctggcctacatgaacagagcctaccacgccatcctgcagggccgcctgggggagctggagctgcagctgaagcacggcaaggaggagcctgaggaggtgcagtacaagaagagcacagcctggctgtgggtgcgggacatgctgacagatgagatcaccaaggctgctgccaaggagagccctgtggtgaagggaaatgccctgctggccctgagcagcctggccgtggtggtgtccagacatgaggccagcctgagcagtgacagtgatggcctgctggaggtgcagcccaacttcctgtccatgaaggagtgggtgtccatggtgctggacaccctgctggtgattgtggacagccactaccagccccggggccagctgctgtcctggttctactacaagagctacagcggggagaacacagccagcgccatcgcccggtctgctgctgccacagccctgagcctgctggtgcctgtgttcatcatcagctgcaaggagaaggtggaggagatcctgaacatgctgacagcccggctgcccgggaagcccagcgcagatgagagccaggccgtgcagatccacatgggcctggccctgggcatgttcctgagccggctgtgtgaggagaagctgagtgacatcagcggccaggagatgaacctgctgctgatgaagagcctggatgccctggagaactgctgctttgacaccagcctggagtacaacacaggctgcatcctgggcgtgggcctggtgctgagcctgatgagccacagcagccagatgcagagccgggtgcacgtggccgccctgctgaggaagctgagcgcccacgtggatgacagcggcagccagagcaggaccttccaggaggtgctggcctacaccctgagctgtgtgtgcaccagcgccttctctgctggcatcatcgaggccacagaagcagaagatgtgatgaacaagctgcggctgctggtggagaacagccagcagaccagcggctttgccctggccctgggcaacatcgtgcacggcctgtctgtgtgtggccacggcaaggccgaggacctgggcagcaagctgctgcctgcctggatccgcatcgtgctgacagagggcacccccaccatgctgtgcctggccgccctgcacggcatggtggccctggtgggctctgaaggagatgtgatgcagctgaagtctgaggccatccagaccagccacttccagggccgcctgaatgaggtgatccgcaccctgacccaggtgatctctgtgtctggagtcatcggcctgcagagcaatgctgtgtggctgctgggccacctgcacctgagcaccctgagcagcagccagagccgggcctctgtgcccacagactacagctacctgcctgagagcagcttcatcggggccgccatcggcttcttcatcactggaggcaagaagggccctgagagcgtgccccccagcctgctgaaggtggtgatgaagcccatcgccaccgtgggggagagctaccagtacccacctgtgaactgggccgccctgctgagccccctgatgaggctgaactttggagaggagatccagcagctgtgcctggagatcatggtgacccaggcccagagcagccagaatgctgctgccctgctgggcctgtgggtgaccccacccctcatccacagcctgagcctgaacaccaagcgctacctgctgatcagcgcccccctgtggatcaagcacatcagtgatgagcagatcctgggctttgtggagaacctgatggtggccgtgttcaaggccgccagccccctgggcagccctgagctgtgccccagcgccctgcacggcctgagccaggccatgaagctgcccagccctgcccaccacctgtggagcctgctgtctgaggccaccgggaagatctttgacctgctgcccaacaagatccggaggaaggacctggagctgtacatcagcatcgccaagtgcctgctggagatgacagatgatgatgccaacagaattgcccaggtgaccaagagcaacatcgagaaggccgcctttgtgaagctgtacctggtgtcccagggccgcttccccctggtgaacctgacagacatgctgtctgtggccgtgcagcaccgggagaaggaggtgctggcctggatgatcctgcacagcctgtaccaggccagaattgtgagccacgccaacacaggagtgctgaagaggatggagtggctgctggagctgatgggctacatcagaaatgtggcctaccagagcaccagcttccacaacacagccctggacaaggccctggacttcttcctgctgatctttgccacagctgtggtggcctgggccgaccacacagcccccctgctgctgggcctgagcgcctcctggctgccctggcaccaggagaatggacctgctggccctgtgcccagcttcctgggccgcagccccatgcaccgggtgaccctgcaggaggtgctgaccctgctgcccaacagcatggccctgctgctgcagaaggagccctggaaggagcagacccagaagttcatcgactggctgttcagcatcatggagagccccaaggaggccctgagcgcccagagccgggacctgctgaaggccaccctgctgagcctgcgggtgctgcctgagttcaagaagaaggctgtgtggacccgggcctacggctggtag

SEQ ID NO: 195134 - DNA, 5406 bp, Artificial Sequence
  derived and/or modified sequence
atgagcgacgacatccggaagcggttcgagttccccaacagcctgatccagtcgcaggcggtgggccacttaattgcggccgtgttgaaggaaaacggattttctgagaagatccatcagtccacaaaccaaacacctgcgttaaacctgctctgggagaaatgctgtagcgacaacgtcgtggtccggacagcctgctgcgaagggctcgttgcactcgtagcccaggatcatgctgagttttcatatgtgctgaatggtatactgaatctaatcccaagtacacgtaacacccacgggctgattaaagcgattatgcacttgttacaaatgcaggcactgaaagaaggacagggaggcgagaaaaacatacagagtatatatactatcaggaaccaccctcatccacttataaccgtcctcgagcacaggccagactgttggcctgtgtttcttcagcagctgaccgcattttttcaacagtgtccagagaggctggaagtctcctgcatccagatcatggcgccatttctttggtacttgtactgtgaaccctcgcaactacaggagtatgccaaattaaggctcgccctactcaaagtgctcctacagccacaggttttatgcgataaggaccagccatctatcttggagcagcagatcctgcaattgtgctgcgacatagtgccttgtctccaagtgaaagatctgatccaaacaactgaagccatgatgtttatcgaagaggtgtgtctgtctctcctgcggcatccggtgttctggaaaatccagctgacccagatgtctctgcaactgctttgcgtgtctgaggtttcactgaagattaccggcgagtgctccagtagtatccaccttctcgagcatagcgttgagcttttgaaggaagatttccctgttgaacttgttatcataggaatagccctcctcctgctgcaaactccagcttctcagcagaagcccattcttaacctggcactcaaactgctaagcgtgaccgaggatcagaaaatacctaaaagtagccttctgctcgtcatgcctatcttgcagatcttgtcctccacagcattggaagattgcattagcgtggacgaagaaggtccctctcgccagcagttagcactcaatctgctggagatgatccagcaggaatgttaccgcgacgatcatcagaagctgtcatataagctggtctgtcccgtgacatcaatgtacggcaccatttttacggcctggcgtatcctggaagtgatgaccgacagttcggcagcttctgattggctagcctccgtcgagtccctcctgcccattaccgccgtgattcctgctcctgcatttttgctcctggcccacctgctggtcgaggataaagggcagaatctgcatcagatccttaaggtgaccacagaactcgctcaagccgattcctctcaggtccccaacctgatcccagtcctgatgttcaaactcggccggcctctggagcctatcctctacaacgacatcctgtacaccctaccgaagctgggcgtccacaaagtttgcatcggtcaaatcctaaggataattcagctcctggggaccactcctaggttgagggccgtgacactgcgcctgttgacctcattgtgggaaaagcaggatcgtgtgtaccctgagctacagagatttatggcagtttccgacgtgccaagccttagcgttggtaaggaggtgcaatgggagaagctgatcgcaaaagctgcgagcatcagggacatctgtaaacagcgcccctaccagcacggggcagatatgctcgctgcaatttcacaggtgctcaacgagtgtaccaaaccagatcaggccacccctgctgccctcgtcctgcaggggctacacgcactgtgtcaggcggaggtggtctgtatcaggagcacgtggaacgcactgtcccccaagctgtcttgcgacaccaggccccttattctgaagacactctcagaattgttttcattggtgccttccctgaccgttaataccactgagtacgagaattttaaggtccaagtgctgtccttcctctggacccatacgcaaaacaaggaccccattgtcgcgaatgctgcttaccgctcgttggcaaatttcaccgccggagaacatacaatcttacacttgccagagaagatcagacccgaaatcccgatcccagaggaacttgacgatgacgaagatgtggaggacgtggacctaagtgtccctggatcgtgttaccttaagctgctgagtcttacaccacctctggtacttcctgccctagaagagttctttacatcactggtgaaacaggagatggtgaacatgccacggggaatctaccacagcgccttaaagggtggggcaaggtccgaccaaggcaagacagtggccggcattcccaactttattctgaagatgtatgaaaccaataagcagccggggctgaagccaggactggccggaggcatgctgttttgctatgacgtcagcatgtatcagtcaaaggatggtaagccactgaacagactcatggcgtctagaggaaggtctttcaagcaaacgtccttagccctcgtgcatgaagtccatatccaattgtccgagtggcatagagccattttcttgccccaggcttggctggcctatatgaatagggcctaccacgcaatattgcaggggagactcggggaactggagctgcagctcaagcacggcaaggaagagcctgaagaggtacagtacaagaagtcaaccgcatggctgtgggtccgggatatgctgactgatgaaattaccaaagccgccgccaaggagtcgcccgttgtgaaagggaacgcactgctggcgctgtcctccctggctgtggtggttagccgccacgaagccagtctgtcctctgactcggacggattacttgaggtgcagccaaacttcctctctatgaaggaatgggtgagcatggtgttggacaccctgttagttattgttgattctcattaccagccccggggacagttactaagctggttctactataagtcctattccggcgagaatacggcttctgctatcgccagaagcgcagccgctactgcgttatctctgttggttcctgtgtttatcatctcctgtaaagaaaaagtggaagagatcctgaatatgctgacagcacgactgcccggcaaaccatcagcggacgagtcccaggctgtccaaatccatatgggactggctctgggtatgttcctgtctaggttatgtgaggagaagctgagcgacatttcaggtcaggaaatgaacctgctactgatgaagtccctggacgctctcgaaaactgttgcttcgatacatctctggagtacaacactggttgtattctcggtgtgggactggttctgtcgctgatgtctcacagctcacagatgcagagccgggtgcacgttgcggccctactgagaaagctgagtgcccacgtggacgactccggatcccagtcccgcaccttccaggaagtcctcgcttatactcttagttgcgtgtgtacatctgccttcagcgctggcatcatcgaagcaactgaagctgaggatgtgatgaataagttgagattactcgtcgagaattcacaacaaacatccggtttcgcgctcgccctgggcaatattgttcatggactgtccgtgtgtgggcacggaaaagccgaggacttgggcagtaagctcctgcctgcttggattcggatcgtgttgacagaggggacccctaccatgctgtgcctggcagcactgcacggcatggttgcgctcgtgggcagcgagggggatgtgatgcagctgaaaagtgaggctatacaaacgtctcacttccaggggagattgaatgaggtgattaggactctcactcaggtcataagcgtaagtggggtgatcggtttacaatcaaacgccgtatggctgctgggccacctgcatctcagcacgctaagctccagtcagtcacgagcctcggtgcccaccgattatagttatttaccagaaagtagcttcatcggtgcagctatcggtttctttattacgggcggcaaaaagggcccagaatctgtaccaccaagcttacttaaagtggtcatgaaaccaatagctactgtgggggagagctatcagtatccccccgtgaactgggcagccttgttgtccccactgatgaggctcaattttggggaggaaatccagcagctgtgcctggagattatggtcactcaggcccagtccagtcaaaacgctgccgctctgctgggactctgggtaacacctcccctgatacattccctgtccctgaacaccaagcgatatctcctgatatctgccccgctgtggattaaacacatcagtgatgagcaaattctcggctttgtagagaacctgatggttgcggttttcaaggccgcttcacctctcggctccccagagctgtgtccctccgctctccacggcctaagccaagctatgaagctcccctccccagcacatcatttgtggagcctactgtcagaggcaactggaaaaattttcgacctacttccaaataagatccgtcggaaggaccttgagttgtacatctccatagctaaatgcctgctcgaaatgactgatgacgacgcgaatagaatcgcccaggtcacgaaatccaacatcgagaaagccgcttttgtcaagttatacctggtttcacagggtaggtttcctcttgtgaatcttaccgacatgctttccgtcgcggtccaacaccgggaaaaagaggtgctcgcctggatgatcctgcatagtctgtatcaggcccgcattgtaagccacgccaacaccggggtgctgaagcgaatggagtggttactggaactgatggggtatatcaggaatgttgcataccagtccacttcattccacaacacggctctcgataaagctctggatttctttcttctcattttcgcaactgctgtcgtggcttgggctgatcacactgccccactgctcctgggtttgtcggctagctggctgccctggcaccaggagaacggtcctgcgggccctgtccctagttttttgggcaggtctcccatgcatcgtgttacacttcaggaggtactaactctgctgccaaactccatggccctgcttctacagaaggaaccatggaaggaacagacccagaagttcattgattggctgttctccattatggaatcccctaaagaggccctgagcgctcaaagtcgcgacctactgaaagcaacactgctgtccttgagagtgttgcctgagtttaagaaaaaggcagtgtggacgagagcctatgggtggtag

SEQ ID NO: 195135 - DNA, 5406 bp, Artificial Sequence
  derived and/or modified sequence
atgagcgacgacatccggaagcggttcgagttccccaacagcctgatccagtcacaggcagtggggcatttgatcgccgctgtgctgaaagagaacggttttagtgagaagatacaccagagtaccaatcaaactccagcccttaacctgctatgggagaagtgttgctctgacaatgtggtggtaagaacggcttgctgcgaggggttggtcgcgctggtggcccaggatcatgcagagtttagttacgtccttaacggaatcctcaatctcattccatcaactcgaaacactcatggacttataaaagctattatgcaccttcttcaaatgcaggccctcaaagaaggccaaggcggtgaaaagaatatccagtcgatctacaccattcgtaaccatcctcatcccttgatcactgtcttagagcataggcccgattgctggcccgtctttctacaacagctgacggcattttttcagcagtgtccagagaggctagaggtgtcctgtattcagatcatggctccctttctttggtacctgtattgcgaaccttcacagctgcaggagtacgctaaattgcgtctggccctgctgaaggtattgctgcagccccaggtcctatgcgataaggaccagccttcaatactggagcagcagatcctgcagctgtgctgtgatatcgtcccctgccttcaggttaaggaccttatacagacaacggaggccatgatgttcatagaagaagtgtgcctgagcctcttaagacacccagtcttttggaaaatccagttgactcagatgagcctgcaactcctctgtgtctcggaagtgtcactgaaaattacaggcgagtgctcttcatcaatccaccttctggagcactccgtggaactattaaaagaagacttccccgtcgaactcgtcatcatcgggatagccttgctgttgcttcagacacctgccagccagcagaagcccattctgaatcttgctctaaaacttctgagtgtgactgaggaccagaagatcccgaaaagcagccttctgttagtgatgcccattctgcagatactgtccagtaccgccctggaagactgtatctcagtcgatgaggaagggccatcacggcagcagctagccctgaatctgttggaaatgatccagcaggagtgctacagagatgaccaccagaagctgtcttacaaactggtctgcccagttactagcatgtacgggaccatcttcacagcatggcgcatactcgaggtgatgacagactcaagcgcagcctctgactggctggcctcagtcgaaagcttgctgccaataacggcagtgatccccgcccccgcgtttcttctgttagcccacctcctggtggaggacaagggccagaacctccaccagatccttaaagtgactacggaactggcacaggctgacagctctcaggtgcctaacttaatccccgtgctgatgtttaaactgggacggccacttgagccaatcctgtacaatgatatcttatatactctgcccaagctcggcgtgcataaggtctgcataggccagattctgcggatcatccagcttctggggactactccccgattgcgggctgtaactctccggcttttgacttccctgtgggaaaagcaggaccgcgtctacccagaactgcagcggttcatggccgtgagcgacgttccaagcctgtccgtcggcaaggaggtgcagtgggaaaaactgatagcaaaggctgccagcattcgggacatttgcaaacagcgaccctatcaacatggtgctgatatgcttgccgcgatcagtcaggtgcttaacgaatgtaccaaaccagatcaagccaccccagccgccctggtgctgcagggcttgcacgcgctgtgccaggctgaggtcgtgtgtattagatcaacctggaatgccctttctcccaagctgtcctgtgatacgaggcctctgatcttgaagaccctctctgaattgttctctctggtgccctccttaacggtgaacacaacagaatacgagaactttaaggtacaggttttaagttttttgtggactcacactcagaacaaggaccccatcgtcgccaacgccgcctaccgaagtttggccaactttactgcaggcgagcacaccatactacacttgcccgagaagattcgccctgagatccctataccagaagaattggacgacgatgaggatgtggaggacgtggacctatctgtcccaggatcctgttacctgaaattgctgtcactgacccctcctctcgtactgcccgcactggaggagttctttacctcacttgtcaaacaagaaatggtaaatatgcctagaggcatttatcactccgccctgaaaggtggtgccagatctgaccagggcaagaccgtggcaggaatccccaattttatcctgaagatgtacgagaccaataaacaacccgggctgaagccaggtctggccggaggcatgctgttttgttacgatgtctcaatgtatcagtccaaagatgggaaaccactcaaccgtctcatggccagccgtggaagatccttcaaacagacttcgctggccttagtccacgaagtgcacatccagctctcagagtggcatagagctatttttctgcctcaggcctggttagcttacatgaatagagcatatcacgcaattctgcagggacgtctgggagaactggagctccagctgaaacacggtaaagaggagccggaggaagttcagtataagaaaagcaccgcctggctctgggtgagagacatgctcacagatgagattacgaaggccgcagcaaaggaatctcccgtggtcaagggcaacgctcttctagctctatccagcctggcagtggtggtgtccaggcacgaggcttccctttcttcagactcagacgggctactggaggtacaaccaaactttttgtctatgaaagagtgggtatctatggtcctcgacacacttcttgtcattgtggatagccattaccagcccagggggcagttactgagctggttctattataagtcttacagcggcgaaaatactgcatccgcgatcgctaggtccgcagctgcaactgccttgagtctgctggtcccggtttttataatcagctgtaaggaaaaggtagaggagatccttaatatgcttacagcacgtttgccgggaaaaccctcagcggacgaatctcaagccgtacagattcacatggggctagctctgggaatgtttttgtctcgcttgtgtgaagagaagctatcagacatcagcgggcaagagatgaatctgttattgatgaaaagtttagatgctctggaaaactgctgttttgatacatcacttgagtacaacacgggatgcattctgggggtggggctggtgttgagtctgatgtcacacagtagccagatgcaaagccgagtgcacgtggccgccctcctgcggaagctttccgcccacgtcgacgactccggcagtcagagtaggacattccaggaagtgctagcttacaccctgtcttgcgtttgtacttcagccttcagcgcagggattatcgaagcaacggaggcagaggacgtgatgaacaagctgagactcttagttgaaaactctcaacaaacttccggattcgcattggccctgggaaatattgtccacgggctctccgtgtgcggacacggcaaggctgaggacttagggagtaagctactgcccgcttggatccgcatagttctcaccgaaggaacacccaccatgttatgcttagccgcgcttcacggcatggtcgccctggtcgggtcagaaggcgatgtcatgcaattgaaatcagaggcaatccaaacaagtcacttccagggccgcttgaacgaggtaatccgtacacttacccaggtaatctccgtatccggggtaataggtttacagagcaacgcagtgtggcttctgggccatctccatttatcaacccttagctcctctcagtcaagagcatctgtccctacagactactcctacttgccagagtcaagctttattggagctgccattggtttcttcattactggaggaaaaaagggtcctgagagtgtgcccccctccctcctgaaagtcgtgatgaaaccaatagcaacagtgggggaaagttaccagtacccccccgtgaattgggctgcactgctcagcccactgatgcgcctcaacttcggagaagagattcagcagctgtgtttagagattatggtaacccaggcacaatcctctcagaacgccgctgccttgttgggtctctgggttacccctcccttgattcatagtctgagtctcaacacaaaacgctatctgttaatatctgctcctttgtggattaagcatatctccgacgagcagatcctcggttttgttgagaacctgatggttgctgtgttcaaggccgctagccccctgggctctccggaattgtgcccatccgcgctgcacgggctcagccaggccatgaagcttccctcccctgcccaccatctgtggagtctcttgtcagaagctacaggcaagattttcgatctgcttccaaacaaaatccgtcgtaaagacctcgagctctacatttcaatcgctaaatgcttgctagagatgactgatgatgacgctaatcggatagctcaggtaacgaaatcaaacatagaaaaagccgcattcgtgaaactgtatctggtgtctcagggtaggtttcccttggtgaacttgactgatatgctttcagtagcagtccagcatcgagaaaaggaagtgctcgcatggatgatcctgcacagcctgtaccaagccagaatcgtcagccatgccaacacaggggtgttaaagaggatggagtggttgctggagctgatgggatacatccgcaatgtagcttaccagtccacaagctttcacaatacagccctggataaggcgcttgactttttccttctcatcttcgccaccgcagtcgttgcatgggcagaccacacggcaccccttctactgggtctgtctgcgtcctggctgccctggcaccaggagaatggtcccgctgggcctgtcccatcttttctgggccgaagccccatgcaccgcgtgacactccaggaggtactgaccctgctaccaaactccatggcgttactcctgcagaaggaaccttggaaggaacagacccaaaagtttattgactggctattctccataatggagagccctaaggaagctctctctgctcagagcagggacctacttaaggctactctgttgagcctgcgcgtcctcccggagttcaaaaagaaggccgtgtggacaagggcatatggttggtag

SEQ ID NO: 195136 - DNA, 5405 bp, Artificial Sequence
  derived and/or modified sequence
atgtctgacgacattcgcaagcgctttgagtttccgaacagcctaattcaaagtcaggccgtagggcatctcatcgcagctgtgttaaaagaaaatggattttccgagaaaattcaccagtccactaaccagacccccgcactgaacctgttgtgggagaaatgttgctcggataatgtcgtggtccggacagcctgctgtgagggtcttgtagctctggtcgcccaagaccatgccgagttttcctacgtcctcaacggtattctaaatctgattccctccactcggaatactcatggactgattaaggcaatcatgcatctcctacagatgcaggcactgaaagagggccagggtggggaaaaaaacatacagtccatctataccatccggaaccacccacaccccctcattacagtgctagaacatagacctgactgctggccagtgttcctgcagcagctgaccgcattcttccaacaatgtcctgagcgcttggaggtgagctgtattcagatcatggccccattcctctggtacctatattgtgagccatctcaacttcaagaatatgcaaaactacggctggctctgcttaaagtgctactgcagccccaggttctgtgtgacaaagatcaacccagtattcttgaacagcagattctacaactgtgttgcgatattgttccttgtctgcaggtcaaagatctgatccagacgacagaggcgatgatgttcatcgaagaagtgtgcctgtcgctcctgagacacccggtcttttggaagatccaactgacccagatgtcgctgcagctgctgtgtgtgagcgaagtctcactaaaaatcacgggcgagtgctccagcagcatccatctgctggagcattcagtcgaactgctgaaggaggactttcctgtcgaattagtaattatcggtattgcccttctgctgctgcagactcctgcaagtcagcaaaagccaatcctcaatctggcgctgaagcttctgtcagtcaccgaggatcagaagatcccaaagagcagcctcctgttagtgatgcccatcctgcagatcctttccagtacagctctggaagattgcatttctgtcgacgaggaggggccttccaggcaacagcttgccctgaacctgctcgagatgatccagcaggagtgctatagggacgatcaccagaaactgtcatacaaactagtgtgcccagtgacttctatgtacggtaccatttttaccgcttggagaattctggaagtaatgacggacagttccgccgctagcgattggctcgcttctgtggagtctttactgcccatcacggccgttataccagccccagcgtttcttttactggcccacctgctggtggaagataaggggcagaatctgcaccaaatactgaaggttacgaccgagctcgcacaagctgactcaagtcaggtccctaatctgattcctgttctgatgttcaagctgggcagacctttggagccgatcctgtataacgatatcctgtatacacttcctaagttgggcgtacacaaagtctgcatcggacagatcttacggataatccagctgctggggaccaccccaagattgagggccgtgacccttagactgcttacctcactgtgggagaagcaggatagggtgtacccagaattacagcgcttcatggccgtgagcgacgtgccgagcctctcagttggcaaagaggtgcagtgggagaaattgattgcaaaggctgcaagtatccgcgatatctgtaagcagcgcccatatcagcacggggcagatatgctggcggctatttcacaagttttaaatgaatgcaccaagccggaccaggcgacacctgcagctttggtgctgcaaggtctgcacgcactctgccaggcagaagtagtgtgcattcggtctacatggaatgccctatctccaaagctgagctgcgatacgcggcctttaatactgaaaaccttgagtgagctgttctccctcgttccaagccttacagttaataccacagagtatgagaattttaaggtacaggtgctgtcctttctctggacgcacactcagaacaaggacccgattgtggcgaacgctgcttaccggtcattggcgaattttaccgcaggggagcacaccatcttacacctgccagagaagatccggcctgagatcccaatccctgaagagctggatgacgatgaagacgtggaagatgtcgatctctcagtgccaggtagctgttatctcaaattattgtcactgaccccacctcttgtgctgccagctctggaggaattcttcacatctctcgtgaagcaagagatggtgaacatgcccagaggtatctatcactcagcccttaagggcggagcgaggagtgatcaggggaaaaccgtcgccggaatccccaatttcattttgaaaatgtatgagaccaacaaacagcccggtctgaaaccaggactcgccggaggcatgctgttttgttatgatgtcagcatgtaccaaagcaaggatggaaaaccactcaatcgcctcatggcttctcggggtcgcagttttaagcagacctcgctcgcattggtacacgaggttcacattcagttgagcgagtggcaccgggctatcttcctgccccaggcatggctggcctacatgaacagggcctaccatgcgatcctgcaagggcgtctaggtgaactcgagctgcagcttaaacacggcaaagaggagccagaggaggtgcagtacaagaagagtacagcctggctttgggtccgtgacatgctaaccgatgagataactaaggcagctgccaaagaatcaccggtcgtcaaaggcaatgccctgttggccctctctagcctcgctgttgtggtttcccgacacgaagcctctctttcctctgactctgatggccttcttgaagtacagccaaatttcctctcgatgaaagagtgggtctccatggtactcgatacgttgctagtcattgtcgattcacattaccaacccaggggacaactgctgagctggttttactacaaatcatattccggagagaataccgccagtgctatcgcacgcagtgccgctgcaaccgctttgtcactcttggtgcctgtcttcatcatctcctgcaaagagaaggtggaggagatactgaacatgctgactgcacgattgcctgggaagccatcagccgatgaatctcaggccgtgcaaatccacatggggcttgccttaggaatgttcttgtcccgactgtgtgaagagaaactgagcgacatttccggccaggagatgaacctgctgctgatgaagagcctggatgctctggaaaactgttgtttcgacacctctctggagtacaatacgggctgtatcctcggcgttggcctggttctgagcctcatgagccactcctcccagatgcagagtagggtgcatgttgccgcacttcttagaaagctgagcgctcacgtggatgattcgggcagccaaagcagaaccttccaggaggtgctggcctacaccctgagctgcgtctgtactagtgcctttagtgccggaatcattgaagctacggaagctgaggacgttatgaacaaactcaggctgttggtagaaaactcgcaacagacaagcggatttgcactggcactgggtaatatcgttcacggcttaagcgtctgcggccatggaaaagccgaagacctggggtccaagctgctccccgcttggataaggattgtgctcaccgaggggacgcccactatgctgtgtcttgccgctttgcatggaatggtagctctcgtgggtagcgaaggagatgtgatgcaattaaaatccgaggctatacagaccagccacttccagggtagattaaacgaagtgataaggacgctgacacaggtcatctccgtcagtggcgtcatcggccttcagtctaacgctgtgtggctcctggggcaccttcacttatcaacgctttccagttctcagagccgcgcttcagtacccacggactatagctacctccccgagagcagttttataggagcagcaattgggtttttcattaccggtggaaagaagggaccggaaagcgtgcctccctcgttgctcaaggtcgttatgaagcccatagcaaccgtgggagagtcctaccaatacccacccgtcaactgggctgccctactctctcctctgatgcgactaaacttcggtgaagaaatacaacagctatgtcttgagatcatggttacccaggctcagagttcccagaatgccgctgccctgctggggctgtgggttactcccccactcattcattccttgtccttgaacaccaaacgttaccttctcatttcagcaccactatggattaagcacatctctgacgagcagatcttggggtttgttgagaatttgatggtggctgtgttcaaagctgcatccccactgggcagccctgagttatgcccttccgccctgcatggcttgtctcaggccatgaaactgccatcacctgcacaccacctttggtctcttttgtccgaggccactggcaagatattcgacttgcttcccaacaaaatcaggaggaaagacctggaactatatatctctatcgccaaatgcttactggagatgactgatgacgacgccaatcgcattgcccaggtgactaagtctaacatcgagaaagcagcattcgtgaagctgtatttagtgagccaaggaaggtttcctcttgtaaatctcaccgatatgttgtctgtcgctgtgcagcacagagagaaggaggttctggcctggatgatcctgcactctctgtatcaggcacggattgtcagccatgccaatacaggcgtcctgaaaagaatggagtggttacttgagctgatggggtacatccgcaatgtcgcctatcagagtacttcatttcacaatacagccttagataaggcgctggatttttttctgctgattttcgctaccgctgtggtggcttgggccgaccatactgcacctctgctgctgggcttatcggcaagctggctgccgtggcaccaggagaacggcccagccggaccggtgccttctttcctgggacgcagccctatgcacagggtcacattgcaggaagtgctgaccctacttcctaatagcatggccctcttgttacagaaagagccatggaaggagcagactcaaaaattcattgactggctgtttagcattatggagagtcctaaggaggctttgtctgcacagtcgcgcgatctgttaaaagccacactgttatccctgagagtgttgcctgaattcaagaaaaaagccgtgtggacccgcgcttatggatggta

SEQ ID NO: 195137 - DNA, 5405 bp, Artificial Sequence
  derived and/or modified sequence
atgtcagatgacatcagaaaacgattcgaattccctaattccctgatccagtcccaggccgtgggccacctgatcgcagctgtgttaaaagagaacggtttcagtgaaaagatccatcagtctaccaaccagacccctgctctgaatctcctgtgggagaaatgttgtagtgataacgtagtggtgcgcacggcatgctgtgaaggcttagtggcccttgtggcgcaggatcatgccgaattttcatacgttctgaacggtattcttaatctgataccgagcacaagaaacactcacgggcttatcaaggctatcatgcatcttctgcagatgcaagctctcaaggaggggcagggaggggagaagaacattcagtctatctatactatcagaaaccatccacatcctctgatcactgttcttgaacatcggcctgattgttggcctgtatttcttcagcagctgaccgctttttttcagcaatgcccagagcgcctcgaggtctcgtgtattcagattatggcccctttcctatggtacttgtactgtgagccatctcagcttcaggaatacgctaaactaagactggctctgctcaaggtgctgcttcagccccaggtgctatgtgacaaggaccagccgtccattctggaacaacaaatcctacagttgtgttgcgacattgtgccttgcctgcaggtcaaagatctcatccagaccacggaggcaatgatgttcatagaagaggtgtgtctgtctctgctaagacatcccgtcttctggaaaatccagcttactcagatgagtctgcagctgctgtgcgtcagcgaagtatccctgaaaatcacaggcgaatgctcctccagcattcacttactggaacatagcgtcgaactgctcaaagaggattttcccgtcgaactggtgataataggcattgccctcttgctattgcaaacgcccgcttcccagcagaagccgatcttaaacctcgccctgaaactgctgtccgtcaccgaggatcagaagatacctaaaagcagcctcctgctggttatgccaatcctgcagattctttctagtaccgctctggaggattgcatcagcgtagacgaggagggaccctcacgccagcagctggcccttaatctcttggagatgatacagcaggaatgctaccgagatgaccaccagaagctctcatacaaactggtgtgccctgttacctctatgtacggtacaatttttacggcgtggcgcattcttgaggtaatgaccgattcctccgccgcttccgattggctcgcaagcgtggagtcgctactgccgataaccgcagtcataccagccccagcttttttgctgctggcccatttgctcgtcgaggataaggggcagaatttgcatcaaattctgaaagttaccaccgaactggctcaagcagatagttcgcaggtgccaaatctgatcccagtgctgatgtttaaattaggccgaccattagagcccattttgtataatgacattctctacactctgcccaagctcggcgtccacaaggtctgcattgggcagatcctgaggatcatccaattgctcggaacgactccaagactgagagctgttaccctaaggctacttacgagcctctgggaaaaacaggatcgggtctatccagagctgcaacgtttcatggctgtctcagacgttccgagcctgtcggttggaaaggaagttcaatgggagaagctgatcgccaaggccgcaagcatccgggatatttgcaagcagagaccgtaccaacacggggctgatatgctggccgcaatctcccaggtgctcaacgagtgcaccaaacctgaccaggcaacgccggcagccctcgttttgcagggactgcacgcactctgccaggcagaggtggtatgcatacggagtacatggaatgcactctctccaaaactctcatgtgacacaagacctcttatcctgaaaacgttatctgagttgttctcgttggtcccgagtctcacagtgaacacaactgaatatgaaaactttaaagtccaggtgctttccttcctttggactcatacccagaacaaggacccaattgtggcgaatgcagcctacaggtcactcgccaactttactgccggagagcataccatcctgcacctgccggaaaaaatacgcccagaaatccccattcctgaggagcttgacgacgacgaggacgtggaggacgtggatctgtcggttccaggaagctgctatctgaaattactgtccttaactcccccactcgtgttgcccgcattagaggaattttttacctccctggtgaagcaggagatggtgaacatgccaagagggatataccattccgctcttaagggaggagcccgaagtgaccaggggaagactgtggccggtattcccaacttcattctgaaaatgtatgagaccaacaagcagcccggtctcaaacccggtttggccggagggatgcttttttgttacgatgtgagtatgtatcagtctaaagacgggaaacccctgaatcggttaatggcaagcaggggccgtagcttcaagcagacaagcctggcactggtgcacgaggtgcatattcagctgtcggaatggcatcgagcaatttttctgcctcaggcatggttggcttatatgaaccgcgcataccacgccatcctccagggacgcttgggtgagttggaactccagctcaaacacggcaaggaagaacccgaggaagttcagtacaagaagtccacagcatggctgtgggtgagggatatgttgactgatgagatcacaaaggctgcagcaaaagaaagccctgtcgttaaagggaatgcccttttggctctcagttcacttgccgttgtggtgtccagacatgaagcctccctcagttcggattccgatggccttctggaggtccagccaaactttttgtcaatgaaggagtgggtcagtatggtgttagatactctgctggtgatcgttgactcacattatcagccaagggggcagctcctgtcctggttttactataagtcctactccggagaaaacaccgccagtgccatcgcccgaagcgccgctgcaactgcccttagcctcctcgtgcccgtgtttattatctcatgcaaggagaaagtcgaagagatccttaacatgttaacagcccgtcttcctggcaagccatccgctgatgaaagccaggctgtccagatccacatggggctggccctgggaatgtttctgagccggctttgtgaagaaaagctttcggacatttccgggcaggaaatgaacctactactaatgaagtctctcgacgccctggagaattgctgtttcgatacgtccctagaatacaatacagggtgcatcctgggagtcggcctggtgttatctctgatgagtcactcgagtcagatgcagagccgagtgcacgtggccgcactgcttaggaaattgtccgcgcacgtggacgacagcggctctcagtcccggacgttccaggaggtgctggcgtataccctaagctgcgtgtgcacctcagcattttctgccggtattattgaggctacagaagcagaggacgtgatgaataagctgcgcctgctcgtggagaattcccaacagacttccggctttgccttggccctgggcaacatagtacatggacttagcgtttgcggccacggcaaagctgaagacttggggagtaagcttctgccagcctggattaggattgtactgactgaaggaacccctacgatgttgtgtcttgcggcactgcacgggatggtggccctcgtcggatcagagggggatgtcatgcagctcaaatcggaggccatacagacaagccactttcaaggcaggttgaatgaggtgattaggactctaacccaggtgatttccgtgtctggtgttatcggactgcaatctaacgccgtttggctgcttggacatctgcatctaagcacgctgagctccagccagagcagagcatctgtgccaacagactatagttacctgcctgagtcctcattcattggggcagcaatcgggttctttatcacaggcggtaagaagggtccagaaagcgtcccgccaagtcttctaaaagtcgtgatgaagccaattgcaactgtcggtgagtcctatcaataccctcccgtgaactgggcggctcttctctccccccttatgcgcctaaactttggtgaggaaatccaacagctgtgcctggaaattatggttacacaggctcaatcttcccagaatgccgcagcactattgggcctgtgggtgacacctcccctgattcattctctatctttgaatacgaagagatatcttctaatcagtgccccattgtggatcaaacacatttcggatgagcagattctggggtttgtggagaatctgatggtggcagtctttaaagccgcttcccccttagggtcacccgagctgtgtcccagcgcccttcatggcctgtcgcaggcaatgaagctgcctagcccagcacaccatctgtggagtctcctgtctgaagccacaggtaagattttcgatttgttgcccaataagattcgcagaaaggaccttgagctgtacatatcaatcgccaagtgcctgttagaaatgacagacgatgacgctaatagaatcgcccaggttacgaaaagtaacattgagaaggctgctttcgtgaaattgtatctggtgagccagggcaggttccctctggttaatctcaccgatatgttaagtgttgccgtccagcatcgagagaaggaggtgctggcctggatgatcctgcactccctctaccaggccaggattgtgtcccatgcgaacaccggggttctcaagcgtatggaatggctactagagttgatgggttacatccgcaatgtggcttaccagtctacatcatttcataataccgcccttgacaaggcattggattttttcctgctgatttttgcgaccgccgtggtcgcctgggcggatcacacagctcctctgctgctcggactcagcgccagttggctgccatggcaccaggaaaacggcccagcaggccctgtcccttcattcctcggaagaagtccaatgcatcgcgtaactctgcaggaggtgcttaccttgttgcccaatagcatggctctgttactccagaaggaaccctggaaggagcaaacccaaaagttcattgattggctgttctcaattatggagtcccccaaggaggcactcagtgctcagtccagagacctgctgaaagccaccttgctctctctacgcgtgctaccagagtttaagaagaaagccgtatggacccgggcttatggatggta

SEQ ID NO: 195138 - protein, 525 aa, Artificial Sequence
  derived and/or modified sequence
MAAGGSGGRASCPPGVGVGPGTGGSPGPSANAAATPAPGNAAAAAAAAAAAAAAPGPTPPAPPGPGTDAQAAGAERAEEAAGPGAAALQREAAYNWQASKPTVQERFAFLFNNEVLCDVHFLVGKGLSSQRIPAHRFVLAVGSAVFDAMFNGGMATTSTEIELPDVEPAAFLALLKFLYSDEVQIGPETVMTTLYTAKKYAVPALEAHCVEFLKKNLRADNAFMLLTQARLFDEPQLASLCLENIDKNTADAITAEGFTDIDLDTLVAVLERDTLGIREVRLFNAVVRWSEAECQRQQLQVTPENRRKVLGKALGLIRFPLMTIEEFAAGPAQSGILVDREVVSLFLHFTVNPKPRVEFIDRPRCCLRGKECSINRFQQVESRWGYSGTSDRIRFSVNKRIFVVGFGLYGSIHGPTDYQVNIQIIHTDSNTVLGQNDTGFSCDGSASTFRVMFKEPVEVLPNVNYTACATLKGPDSHYGTKGLRKVTHESPTTGAKTCFTFCYAAGNNNGTSVEDGQIPEVIFYT

SEQ ID NO: 195139 - DNA, 2656 bp, Artificial Sequence
  derived and/or modified sequence
atggcggcgggtgggagcggcgggcgtgcgtcgtgcccgccgggggtcggggtcggcccgggcacggggggcagtcccgggcccagcgccaacgccgccgccaccccggcccccggcaacgcggccgccgccgccgccgccgccgccgccgccgccgccgcccctgggccgacgccgcccgccccgccgggccccgggacagacgcgcaggccgcgggcgcggagcgggcggaggaggcggcgggcccgggggcggcggcgctgcagcgcgaggccgcgtacaactggcaggccagcaagcccaccgtgcaggagcgcttcgccttcctcttcaacaacgaggtgctgtgcgacgtgcacttcctggtgggcaaggggctcagctcgcagcgcatccccgcgcacaggttcgtgctggccgtgggcagcgccgtctttgatgccatgttcaacgggggaatggccacaacatccacggagattgagctgcccgacgtggaacccgctgccttcctcgcactgctcaagtttctctactcggacgaggtgcagattggcccggagacggtgatgaccacgctatacaccgccaagaagtacgcggtgccagcgctcgaggcccattgcgtggagttcctgaagaagaacctgcgagccgacaacgccttcatgctgctcacgcaggcgcgactcttcgatgaaccgcagctggccagcctgtgcctggagaacatcgacaaaaacactgcagacgccatcaccgcggagggcttcaccgacattgacctggacacgctggtggctgtcctggagcgcgacacactgggcatccgtgaggtgcggctgttcaatgccgttgtccgctggtccgaggccgagtgtcagcggcagcagctgcaggtgacgccagagaacaggcggaaggttctgggcaaggccctgggcctcattcgcttcccgctcatgaccatcgaggagttcgctgcaggtcccgcacagtcgggcatcctggtggaccgcgaggtggtcagcctcttcctgcacttcaccgtcaaccccaagccacgagtggagttcattgaccggccccgctgctgcctgcgtgggaaggagtgcagcatcaaccgcttccagcaggtggagagtcgctggggctacagcgggaccagtgaccgcatcaggttctcagtcaacaagcgcatcttcgtggtgggatttgggctgtatggatccatccacgggcccaccgactaccaagtgaacatccagattattcacaccgatagcaacaccgtcttgggccagaacgacacgggcttcagctgcgacggctcagccagcaccttccgcgtcatgttcaaggagccggtggaggtgctgcccaacgtcaactacacggcctgtgccacgctcaagggcccagactcccactacggcaccaaaggcctgcgcaaggtgacacacgagtcgcccaccacgggcgccaagacctgcttcaccttttgctacgcggccgggaacaacaatggcacatccgtggaggacggccagatccccgaggtcatcttctacacctaggctgcccgacaccgacaccgccctccctccgtggggatagccgcagccccaggccatcatctgctgctggggcccccccaccacgcggtgccaggcccagtgtcccccaggccgtctgtccactccatgccacctttctcagcatcaggacggggttgccctgtgttcaccacgagtgtggctgctggatcagggcagccggggaggtggccaggccagtggccaggccctgtggagacaatccctcaggactagggacagggctgtgccggcctgggccagggcccacggacccgcagctcagggcgcctgcccacgtcgtctgccggcggtgcgccgcgggcgtccctcgcgtctcttcactgcacattgcaatgcatttgcgattcccatttctctgctaggagccagcctgggtggcgctgctcccagagccgtgggtcccagaccttgcgttccttttgttcctgtccgtttatcaggacacgggccccacctgtcacgtgcccgaggccacccaagcccagcctgcggggcgttcccactgcctggatgccggcttgagttctgcgcacgcaggattcagtgtggggacggcccctgccggataggcctagccctggcccaggtggtgagcggtttgcagtgtccgttctcatccacctgatgggcccagataaaggcccccgctgtccagcctccctggacggccctcgcggtccctgcagcccaagatgggactcagaccctgtgccccagagctcccctgccgcagaatggggccccagccggccccgaccgggtccaggagcactgctcgcctgtacatactgttgccctagcccacctggtgccgtgggagccacccccaggtgctgggggcacagcccctccccactccggccacgcccccacccaccccgcgtgtttctgccctgtgactcctggaacctgcgtcctccccaaagccatgggaggggtgtcctcctcagaccatgcccccagatgatttttttaaataaagaaacaaatgcacctgcaaaaaaaaaaaaaaaaaaaaaaaaaaaaaaaaaaaaaa

SEQ ID NO: 195140 - DNA, 1578 bp, Artificial Sequence
  derived and/or modified sequence
atggcagctggcggaagtggaggtagggcctcctgtccaccaggcgtgggcgtgggaccagggacaggcggaagccccggaccttccgccaacgctgccgcaacacccgccccaggaaatgccgcagcggcggcagccgccgctgcagccgctgctgcagccccaggacccacgcctcctgctcctccgggacctggcactgacgcccaggcagcaggagcggagagggccgaggaagccgcggggcctggagctgcagccctgcagcgtgaggcagcctacaattggcaagcaagtaaacccactgtgcaggaaagattcgcttttctgtttaacaacgaggttctgtgcgatgtccattttctcgtgggaaaagggctgtcatcacagagaatacctgctcaccggtttgtcctggcggtaggatcggctgtgttcgatgctatgttcaatgggggaatggccaccacgtccacagaaatcgaactccccgacgtggagccagcagctttcctggctttattaaaattcctctatagcgatgaggtgcagattgggcctgaaacggttatgaccaccctatatacagctaagaaatacgcggttcccgctcttgaagcccattgcgtcgaattcctcaaaaaaaacctgcgtgcggataacgcctttatgcttcttacccaggcacgactttttgatgaaccccaactcgctagcctgtgtcttgaaaacattgataaaaacacggcagacgctatcaccgccgagggctttacggatattgacctggacaccctggtggcagtgctggaacgggacaccctgggcatccgcgaggttcgcttatttaacgctgtcgttcgatggagcgaggccgagtgtcagcgccaacagctacaggtgaccccagaaaaccgtagaaaggttctaggaaaggcccttggtcttattcgctttcccttgatgacaattgaggagtttgctgccggccccgctcaaagtggcattcttgtagatcgggaggtggtcagtctgtttcttcacttcactgtgaatccaaaacctcgggttgaatttattgatagacctcgatgctgtctgagagggaaggagtgcagcataaaccgcttccagcaggttgaaagccgctggggctattcgggtacttccgatcgtattcgttttagcgtgaacaagcgaatatttgttgtcggcttcgggctttatggaagcatccacggccctaccgattaccaagtgaatatccagatcatacataccgattcaaatacagtcctgggccaaaatgacacaggattcagctgcgacggcagcgcctcaaccttcagagtgatgttcaaagaaccagtggaggtcctcccaaatgtcaactacacagcttgtgctaccttgaaggggccggactcccactacgggaccaagggtctgaggaaagtcacacatgaaagccctacaactggggccaagacttgtttcacattttgctatgctgccgggaataataatggaacttcggtcgaggacggccagataccagaagtgatcttttatacttag

SEQ ID NO: 195141 - DNA, 1578 bp, Artificial Sequence
  derived and/or modified sequence
atggctgctgggggcagcggcggccgggccagctgccccccaggagtgggcgtgggccctggcaccggcggcagccctggccccagcgccaatgctgctgccaccccagcccctggaaatgctgctgctgctgctgctgctgctgctgctgctgctgctgcccctggccccaccccaccagcccctcctggccctggaacagatgcccaggccgccggggctgagagagctgaggaggccgccggccctggagctgctgccctgcagcgggaggccgcctacaactggcaggccagcaagcccaccgtgcaggagagatttgccttcctgttcaacaatgaggtgctgtgtgatgtgcacttcctggtgggcaagggcctgagcagccagaggatcccagcccacagatttgtgctggccgtgggcagcgctgtgtttgatgccatgtttaatggaggcatggccaccaccagcacagaaattgagctgcctgatgtggagcctgctgccttcctggccctgctgaagttcctgtacagtgatgaggtgcagatcggccctgagaccgtgatgaccaccctgtacacagccaagaagtatgctgtgcctgccctggaggcccactgtgtggagttcctgaagaagaacctgcgggctgacaatgccttcatgctgctgacccaggcccggctgtttgatgagccccagctggccagcctgtgcctggagaacatcgacaagaacacagcagatgccatcacagctgagggcttcacagacatcgacctggacaccctggtggccgtgctggagcgggacaccctgggcatccgggaggtgcggctcttcaatgctgtggtgcgctggagcgaggccgagtgccagaggcagcagctgcaggtgaccccagagaacagaaggaaggtgctgggcaaggccctgggcctcatccgcttccccctgatgaccatcgaggagtttgctgctggccctgcccagagcggcatcctggtggaccgggaggtggtgtccctcttcctgcacttcaccgtgaaccccaagccccgggtggagttcatcgaccggccccgctgctgcctgcggggcaaggaatgttccatcaaccgcttccagcaggtggagagccgctggggctacagcggcaccagtgaccgcatccgcttctctgtgaacaagaggatctttgtggtgggcttcggcctgtatggcagcatccacggccccacagactaccaggtgaacatccagatcatccacacagacagcaacacagtgctgggccagaatgacaccggcttcagctgtgatggcagcgccagcaccttccgggtgatgttcaaggagcctgtggaggtgctgcccaacgtgaactacacagcctgtgccaccctgaagggccctgacagccactacggcaccaagggcctgaggaaggtgacccatgagagccccaccactggagccaagacctgcttcaccttctgctacgccgccggcaacaacaacggcacctctgtggaggatggccagatccctgaggtgatcttctacacctag

SEQ ID NO: 195142 - DNA, 1578 bp, Artificial Sequence
  derived and/or modified sequence
atggccgccggcggcagcggcggccgggccagctgcccccccggcgtcggagtgggacccgggactggcgggagccccggcccctccgctaacgcagccgcaaccccagcccccggcaacgcagctgctgccgcggcagctgcagcagcagctgctgcagcgccaggacctacacctcctgccccaccggggccgggcaccgatgcacaggccgcaggagctgagcgggcagaggaggccgctgggcccggggcagcggctctgcagagggaggccgcctataattggcaggcctccaagcctacagttcaagagagatttgctttcctgttcaataacgaagtcctgtgcgatgtacacttcctggtgggaaaaggtctgtccagccagcgtatccctgctcaccgcttcgtgcttgccgtgggtagcgcggtatttgatgctatgttcaacggtgggatggcgaccaccagcactgagatcgagctgccagacgtcgagccagctgcgttcctcgccctgctgaagttcttgtacagtgatgaggtacagatcggacctgagacagtaatgacaactttgtacaccgccaaaaagtacgctgtgcccgctctggaagcccactgcgtggaattccttaagaagaacttgagagctgataacgctttcatgctgctaactcaagcgcggcttttcgatgaaccccagttagcctccctgtgcttggaaaacatcgacaaaaatacagcagacgccatcacagccgaaggctttacagatatcgatctggatacacttgttgccgttcttgagcgagatacgctggggatacgagaagtaagactgttcaacgccgtggtgcggtggtcggaggccgagtgccaacggcagcaactgcaggttaccccggaaaaccgccggaaagtccttggaaaggcccttgggctgatcaggttcccgttgatgaccatcgaggaatttgctgccggccctgctcagtccgggatcctcgtcgacagagaggtagtgagcctctttctccatttcaccgtaaaccctaaaccaagggtggagtttatcgataggccacgctgctgtcttagaggaaaagaatgctctatcaaccggttccagcaggtcgagagtaggtggggttatagtggcacctccgataggattcggttctccgtgaacaagcggatcttcgtggtcgggtttgggttgtacgggagcattcacgggccaactgattaccaggtaaacattcagatcatccacactgacagcaatactgtactgggacagaatgataccggcttttcatgtgatggctcagcctccacctttagggttatgttcaaggagcctgtggaagtgctgccgaatgttaactacaccgcctgcgccactcttaagggcccggattctcattacggcacgaagggcttgcggaaagtaacacacgagagccccactacaggggctaaaacgtgcttcaccttttgctacgccgccggaaataataacgggaccagcgtagaagacggccaaatccccgaggtaatattctacacctag

SEQ ID NO: 195143 - DNA, 1578 bp, Artificial Sequence
  derived and/or modified sequence
atggcagctgggggttccgggggacgcgctagctgtcctccaggcgtcggtgtcggaccaggaacaggtggtagcccaggcccttctgcgaacgcagctgctactccggcacctggcaacgcagctgccgctgctgcagccgcagccgctgctgccgctgccccaggacctacacctcctgctcccccaggccctgggactgatgctcaggcagccggagctgagagagccgaagaggctgctgggccaggcgctgcggcactgcagcgggaagcggcttataattggcaggcctcaaagcccactgtgcaggagcgctttgccttcctcttcaataacgaagtgctgtgcgacgtgcattttctggtgggcaaggggttatctagccagcggattccagcacatcggtttgtgctggccgtcggatctgctgttttcgacgccatgttcaacggaggaatggctactacctctacggagatagagttgcccgatgtggaacccgctgctttccttgcacttctgaagtttctttactccgatgaagtccagattggccctgagacagtgatgaccaccctgtacacagcgaaaaagtatgctgtgcccgcattagaggctcattgcgtggaattcctgaagaaaaacctgcgcgctgacaatgcatttatgctgctcacgcaagcacggctgttcgatgaaccccagcttgccagcctgtgtctggaaaacatcgacaaaaataccgcggatgccatcaccgcagaagggttcaccgacatcgacctggatacactggtggcagtccttgagcgcgataccctcggcatccgcgaagtacgcctcttcaacgcagttgtgcggtggtcagaagctgaatgccagaggcagcagctccaggtgactcccgaaaaccgacgtaaggtgctggggaaagccctgggtttaatccgctttccactgatgacaatcgaggaatttgcagcagggccagcccagtcaggaattctggttgaccgcgaggttgtatccctgtttctgcattttacggtaaatccaaaaccgagagtcgagtttattgatagaccgagatgctgtcttcggggaaaggagtgcagcataaatagatttcagcaggtggagtctaggtggggatattcgggcactagcgaccgaattaggttcagcgttaacaagagaatcttcgtggtggggttcgggttgtatggctcgatccacggaccgactgattatcaggtgaacattcagattatccataccgactcaaatacggtgctcgggcagaacgataccggcttctcctgtgatgggagcgcgtctacattccgcgtcatgttcaaagaaccggtggaagtcctcccaaatgtgaattacacggcatgcgccacgctgaaggggcctgatagccattacgggaccaagggactgagaaaagtcacgcatgaaagtcctactaccggggcaaaaacctgcttcacgttctgttacgcagccggaaacaataacggtactagtgttgaagatggacaaatccccgaggtgatcttttatacatag

SEQ ID NO: 195144 - DNA, 2618 bp, Artificial Sequence
  derived and/or modified sequence
atggcggcgggtgggagcggcgggcgtgcgtcgtgcccgccgggggtcggggtcggcccgggcacggggggcagtcccgggcccagcgccaacgccgccgccaccccggcccccggcaacgcggccgccgccgccgccgccgccgccgccgccgccgccgcccctgggccgacgccgcccgccccgccgggccccgggacagacgcgcaggccgcgggcgcggagcgggcggaggaggcggcgggcccgggggcggcggcgctgcagcgcgaggccgcgtacaactggcaggccagcaagcccaccgtgcaggagcgcttcgccttcctcttcaacaacgaggtgctgtgcgacgtgcacttcctggtgggcaaggggctcagctcgcagcgcatccccgcgcacaggttcgtgctggccgtgggcagcgccgtctttgatgccatgttcaacgggggaatggccacaacatccacggagattgagctgcccgacgtggaacccgctgccttcctcgcactgctcaagtttctctactcggacgaggtgcagattggcccggagacggtgatgaccacgctatacaccgccaagaagtacgcggtgccagcgctcgaggcccattgcgtggagttcctgaagaagaacctgcgagccgacaacgccttcatgctgctcacgcaggcgcgactcttcgatgaaccgcagctggccagcctgtgcctggagaacatcgacaaaaacactgcagacgccatcaccgcggagggcttcaccgacattgacctggacacgctggtggctgtcctggagcgcgacacactgggcatccgtgaggtgcggctgttcaatgccgttgtccgctggtccgaggccgagtgtcagcggcagcagctgcaggtgacgccagagaacaggcggaaggttctgggcaaggccctgggcctcattcgcttcccgctcatgaccatcgaggagttcgctgcaggtcccgcacagtcgggcatcctggtggaccgcgaggtggtcagcctcttcctgcacttcaccgtcaaccccaagccacgagtggagttcattgaccggccccgctgctgcctgcgtgggaaggagtgcagcatcaaccgcttccagcaggtggagagtcgctggggctacagcgggaccagtgaccgcatcaggttctcagtcaacaagcgcatcttcgtggtgggatttgggctgtatggatccatccacgggcccaccgactaccaagtgaacatccagattattcacaccgatagcaacaccgtcttgggccagaacgacacgggcttcagctgcgacggctcagccagcaccttccgcgtcatgttcaaggagccggtggaggtgctgcccaacgtcaactacacggcctgtgccacgctcaagggcccagactcccactacggcaccaaaggcctgcgcaaggtgacacacgagtcgcccaccacgggcgccaagacctgcttcaccttttgctacgcggccgggaacaacaatggcacatccgtggaggacggccagatccccgaggtcatcttctacacctaggctgcccgacaccgacaccgccctccctccgtggggatagccgcagccccaggccatcatctgctgctggggcccccccaccacgcggtgccaggcccagtgtcccccaggccgtctgtccactccatgccacctttctcagcatcaggacggggttgccctgtgttcaccacgagtgtggctgctggatcagggcagccggggaggtggccaggccagtggccaggccctgtggagacaatccctcaggactagggacagggctgtgccggcctgggccagggcccacggacccgcagctcagggcgcctgcccacgtcgtctgccggcggtgcgccgcgggcgtccctcgcgtctcttcactgcacattgcaatgcatttgcgattcccatttctctgctaggagccagcctgggtggcgctgctcccagagccgtgggtcccagaccttgcgttccttttgttcctgtccgtttatcaggacacgggccccacctgtcacgtgcccgaggccacccaagcccagcctgcggggcgttcccactgcctggatgccggcttgagttctgcgcacgcaggattcagtgtggggacggcccctgccggataggcctagccctggcccaggtggtgagcggtttgcagtgtccgttctcatccacctgatgggcccagataaaggcccccgctgtccagcctccctggacggccctcgcggtccctgcagcccaagatgggactcagaccctgtgccccagagctcccctgccgcagaatggggccccagccggccccgaccgggtccaggagcactgctcgcctgtacatactgttgccctagcccacctggtgccgtgggagccacccccaggtgctgggggcacagcccctccccactccggccacgcccccacccaccccgcgtgtttctgccctgtgactcctggaacctgcgtcctccccaaagccatgggaggggtgtcctcctcagaccatgcccccagatgatttttttaaataaagaaacaaatgcacctgc

SEQ ID NO: 195145 - DNA, 1578 bp, Artificial Sequence
  derived and/or modified sequence
atggccgccggcggcagcggcggcagagccagctgcccccccggcgtgggcgtgggccccggcaccggcggcagccccggccccagcgccaacgccgccgccacccccgcccccggcaacgccgccgccgccgccgccgccgccgccgccgccgccgccgcccccggccccaccccccccgccccccccggccccggcaccgacgcccaggccgccggcgccgagagagccgaggaggccgccggccccggcgccgccgccctgcagagagaggccgcctacaactggcaggccagcaagcccaccgtgcaggagagattcgccttcctgttcaacaacgaggtgctgtgcgacgtgcacttcctggtgggcaagggcctgagcagccagagaatccccgcccacagattcgtgctggccgtgggcagcgccgtgttcgacgccatgttcaacggcggcatggccaccaccagcaccgagatcgagctgcccgacgtggagcccgccgccttcctggccctgctgaagttcctgtacagcgacgaggtgcagatcggccccgagaccgtgatgaccaccctgtacaccgccaagaagtacgccgtgcccgccctggaggcccactgcgtggagttcctgaagaagaacctgagagccgacaacgccttcatgctgctgacccaggccagactgttcgacgagccccagctggccagcctgtgcctggagaacatcgacaagaacaccgccgacgccatcaccgccgagggcttcaccgacatcgacctggacaccctggtggccgtgctggagagagacaccctgggcatcagagaggtgagactgttcaacgccgtggtgagatggagcgaggccgagtgccagagacagcagctgcaggtgacccccgagaacagaagaaaggtgctgggcaaggccctgggcctgatcagattccccctgatgaccatcgaggagttcgccgccggccccgcccagagcggcatcctggtggacagagaggtggtgagcctgttcctgcacttcaccgtgaaccccaagcccagagtggagttcatcgacagacccagatgctgcctgagaggcaaggagtgcagcatcaacagattccagcaggtggagagcagatggggctacagcggcaccagcgacagaatcagattcagcgtgaacaagagaatcttcgtggtgggcttcggcctgtacggcagcatccacggccccaccgactaccaggtgaacatccagatcatccacaccgacagcaacaccgtgctgggccagaacgacaccggcttcagctgcgacggcagcgccagcaccttcagagtgatgttcaaggagcccgtggaggtgctgcccaacgtgaactacaccgcctgcgccaccctgaagggccccgacagccactacggcaccaagggcctgagaaaggtgacccacgagagccccaccaccggcgccaagacctgcttcaccttctgctacgccgccggcaacaacaacggcaccagcgtggaggacggccagatccccgaggtgatcttctacacctag

SEQ ID NO: 195146 - protein, 855 aa, Artificial Sequence
  derived and/or modified sequence
MAALGVAEAVAAPHPAEGAETAEAVELSRALSRLLPGLEADSKPGRRRALEALRRALEEPGPAADPTAFQGPWARLLLPRLLRCLSDPAEGCRALAVHLLDLGLRRAARPRDALPRLLPALAARLAGPVPARRPPEACEELRLALVQLLGLAVDLCGAALAPHLDDALRALRCSLLDPFAAVRRESCSCAAALAQATPDHFHMQSESLIGPLMQTISHQHWKVRVAAIEATGAVIHFGNGKSVDDVLSHFAQRLFDDVPQVRRAVASVVGGWLLCLRDRYSFFHKLIPLLLSSLNDEVPEVRQLAASLWEDVGLQWQKENEEDLKDKLDFAPPTPPHYPPHERRPVLGCRELVFRNLSKILPALCHDITDWVVGTRVKSAQLLPVLLLHAEDHATQHLEVVLRTLFQACTDEEAAVVQSCTRSAELVGTFVSPEVFLKLILSTLKKTPSASGLLVLASAMRGCPREALQPHLAAIATELAQAHICQASENDLYLERLLLCVQALVSVCHEDCGVASLQLLDVLLTIVALAGATGLRDKAQETMDSLAMVEGVSSCQDLYRKHIGPLLERVTASHLDWTAHSPELLQFSVIVAQSGPALGEALPHVVPTLRACLQPSQDPQMRLKLFSILSTVLLRATDTINSQGQFPSYLETVTKDILAPNLQWHAGRTAAAIRTAAVSCLWALTSSEVLSAEQIRDVQETLMPQVLTTLEEDSKMTRLISCRIINTFLKTSGGMTDPEKLIRIYPELLKRLDDVSNDVRMAAASTLVTWLQCVKGANAKSYYQSSVQYLYRELLVHLDDPERAIQDAILEVLKEGSGLFPDLLVRETEAVIHKHRSATYCEQLLQHVQAVPATQ

SEQ ID NO: 195147 - protein, 843 aa, Artificial Sequence
  derived and/or modified sequence
MAALGVAEAVAAPHPAEGAETAEAVELSRALSRLLPGLEADSKPGRRRALEALRRALEEPGPAADPTAFQGPWARLLLPRLLRCLSDPAEGCRALAVHLLDLGLRRAARPRDALPRLLPALAARLAGPVPARRPPEACEELRLALVQLLGLAVDLCGAALAPHLDDALRALRCSLLDPFAAVRRESCSCAAALAQATPDHFHMQSESLIGPLMQTISHQHWKVRVAAIEATGAVIHFGNGKSVDDVLSHFAQRLFDDVPQVRRAVASVVGGWLLCLRDRYSFFHKLIPLLLSSLNDEVPEVRQLAASLWEDVGLQWQKENEEDLKDKLDFAPPTPPHYPPHERRPVLGCRELVFRNLSKILPALCHDITDWVVGTRVKSAQLLPVLLLHAEDHATQHLEVVLRTLFQACTDEEAAVVQSCTRSAELVGTFVSPEVFLKLILSTLKKTPSASGLLVLASAMRGCPREALQPHLAAIATELAQAHICQASENDLYLERLLLCVQALVSVCHEDCGVASLQLLDVLLTIVALAGATGLRDKAQETMDSLAMVEGVSSCQDLYRKHIGPLLERVTASHLDWTAHSPELLQFSVIVAQSGPALGEALPHVVPTLRACLQPSQDPQMRLKLFSILSTVLLRATDTINSQGQFPSYLETVTKDILAPNLQWHAGRTAAAIRTAAVSCLWALTSSEVLSAEQIRDVQETLMPQVLTTLEEDSKMTRLISCRIINTFLKTSGGMTDPEKLIRIYPELLKRLDDVSNDVRMAAASTLVTWLQCVKGANAKSYYQSSVQYLYRELLVHLDDPERAIQDAILDVPGSPSPSAMIGSFLRPPHPWRTVSQLNLFSS

SEQ ID NO: 195148 - protein, 601 aa, Artificial Sequence
  derived and/or modified sequence
MDSFSEVRRAVASVVGGWLLCLRDRYSFFHKLIPLLLSSLNDEVPEVRQLAASLWEDVGLQWQKENEEDLKDKLDFAPPTPPHYPPHERRPVLGCRELVFRNLSKILPALCHDITDWVVGTRVKSAQLLPVLLLHAEDHATQHLEVVLRTLFQACTDEEAAVVQSCTRSAELVGTFVSPEVFLKLILSTLKKTPSASGLLVLASAMRGCPREALQPHLAAIATELAQAHICQASENDLYLERLLLCVQALVSVCHEDCGVASLQLLDVLLTIVALAGATGLRDKAQETMDSLAMVEGVSSCQDLYRKHIGPLLERVTASHLDWTAHSPELLQFSVIVAQSGPALGEALPHVVPTLRACLQPSQDPQMRLKLFSILSTVLLRATDTINSQGQFPSYLETVTKDILAPNLQWHAGRTAAAIRTAAVSCLWALTSSEVLSAEQIRDVQETLMPQVLTTLEEDSKMTRLISCRIINTFLKTSGGMTDPEKLIRIYPELLKRLDDVSNDVRMAAASTLVTWLQCVKGANAKSYYQSSVQYLYRELLVHLDDPERAIQDAILEVLKEGSGLFPDLLVRETEAVIHKHRSATYCEQLLQHVQAVPATQ

SEQ ID NO: 195149 - DNA, 2568 bp, Artificial Sequence
  derived and/or modified sequence
atggccgccctgggcgtggccgaggccgtggccgccccccaccccgccgagggcgccgagaccgccgaggccgtggagctgagcagagccctgagcagactgctgcccggcctggaggccgacagcaagcccggcagaagaagagccctggaggccctgagaagagccctggaggagcccggccccgccgccgaccccaccgccttccagggcccctgggccagactgctgctgcccagactgctgagatgcctgagcgaccccgccgagggctgcagagccctggccgtgcacctgctggacctgggcctgagaagagccgccagacccagagacgccctgcccagactgctgcccgccctggccgccagactggccggccccgtgcccgccagaagaccccccgaggcctgcgaggagctgagactggccctggtgcagctgctgggcctggccgtggacctgtgcggcgccgccctggccccccacctggacgacgccctgagagccctgagatgcagcctgctggaccccttcgccgccgtgagaagagagagctgcagctgcgccgccgccctggcccaggccacccccgaccacttccacatgcagagcgagagcctgatcggccccctgatgcagaccatcagccaccagcactggaaggtgagagtggccgccatcgaggccaccggcgccgtgatccacttcggcaacggcaagagcgtggacgacgtgctgagccacttcgcccagagactgttcgacgacgtgccccaggtgagaagagccgtggccagcgtggtgggcggctggctgctgtgcctgagagacagatacagcttcttccacaagctgatccccctgctgctgagcagcctgaacgacgaggtgcccgaggtgagacagctggccgccagcctgtgggaggacgtgggcctgcagtggcagaaggagaacgaggaggacctgaaggacaagctggacttcgccccccccacccccccccactaccccccccacgagagaagacccgtgctgggctgcagagagctggtgttcagaaacctgagcaagatcctgcccgccctgtgccacgacatcaccgactgggtggtgggcaccagagtgaagagcgcccagctgctgcccgtgctgctgctgcacgccgaggaccacgccacccagcacctggaggtggtgctgagaaccctgttccaggcctgcaccgacgaggaggccgccgtggtgcagagctgcaccagaagcgccgagctggtgggcaccttcgtgagccccgaggtgttcctgaagctgatcctgagcaccctgaagaagacccccagcgccagcggcctgctggtgctggccagcgccatgagaggctgccccagagaggccctgcagccccacctggccgccatcgccaccgagctggcccaggcccacatctgccaggccagcgagaacgacctgtacctggagagactgctgctgtgcgtgcaggccctggtgagcgtgtgccacgaggactgcggcgtggccagcctgcagctgctggacgtgctgctgaccatcgtggccctggccggcgccaccggcctgagagacaaggcccaggagaccatggacagcctggccatggtggagggcgtgagcagctgccaggacctgtacagaaagcacatcggccccctgctggagagagtgaccgccagccacctggactggaccgcccacagccccgagctgctgcagttcagcgtgatcgtggcccagagcggccccgccctgggcgaggccctgccccacgtggtgcccaccctgagagcctgcctgcagcccagccaggacccccagatgagactgaagctgttcagcatcctgagcaccgtgctgctgagagccaccgacaccatcaacagccagggccagttccccagctacctggagaccgtgaccaaggacatcctggcccccaacctgcagtggcacgccggcagaaccgccgccgccatcagaaccgccgccgtgagctgcctgtgggccctgaccagcagcgaggtgctgagcgccgagcagatcagagacgtgcaggagaccctgatgccccaggtgctgaccaccctggaggaggacagcaagatgaccagactgatcagctgcagaatcatcaacaccttcctgaagaccagcggcggcatgaccgaccccgagaagctgatcagaatctaccccgagctgctgaagagactggacgacgtgagcaacgacgtgagaatggccgccgccagcaccctggtgacctggctgcagtgcgtgaagggcgccaacgccaagagctactaccagagcagcgtgcagtacctgtacagagagctgctggtgcacctggacgaccccgagagagccatccaggacgccatcctggaggtgctgaaggagggcagcggcctgttccccgacctgctggtgagagagaccgaggccgtgatccacaagcacagaagcgccacctactgcgagcagctgctgcagcacgtgcaggccgtgcccgccacccagtag

SEQ ID NO: 195150 - DNA, 2532 bp, Artificial Sequence
  derived and/or modified sequence
atggccgccctgggcgtggccgaggccgtggccgccccccaccccgccgagggcgccgagaccgccgaggccgtggagctgagcagagccctgagcagactgctgcccggcctggaggccgacagcaagcccggcagaagaagagccctggaggccctgagaagagccctggaggagcccggccccgccgccgaccccaccgccttccagggcccctgggccagactgctgctgcccagactgctgagatgcctgagcgaccccgccgagggctgcagagccctggccgtgcacctgctggacctgggcctgagaagagccgccagacccagagacgccctgcccagactgctgcccgccctggccgccagactggccggccccgtgcccgccagaagaccccccgaggcctgcgaggagctgagactggccctggtgcagctgctgggcctggccgtggacctgtgcggcgccgccctggccccccacctggacgacgccctgagagccctgagatgcagcctgctggaccccttcgccgccgtgagaagagagagctgcagctgcgccgccgccctggcccaggccacccccgaccacttccacatgcagagcgagagcctgatcggccccctgatgcagaccatcagccaccagcactggaaggtgagagtggccgccatcgaggccaccggcgccgtgatccacttcggcaacggcaagagcgtggacgacgtgctgagccacttcgcccagagactgttcgacgacgtgccccaggtgagaagagccgtggccagcgtggtgggcggctggctgctgtgcctgagagacagatacagcttcttccacaagctgatccccctgctgctgagcagcctgaacgacgaggtgcccgaggtgagacagctggccgccagcctgtgggaggacgtgggcctgcagtggcagaaggagaacgaggaggacctgaaggacaagctggacttcgccccccccacccccccccactaccccccccacgagagaagacccgtgctgggctgcagagagctggtgttcagaaacctgagcaagatcctgcccgccctgtgccacgacatcaccgactgggtggtgggcaccagagtgaagagcgcccagctgctgcccgtgctgctgctgcacgccgaggaccacgccacccagcacctggaggtggtgctgagaaccctgttccaggcctgcaccgacgaggaggccgccgtggtgcagagctgcaccagaagcgccgagctggtgggcaccttcgtgagccccgaggtgttcctgaagctgatcctgagcaccctgaagaagacccccagcgccagcggcctgctggtgctggccagcgccatgagaggctgccccagagaggccctgcagccccacctggccgccatcgccaccgagctggcccaggcccacatctgccaggccagcgagaacgacctgtacctggagagactgctgctgtgcgtgcaggccctggtgagcgtgtgccacgaggactgcggcgtggccagcctgcagctgctggacgtgctgctgaccatcgtggccctggccggcgccaccggcctgagagacaaggcccaggagaccatggacagcctggccatggtggagggcgtgagcagctgccaggacctgtacagaaagcacatcggccccctgctggagagagtgaccgccagccacctggactggaccgcccacagccccgagctgctgcagttcagcgtgatcgtggcccagagcggccccgccctgggcgaggccctgccccacgtggtgcccaccctgagagcctgcctgcagcccagccaggacccccagatgagactgaagctgttcagcatcctgagcaccgtgctgctgagagccaccgacaccatcaacagccagggccagttccccagctacctggagaccgtgaccaaggacatcctggcccccaacctgcagtggcacgccggcagaaccgccgccgccatcagaaccgccgccgtgagctgcctgtgggccctgaccagcagcgaggtgctgagcgccgagcagatcagagacgtgcaggagaccctgatgccccaggtgctgaccaccctggaggaggacagcaagatgaccagactgatcagctgcagaatcatcaacaccttcctgaagaccagcggcggcatgaccgaccccgagaagctgatcagaatctaccccgagctgctgaagagactggacgacgtgagcaacgacgtgagaatggccgccgccagcaccctggtgacctggctgcagtgcgtgaagggcgccaacgccaagagctactaccagagcagcgtgcagtacctgtacagagagctgctggtgcacctggacgaccccgagagagccatccaggacgccatcctggacgtgcccggcagccccagccccagcgccatgatcggcagcttcctgagacccccccacccctggagaaccgtgagccagctgaacctgttcagcagctag

SEQ ID NO: 195151 - DNA, 1806 bp, Artificial Sequence
  derived and/or modified sequence
atggacagcttcagcgaggtgagaagagccgtggccagcgtggtgggcggctggctgctgtgcctgagagacagatacagcttcttccacaagctgatccccctgctgctgagcagcctgaacgacgaggtgcccgaggtgagacagctggccgccagcctgtgggaggacgtgggcctgcagtggcagaaggagaacgaggaggacctgaaggacaagctggacttcgccccccccacccccccccactaccccccccacgagagaagacccgtgctgggctgcagagagctggtgttcagaaacctgagcaagatcctgcccgccctgtgccacgacatcaccgactgggtggtgggcaccagagtgaagagcgcccagctgctgcccgtgctgctgctgcacgccgaggaccacgccacccagcacctggaggtggtgctgagaaccctgttccaggcctgcaccgacgaggaggccgccgtggtgcagagctgcaccagaagcgccgagctggtgggcaccttcgtgagccccgaggtgttcctgaagctgatcctgagcaccctgaagaagacccccagcgccagcggcctgctggtgctggccagcgccatgagaggctgccccagagaggccctgcagccccacctggccgccatcgccaccgagctggcccaggcccacatctgccaggccagcgagaacgacctgtacctggagagactgctgctgtgcgtgcaggccctggtgagcgtgtgccacgaggactgcggcgtggccagcctgcagctgctggacgtgctgctgaccatcgtggccctggccggcgccaccggcctgagagacaaggcccaggagaccatggacagcctggccatggtggagggcgtgagcagctgccaggacctgtacagaaagcacatcggccccctgctggagagagtgaccgccagccacctggactggaccgcccacagccccgagctgctgcagttcagcgtgatcgtggcccagagcggccccgccctgggcgaggccctgccccacgtggtgcccaccctgagagcctgcctgcagcccagccaggacccccagatgagactgaagctgttcagcatcctgagcaccgtgctgctgagagccaccgacaccatcaacagccagggccagttccccagctacctggagaccgtgaccaaggacatcctggcccccaacctgcagtggcacgccggcagaaccgccgccgccatcagaaccgccgccgtgagctgcctgtgggccctgaccagcagcgaggtgctgagcgccgagcagatcagagacgtgcaggagaccctgatgccccaggtgctgaccaccctggaggaggacagcaagatgaccagactgatcagctgcagaatcatcaacaccttcctgaagaccagcggcggcatgaccgaccccgagaagctgatcagaatctaccccgagctgctgaagagactggacgacgtgagcaacgacgtgagaatggccgccgccagcaccctggtgacctggctgcagtgcgtgaagggcgccaacgccaagagctactaccagagcagcgtgcagtacctgtacagagagctgctggtgcacctggacgaccccgagagagccatccaggacgccatcctggaggtgctgaaggagggcagcggcctgttccccgacctgctggtgagagagaccgaggccgtgatccacaagcacagaagcgccacctactgcgagcagctgctgcagcacgtgcaggccgtgcccgccacccagtag

SEQ ID NO: 195152 - DNA, 2568 bp, Artificial Sequence
  derived and/or modified sequence
atggccgcgctgggagtggccgaagctgtggctgccccacaccccgcggagggagcagaaacagcagaagccgtggagctgtcgagggcactatcccgactgctaccaggtctcgaagccgactcaaaaccgggccgacggagggcattggaagcgcttaggagagcgttagaggagcctgggccagccgccgatccaacagcattccagggcccatgggccagactccttctcccccggctgctgaggtgtctatctgaccccgccgaagggtgcagggcgcttgctgtccatctgcttgacctcggactcaggagagccgcccggcccagggatgcactgccgagactcctgcccgccctggcagctagacttgctggcccggtgcctgcaaggcggcctcccgaggcgtgcgaagaactgcgcttagccctggtccagctgttaggactggccgtggatttgtgcggggcagcgctggcgccgcatctggacgatgctctcagggcactgagatgttccttgctggaccccttcgcagccgtcaggagggagagttgttcttgtgccgcagctctagctcaggctacccctgaccattttcacatgcagagtgaatccctgataggccccctcatgcagacgatcagccaccagcactggaaggtgagagtggctgcgatcgaagctactggggctgtgattcactttggaaacggcaaatccgtggatgacgtgctgtcccactttgctcaaagattgttcgacgacgtgccacaagtccgcagagcggtcgccagcgtagtaggcggatggttattgtgtttgagagatagatactccttctttcataagcttatcccactgctcctgagcagtctgaatgatgaggttcccgaagttaggcagctcgccgcgagcctgtgggaggatgtggggctgcaatggcaaaaagagaatgaggaggacctgaaggataaactggattttgcccctcccacccctcctcactatccgccacacgaacgcagacctgtgctcggatgtcgtgagctagtttttagaaacctcagcaagatactgcctgctctgtgccatgatatcaccgactgggttgtcggtactagagttaagagcgcccaactgcttcctgttttgttattgcacgcagaagatcacgccacacagcacctggaggttgtccttcgcaccctttttcaagcttgcactgatgaggaagctgccgtcgttcaatcctgcaccaggagcgctgagctggttggaacattcgtgtcccctgaggtttttctgaaactgatcctttccactcttaagaagacacctagcgccagcggtctgctggttctggcatcagccatgaggggctgccctcgtgaggctctgcagcctcatctagccgcgatcgctacagagctggcccaggcccatatatgtcaggcttctgaaaatgatctttatctcgaaaggctgcttctctgcgttcaggccctggtgtcggtgtgccatgaagactgtggcgtagcaagtttgcagctgctcgacgtgctgctcactatcgtcgcattagcaggagccacaggtctcagggacaaggcccaggaaacaatggacagcctggccatggtcgaaggagtgtcatcttgtcaggacttgtaccggaaacacataggacccttactcgagagggtgaccgctagccacctggactggacagcccactcaccagagcttttgcaattctccgttatcgtcgcacagtcggggcctgccctcggggaggcccttcctcatgtggtccctaccctgagagcatgcctgcaaccgtcacaagatccccagatgcggcttaaactgttctccatcctttcgacagtgttgctccgagccactgataccatcaactcccagggccagtttccttcttacctggagaccgttacaaaggatatactcgcgcccaacctgcagtggcatgctgggcgcactgccgccgctatccggaccgccgccgtttcgtgtctgtgggcacttacctcttccgaagtgctaagcgcggaacagatacgggacgtacaggagacccttatgccacaagtcctgactactctggaagaggattcaaagatgacacgcctgatctcatgccgaattatcaacacattcctaaaaacctcgggagggatgacagatccagaaaagcttatcaggatctatcctgagcttctgaaaagactggacgatgtcagtaacgatgtcaggatggcggcagcttccaccctagtaacgtggttgcagtgcgtgaagggggcgaatgccaagagctactatcagtcatccgtgcagtatttgtatagggagcttctggttcacctcgatgatcccgaaagggcgatccaggatgccatcttggaagtcttgaaggaagggagcgggttattcccagacctcctggtgagagaaaccgaggccgttatccacaaacaccgcagcgcaacttactgtgagcagctgttgcagcacgtgcaagctgtgcccgctacacagtag

SEQ ID NO: 195153 - DNA, 2532 bp, Artificial Sequence
  derived and/or modified sequence
atggcagcactgggcgtcgcggaggcagtggctgcccctcacccagcagagggcgccgagaccgccgaggcagtggagctttccagggcgctctccaggctgctgcctggcctcgaggccgatagcaaaccggggagacgcagggccttggaagccctaaggcgcgcattggaggagccaggcccggccgcagatccaactgccttccaggggccttgggcacgtctcctgctccctcgcctgctcaggtgtttgagcgaccccgccgagggatgtcgcgcactggcagtgcacctgttagatctcggcctccgcagagcagcacggccaagggacgccctgcctcggcttctccccgccctggccgccaggctggccgggcctgttccagcaagacgcccacccgaggcttgcgaagagctcaggctggctctggtgcaacttctgggcttggctgtcgacctgtgcggcgccgcacttgcacctcacctcgatgatgccctcagagctctcagatgttccctgctggaccccttcgcggccgtccggcgggagagctgtagttgtgccgctgccctagcccaagccactcccgaccatttccatatgcagtctgagagcttgatcggacccctgatgcaaacaatttctcatcaacactggaaggtcagggtggccgcgattgaggccacaggcgcagtgattcactttgggaacggaaagagtgtggatgacgtactgtcccacttcgcgcagagactgttcgacgacgtgcctcaggtgcgccgggccgtggcctctgtggtgggtgggtggctcctctgccttcgggataggtacagctttttccacaagcttattccactgttgttgagcagtctgaacgatgaggtccccgaagtgagacaactggccgcttctctctgggaggacgtcggcttgcaatggcaaaaagaaaatgaggaagatttgaaggacaagctggactttgcaccaccgacacccccccattaccctccccatgagaggcggccggtgttggggtgtagagaactggtcttcaggaacctgagtaaaattttaccagcgctgtgtcacgatattacagactgggtggtaggaaccagagtgaagagtgcccagttactcccagtgctgttgctgcacgcggaagaccatgcgacacaacaccttgaagttgttctgaggactctgtttcaggcctgtactgatgaggaggcagctgtggtacaatcctgcacgcgttctgcagagttagtaggtacatttgtgtccccagaagtgttccttaagttaatattgagcaccctgaaaaagacaccgtcagcttccggcctacttgtgttagctagcgcaatgcggggatgtccccgtgaggctcttcagccccatctggctgccatcgccaccgaactggctcaagctcacatttgtcaggcatccgagaacgacctgtatcttgagcgtctacttctgtgtgtccaggccctggtgtctgtctgccacgaggactgtggagttgcaagtctgcagctcctcgatgtgctcctcaccattgtagccctcgccggtgcaaccggacttcgagataaggctcaggaaaccatggatagcctagctatggtggaaggagtgagtagttgccaagatctgtataggaagcacattggtcctctcctggagagggtcaccgcttcccacctcgactggacagcgcactctccagaactgttgcaatttagcgtcattgtagcccaatcgggacctgccctgggagaagccctgcctcatgtcgtccctaccctgcgcgcctgcttacagccatcacaagacccacagatgcggctgaagctgtttagtattctgtctactgtgctgctacgggcaactgacacaatcaactcccagggccaattcccaagctatctggagacggtcacaaaggacattctagcccccaacctgcagtggcatgccggacgaacagcagccgcgattaggacagcagcagtctcttgtctctgggcactaaccagctctgaagtgctgtccgccgaacaaatcagagatgtccaggaaaccctgatgccgcaggtcctcaccacactcgaggaagatagcaagatgacacggttaatatcatgccgaatcatcaacacatttcttaagacaagtggcggtatgacggatccggagaagctgattcgcatctatcccgagctcctcaagcgactggacgatgtttccaacgacgtgcgcatggccgctgccagcacgctggtaacatggcttcagtgcgtgaaaggggcaaacgctaaaagctattatcagagcagcgtccagtacctgtacagggagctgctggtgcacctggatgaccctgagcgcgccatccaagacgctatcctggatgtgcccggctccccttctccctcagccatgataggctcgtttctgcgcccccctcatccgtggaggacagtctcccagctcaatttattttcgtcatag

SEQ ID NO: 195154 - DNA, 1806 bp, Artificial Sequence
  derived and/or modified sequence
atggacagcttctcagaggtccggagagccgtcgcctctgtggttggggggtggctgttgtgcctgagggatcgatatagtttctttcataagttaatacctctgcttctcagcagcttgaacgacgaggtgcccgaagtgcggcagctcgccgcatcactgtgggaagacgtcggcctgcagtggcaaaaagaaaacgaagaagacttaaaggataagctagattttgccccaccgacaccaccacattatcctcctcacgaacgccgccccgttctggggtgccgtgaattggtgtttagaaaccttagcaagattcttcccgccctgtgccatgacattactgactgggtggtggggacccgggtcaaatccgctcagctgctccccgtgctgcttctgcatgccgaggatcacgccacccagcacctcgaagtggttctgcgcacgctgtttcaagcatgcactgatgaggaggcagcagttgtccagagctgcacccgcagtgccgagctggtgggcacgttcgtgtcacccgaggtctttctcaagctgatcctttcaacactgaaaaaaactcccagcgcaagcgggctgttagtactcgcatcagccatgcgtggatgcccccgcgaagctctccagccccatctggctgcaatcgccaccgagttagcccaggcccatatttgccaagcctcagaaaacgacctttacctggaaaggctgctcctctgcgtgcaggctctggtcagcgtctgtcatgaggactgcggtgtagctagtttgcagcttctggatgttctacttactatagtggctctcgccggcgccacgggtcttcgagataaagcccaggaaaccatggatagtctcgccatggtagagggcgtctcctcctgtcaagatctctaccgaaagcatattggccccttgctggaacgggttactgctagccacctcgactggaccgcccattcccccgagctgctgcagtttagcgtaatcgtggcccagtccggtccagcactgggggaggctttgccacatgttgtgcccactctgcgggcttgccttcaacctagccaggatccccagatgaggctcaagcttttcagtatcctgagcaccgtgctactccgggcaactgatactatcaatagccagggccagttccccagctatctggagacagtcaccaaggatattttggcacccaacctgcagtggcacgcaggcagaactgctgctgccattaggactgcggccgtatcctgcttatgggctctgacctcatcagaggtgctgtccgcagagcagatacgagacgtgcaggagactctgatgccgcaagtcctgactacattggaagaggattcaaagatgactcggctaatctcctgccggataattaataccttcctgaagacgagcggaggcatgactgaccctgaaaagctaatcaggatctatcccgagctgttaaaaagactggacgatgtcagcaacgacgtgagaatggccgctgcctctactctcgtaacctggttacagtgcgtcaagggggctaatgcaaagtcttactatcagtcttccgtacaatatctctacagggagctgctagtccacttggacgacccggagcgagctattcaagatgccatcctcgaggtgctgaaggaggggtcaggcctgtttcccgatcttttggtgagggagactgaagcagtcatccataaacacaggtccgcaacctactgcgaacagctcttgcaacatgtgcaggccgtcccagccactcagtag

SEQ ID NO: 195155 - DNA, 2568 bp, Artificial Sequence
  derived and/or modified sequence
atggccgccctgggcgtggccgaggccgtggccgccccccaccctgctgagggcgctgagacagctgaggccgtggagctgagccgggccctgagccggctgctgcccggcctggaggccgacagcaagccaggaagaagaagagccctggaggccctgcggcgggccctggaggagcccggccctgctgctgaccccacagccttccagggcccctgggcccggctgctgctgccccggctgctgcgctgcctgagtgaccctgctgagggctgccgggccctggccgtgcacctgctggacctgggcctgcggcgggccgcccggcccagagatgccctgccccggctgctgcctgccctggccgcccggctggccggccctgtgcctgcccggcggcccccagaggcctgtgaggagctgcggctggccctggtgcagctgctgggcctggccgtggacctgtgtggggccgccctggccccccacctggatgatgccctgcgggccctgcgctgcagcctgctggacccctttgctgctgtgagaagagagagctgcagctgtgccgccgccctggcccaggccaccccagaccacttccacatgcagagcgagagcctgattggccccctgatgcagaccatcagccaccagcactggaaggtgcgggtggccgccatcgaggccactggagctgtgatccactttggaaatggcaagtctgtggatgatgtgctgagccactttgcccagaggctgtttgatgatgtgccccaggtgcggcgggctgtggcctctgtggtgggcggctggctgctgtgcctgcgggaccgctacagcttcttccacaagctgatccccctgctgctgagcagcctgaatgatgaggtgcctgaggtgcggcagctggccgccagcctgtgggaggatgtgggcctgcagtggcagaaggaaaatgaggaggacctgaaggacaagctggactttgccccacccaccccaccccactacccacctcatgaaagaagacctgtgctgggctgccgggagctggtgttcaggaacctgagcaagatcctgcctgccctgtgccacgacatcacagactgggtggtgggcaccagggtgaagagcgcccagctgctgcctgtgctgctgctgcacgcagaagatcatgccacccagcacctggaggtggtgctgcggaccctcttccaggcctgcacagatgaggaggccgctgtggtgcagagctgcaccaggtctgctgagctggtgggcacctttgtgtccccagaggtgttcctgaagctgatcctgagcaccctgaagaagaccccatctgccagcggcctgctggtgctggccagcgccatgaggggctgcccccgggaggccctgcagccccacctggccgccatcgccacagagctggcccaggcccacatctgccaggcctctgaaaatgacctgtacctggagcggctgctgctgtgtgtgcaggccctggtgtctgtgtgccacgaggactgtggggtggccagcctgcagctgctggatgtgctgctgaccatcgtggccctggccggggccaccggcctgcgggacaaggcccaggagaccatggacagcctggccatggtggagggcgtgagcagctgccaggacctgtacaggaagcacatcggccccctgctggagcgggtgacagccagccacctggactggacagcccacagccctgagctgctgcagttcagcgtcatcgtggcccagagcggccctgccctgggggaggccctgccccacgtggtgcccaccctgcgggcctgcctgcagcccagccaggacccccagatgaggctgaagctgttcagcatcctgagcacagtgctgctgcgggccacagacaccatcaacagccagggccagttccccagctacctggagaccgtgaccaaggacatcctggcccccaacctgcagtggcacgccggccgcacagctgctgccatcagaacagctgctgtgtcctgcctgtgggccctgaccagcagcgaggtgctgtctgctgagcagatcagagatgtgcaggagaccctgatgccccaggtgctgaccaccctggaggaggacagcaagatgaccaggctcatcagctgccgcatcatcaacaccttcctgaagaccagcggcggcatgacagatcctgagaagctgatccgcatctacccagagctgctgaagaggctggatgatgtgtccaatgatgtgaggatggctgctgccagcaccctggtgacctggctgcagtgtgtgaagggggccaatgccaagagctactaccagagctctgtgcagtacctgtaccgggagctgctggtgcacctggatgatcctgagcgggccatccaggatgccatcctggaggtgctgaaggagggcagcggcctcttcccagacctgctggtgcgggagacagaggccgtcatccacaagcacaggtctgccacctactgtgagcagctgctgcagcacgtgcaggccgtgcctgccacccagtag

SEQ ID NO: 195156 - DNA, 2532 bp, Artificial Sequence
  derived and/or modified sequence
atggccgccctgggcgtggccgaggccgtggccgccccccaccctgctgagggcgctgagacagctgaggccgtggagctgagccgggccctgagccggctgctgcccggcctggaggccgacagcaagccaggaagaagaagagccctggaggccctgcggcgggccctggaggagcccggccctgctgctgaccccacagccttccagggcccctgggcccggctgctgctgccccggctgctgcgctgcctgagtgaccctgctgagggctgccgggccctggccgtgcacctgctggacctgggcctgcggcgggccgcccggcccagagatgccctgccccggctgctgcctgccctggccgcccggctggccggccctgtgcctgcccggcggcccccagaggcctgtgaggagctgcggctggccctggtgcagctgctgggcctggccgtggacctgtgtggggccgccctggccccccacctggatgatgccctgcgggccctgcgctgcagcctgctggacccctttgctgctgtgagaagagagagctgcagctgtgccgccgccctggcccaggccaccccagaccacttccacatgcagagcgagagcctgattggccccctgatgcagaccatcagccaccagcactggaaggtgcgggtggccgccatcgaggccactggagctgtgatccactttggaaatggcaagtctgtggatgatgtgctgagccactttgcccagaggctgtttgatgatgtgccccaggtgcggcgggctgtggcctctgtggtgggcggctggctgctgtgcctgcgggaccgctacagcttcttccacaagctgatccccctgctgctgagcagcctgaatgatgaggtgcctgaggtgcggcagctggccgccagcctgtgggaggatgtgggcctgcagtggcagaaggaaaatgaggaggacctgaaggacaagctggactttgccccacccaccccaccccactacccacctcatgaaagaagacctgtgctgggctgccgggagctggtgttcaggaacctgagcaagatcctgcctgccctgtgccacgacatcacagactgggtggtgggcaccagggtgaagagcgcccagctgctgcctgtgctgctgctgcacgcagaagatcatgccacccagcacctggaggtggtgctgcggaccctcttccaggcctgcacagatgaggaggccgctgtggtgcagagctgcaccaggtctgctgagctggtgggcacctttgtgtccccagaggtgttcctgaagctgatcctgagcaccctgaagaagaccccatctgccagcggcctgctggtgctggccagcgccatgaggggctgcccccgggaggccctgcagccccacctggccgccatcgccacagagctggcccaggcccacatctgccaggcctctgaaaatgacctgtacctggagcggctgctgctgtgtgtgcaggccctggtgtctgtgtgccacgaggactgtggggtggccagcctgcagctgctggatgtgctgctgaccatcgtggccctggccggggccaccggcctgcgggacaaggcccaggagaccatggacagcctggccatggtggagggcgtgagcagctgccaggacctgtacaggaagcacatcggccccctgctggagcgggtgacagccagccacctggactggacagcccacagccctgagctgctgcagttcagcgtcatcgtggcccagagcggccctgccctgggggaggccctgccccacgtggtgcccaccctgcgggcctgcctgcagcccagccaggacccccagatgaggctgaagctgttcagcatcctgagcacagtgctgctgcgggccacagacaccatcaacagccagggccagttccccagctacctggagaccgtgaccaaggacatcctggcccccaacctgcagtggcacgccggccgcacagctgctgccatcagaacagctgctgtgtcctgcctgtgggccctgaccagcagcgaggtgctgtctgctgagcagatcagagatgtgcaggagaccctgatgccccaggtgctgaccaccctggaggaggacagcaagatgaccaggctcatcagctgccgcatcatcaacaccttcctgaagaccagcggcggcatgacagatcctgagaagctgatccgcatctacccagagctgctgaagaggctggatgatgtgtccaatgatgtgaggatggctgctgccagcaccctggtgacctggctgcagtgtgtgaagggggccaatgccaagagctactaccagagctctgtgcagtacctgtaccgggagctgctggtgcacctggatgatcctgagcgggccatccaggatgccatcctggatgtgcccggcagccccagccccagcgccatgattggcagcttcctgcggcccccccacccctggaggacagtgtcccagctgaacctcttcagcagctag

SEQ ID NO: 195157 - DNA, 1806 bp, Artificial Sequence
  derived and/or modified sequence
atggacagcttcagcgaggtgcggcgggctgtggcctctgtggtgggcggctggctgctgtgcctgcgggaccgctacagcttcttccacaagctgatccccctgctgctgagcagcctgaatgatgaggtgcctgaggtgcggcagctggccgccagcctgtgggaggatgtgggcctgcagtggcagaaggaaaatgaggaggacctgaaggacaagctggactttgccccacccaccccaccccactacccacctcatgaaagaagacctgtgctgggctgccgggagctggtgttcaggaacctgagcaagatcctgcctgccctgtgccacgacatcacagactgggtggtgggcaccagggtgaagagcgcccagctgctgcctgtgctgctgctgcacgcagaagatcatgccacccagcacctggaggtggtgctgcggaccctcttccaggcctgcacagatgaggaggccgctgtggtgcagagctgcaccaggtctgctgagctggtgggcacctttgtgtccccagaggtgttcctgaagctgatcctgagcaccctgaagaagaccccatctgccagcggcctgctggtgctggccagcgccatgaggggctgcccccgggaggccctgcagccccacctggccgccatcgccacagagctggcccaggcccacatctgccaggcctctgaaaatgacctgtacctggagcggctgctgctgtgtgtgcaggccctggtgtctgtgtgccacgaggactgtggggtggccagcctgcagctgctggatgtgctgctgaccatcgtggccctggccggggccaccggcctgcgggacaaggcccaggagaccatggacagcctggccatggtggagggcgtgagcagctgccaggacctgtacaggaagcacatcggccccctgctggagcgggtgacagccagccacctggactggacagcccacagccctgagctgctgcagttcagcgtcatcgtggcccagagcggccctgccctgggggaggccctgccccacgtggtgcccaccctgcgggcctgcctgcagcccagccaggacccccagatgaggctgaagctgttcagcatcctgagcacagtgctgctgcgggccacagacaccatcaacagccagggccagttccccagctacctggagaccgtgaccaaggacatcctggcccccaacctgcagtggcacgccggccgcacagctgctgccatcagaacagctgctgtgtcctgcctgtgggccctgaccagcagcgaggtgctgtctgctgagcagatcagagatgtgcaggagaccctgatgccccaggtgctgaccaccctggaggaggacagcaagatgaccaggctcatcagctgccgcatcatcaacaccttcctgaagaccagcggcggcatgacagatcctgagaagctgatccgcatctacccagagctgctgaagaggctggatgatgtgtccaatgatgtgaggatggctgctgccagcaccctggtgacctggctgcagtgtgtgaagggggccaatgccaagagctactaccagagctctgtgcagtacctgtaccgggagctgctggtgcacctggatgatcctgagcgggccatccaggatgccatcctggaggtgctgaaggagggcagcggcctcttcccagacctgctggtgcgggagacagaggccgtcatccacaagcacaggtctgccacctactgtgagcagctgctgcagcacgtgcaggccgtgcctgccacccagtag

SEQ ID NO: 195158 - DNA, 3410 bp, Artificial Sequence
  derived and/or modified sequence
tgaccggcgacgcgggcaagatggcggcgctgggggtggcggaggccgtggcggccccacacccggctgagggggccgagacggctgaggcggtggagctgagccgcgccctgagccgcctgctgccggggctggaggccgacagcaagccgggccggcggcgcgccttggaggccctgcggcgcgcgctggaggagccaggccctgccgccgaccccaccgctttccagggcccctgggcgcgcctactgctgccgcgcttgctgcgctgcctgagcgaccccgccgagggctgccgcgcgctggcagtgcacctgctggatctgggcctgcgccgcgccgcgcggccccgcgatgccctgccgcgcctgctgcccgcgctcgccgcgcgcttggccggccccgtgcccgcgcgccgcccgcccgaggcctgtgaggagctgcgcctggcgcttgtgcagctgctgggcctggccgtggacctgtgcggcgccgcgctcgcgccccacctggacgacgctctgcgcgcgctgcgctgctccctgctcgaccccttcgccgccgtgcgccgcgagagctgcagctgcgccgccgccctggcgcaggccacgcccgaccacttccacatgcagtcggagtctctgatcgggcccctgatgcagaccatctcccaccagcactggaaggtccgtgtggccgccattgaagccacaggcgcagtgatccattttggcaacgggaagtccgtggacgacgtgctttcccattttgctcagcgactgtttgatgacgtcccgcaggtccggcgggcggtggcctccgtggtgggcggctggctgctgtgtctgcgtgaccgttactccttcttccacaagctcatccctctgctgctcagtagcctcaacgacgaggtgcctgaggtcaggcagctggctgccagcctctgggaggacgttggcctgcagtggcagaaggagaatgaggaggacctgaaggacaagctggactttgcccctcccaccccaccccattaccctccacatgagcgccgccctgtgctgggctgccgggagctcgtcttcaggaacctctccaagatcctccctgccctgtgccacgacatcaccgactgggtggtggggacccgagtgaagtcggcacagctgctcccagtgctgctgctgcatgccgaggaccacgccacgcagcacctggaggtcgtcctccggaccctgttccaggcctgcaccgacgaggaggcagccgtggtccaaagttgtaccagatccgcagagctcgtcgggacgtttgtcagccctgaggtgtttctgaagctgatcttatcgacgctgaagaagacgccctctgcctccggcctcctggtgctggcctccgccatgcggggttgcccccgagaagccctccagccgcacctggcagccatcgccacagagctggcacaggcccacatctgccaggcatctgaaaacgacctctacctggagcgcctgctgctgtgtgtgcaggctctggtgtctgtgtgtcatgaggactgtggcgtggccagcctgcagctcttggacgtgctgctgacaatagtggccctcgcaggtgctaccggcctgagggacaaggcacaggagacgatggactcactggccatggtggagggtgtcagcagctgccaggacctctaccgcaagcacattggtcccctcctggagcgggtgaccgcgtcgcaccttgactggaccgcacactcgccggagctcctgcagttcagtgtcatcgtcgcacagtcaggccctgccctgggagaagccctgccacacgtcgtgcccacgctgagggcctgtctgcagccctcccaagacccgcagatgcgcctgaagctgttctccatcctgtccaccgtgctgctcagagccacggacaccatcaactcccaggggcagtttcccagctacctcgagacggtgacaaaggacatcctggcccccaatctgcagtggcatgcggggaggacagccgcggccatccgcacggctgccgtgtcctgcctctgggcgctcaccagcagcgaggtcctgtcggcagagcagatacgggacgtgcaggaaacactgatgccccaggtcctgaccaccctggaggaggattcgaagatgacgcgactgatctcatgccgtattatcaacacgttcttaaaaacctcgggcggcatgacggatccagagaaactcatcaggatttatcctgaactcttaaaacgcctagatgacgtgtccaacgatgtgaggatggcagccgcctccaccttggtcacctggctgcagtgtgtcaagggtgccaacgcaaaatcctactatcagagcagtgtccagtacctgtaccgagagttgctggttcaccttgacgatccagagagggccatccaggatgcaattttagaggtcctcaaagagggcagcgggctgttcccagatctcctggtgagggagacggaggccgtcatccacaagcaccgctcggccacctactgcgagcagctcctgcagcatgtgcaggccgtgccagccacacagtgaccacgctggtttcagccacggcacacccttgtccccacctgagccagagtttgtggcctttaaatctcataaacaaggcacctctgtgccagcagtgagactgtgacagcaagaatgtactcctcaggacacctgcccactctttccctggaataacagcctctgagtggattctgcatgttatgtgatttgttctgttcatcgagagggctcccaaacatctgcagctgatttgaaattaaaagtaagtcgcagccgctcctcccgcagccacttcagcagcatcttagattttaagcctcacgtgcgcagctggttcatgaactattggctgcatcctgcttaggtgcccaccaagaaggtttttacctacttaacaaaaaagaaagaagccaaagtgattagaaagaaatgaaatctctttttgggttctgtctactgaaatttaatatctcagtgaacagactaaaaggaatttagaatcctaacaacttatcagatttctcctgttttaaatatactgggactttaaaggttatatgtccggtcaccgtatgttttaagtcggtgttaatgctaacagtgttgaaaacaatatttcatgagatctaattgtggttgcccctataggtagcaggaaagtaaagttgcatttccctctcgcacattctacacccaagtgcctaaaagatctcattgtaagtgggtagtgttaccggaagccattgtgttcacacgggggaaatgccgtatatatttttcaacaaatattaacgtttatactttcatgtttgaaaatttaattaaaaatgtttgttttaa

SEQ ID NO: 195159 - DNA, 2552 bp, Artificial Sequence
  derived and/or modified sequence
tgaccggcgacgcgggcaagatggcggcgctgggggtggcggaggccgtggcggccccacacccggctgagggggccgagacggctgaggcggtggagctgagccgcgccctgagccgcctgctgccggggctggaggccgacagcaagccgggccggcggcgcgccttggaggccctgcggcgcgcgctggaggagccaggccctgccgccgaccccaccgctttccagggcccctgggcgcgcctactgctgccgcgcttgctgcgctgcctgagcgaccccgccgagggctgccgcgcgctggcagtgcacctgctggatctgggcctgcgccgcgccgcgcggccccgcgatgccctgccgcgcctgctgcccgcgctcgccgcgcgcttggccggccccgtgcccgcgcgccgcccgcccgaggcctgtgaggagctgcgcctggcgcttgtgcagctgctgggcctggccgtggacctgtgcggcgccgcgctcgcgccccacctggacgacgctctgcgcgcgctgcgctgctccctgctcgaccccttcgccgccgtgcgccgcgagagctgcagctgcgccgccgccctggcgcaggccacgcccgaccacttccacatgcagtcggagtctctgatcgggcccctgatgcagaccatctcccaccagcactggaaggtccgtgtggccgccattgaagccacaggcgcagtgatccattttggcaacgggaagtccgtggacgacgtgctttcccattttgctcagcgactgtttgatgacgtcccgcaggtccggcgggcggtggcctccgtggtgggcggctggctgctgtgtctgcgtgaccgttactccttcttccacaagctcatccctctgctgctcagtagcctcaacgacgaggtgcctgaggtcaggcagctggctgccagcctctgggaggacgttggcctgcagtggcagaaggagaatgaggaggacctgaaggacaagctggactttgcccctcccaccccaccccattaccctccacatgagcgccgccctgtgctgggctgccgggagctcgtcttcaggaacctctccaagatcctccctgccctgtgccacgacatcaccgactgggtggtggggacccgagtgaagtcggcacagctgctcccagtgctgctgctgcatgccgaggaccacgccacgcagcacctggaggtcgtcctccggaccctgttccaggcctgcaccgacgaggaggcagccgtggtccaaagttgtaccagatccgcagagctcgtcgggacgtttgtcagccctgaggtgtttctgaagctgatcttatcgacgctgaagaagacgccctctgcctccggcctcctggtgctggcctccgccatgcggggttgcccccgagaagccctccagccgcacctggcagccatcgccacagagctggcacaggcccacatctgccaggcatctgaaaacgacctctacctggagcgcctgctgctgtgtgtgcaggctctggtgtctgtgtgtcatgaggactgtggcgtggccagcctgcagctcttggacgtgctgctgacaatagtggccctcgcaggtgctaccggcctgagggacaaggcacaggagacgatggactcactggccatggtggagggtgtcagcagctgccaggacctctaccgcaagcacattggtcccctcctggagcgggtgaccgcgtcgcaccttgactggaccgcacactcgccggagctcctgcagttcagtgtcatcgtcgcacagtcaggccctgccctgggagaagccctgccacacgtcgtgcccacgctgagggcctgtctgcagccctcccaagacccgcagatgcgcctgaagctgttctccatcctgtccaccgtgctgctcagagccacggacaccatcaactcccaggggcagtttcccagctacctcgagacggtgacaaaggacatcctggcccccaatctgcagtggcatgcggggaggacagccgcggccatccgcacggctgccgtgtcctgcctctgggcgctcaccagcagcgaggtcctgtcggcagagcagatacgggacgtgcaggaaacactgatgccccaggtcctgaccaccctggaggaggattcgaagatgacgcgactgatctcatgccgtattatcaacacgttcttaaaaacctcgggcggcatgacggatccagagaaactcatcaggatttatcctgaactcttaaaacgcctagatgacgtgtccaacgatgtgaggatggcagccgcctccaccttggtcacctggctgcagtgtgtcaagggtgccaacgcaaaatcctactatcagagcagtgtccagtacctgtaccgagagttgctggttcaccttgacgatccagagagggccatccaggatgcaattttagatgtgcctggttccccttcaccttctgccatgattggaagtttcctgaggcctccccacccatggagaactgtgagtcaattaaacctcttttcttcataa

SEQ ID NO: 195160 - DNA, 2313 bp, Artificial Sequence
  derived and/or modified sequence
agtcggcagctgctcagctttgctgcagttttcctgctcgatgtgtgctgctggtgaggccaccaggcctgttcttgtcaagagagaccttccgggagcaacagatgttacaggagagactggggatgcatggacagcttttcagaggtccggcgggcggtggcctccgtggtgggcggctggctgctgtgtctgcgtgaccgttactccttcttccacaagctcatccctctgctgctcagtagcctcaacgacgaggtgcctgaggtcaggcagctggctgccagcctctgggaggacgttggcctgcagtggcagaaggagaatgaggaggacctgaaggacaagctggactttgcccctcccaccccaccccattaccctccacatgagcgccgccctgtgctgggctgccgggagctcgtcttcaggaacctctccaagatcctccctgccctgtgccacgacatcaccgactgggtggtggggacccgagtgaagtcggcacagctgctcccagtgctgctgctgcatgccgaggaccacgccacgcagcacctggaggtcgtcctccggaccctgttccaggcctgcaccgacgaggaggcagccgtggtccaaagttgtaccagatccgcagagctcgtcgggacgtttgtcagccctgaggtgtttctgaagctgatcttatcgacgctgaagaagacgccctctgcctccggcctcctggtgctggcctccgccatgcggggttgcccccgagaagccctccagccgcacctggcagccatcgccacagagctggcacaggcccacatctgccaggcatctgaaaacgacctctacctggagcgcctgctgctgtgtgtgcaggctctggtgtctgtgtgtcatgaggactgtggcgtggccagcctgcagctcttggacgtgctgctgacaatagtggccctcgcaggtgctaccggcctgagggacaaggcacaggagacgatggactcactggccatggtggagggtgtcagcagctgccaggacctctaccgcaagcacattggtcccctcctggagcgggtgaccgcgtcgcaccttgactggaccgcacactcgccggagctcctgcagttcagtgtcatcgtcgcacagtcaggccctgccctgggagaagccctgccacacgtcgtgcccacgctgagggcctgtctgcagccctcccaagacccgcagatgcgcctgaagctgttctccatcctgtccaccgtgctgctcagagccacggacaccatcaactcccaggggcagtttcccagctacctcgagacggtgacaaaggacatcctggcccccaatctgcagtggcatgcggggaggacagccgcggccatccgcacggctgccgtgtcctgcctctgggcgctcaccagcagcgaggtcctgtcggcagagcagatacgggacgtgcaggaaacactgatgccccaggtcctgaccaccctggaggaggattcgaagatgacgcgactgatctcatgccgtattatcaacacgttcttaaaaacctcgggcggcatgacggatccagagaaactcatcaggatttatcctgaactcttaaaacgcctagatgacgtgtccaacgatgtgaggatggcagccgcctccaccttggtcacctggctgcagtgtgtcaagggtgccaacgcaaaatcctactatcagagcagtgtccagtacctgtaccgagagttgctggttcaccttgacgatccagagagggccatccaggatgcaattttagaggtcctcaaagagggcagcgggctgttcccagatctcctggtgagggagacggaggccgtcatccacaagcaccgctcggccacctactgcgagcagctcctgcagcatgtgcaggccgtgccagccacacagtgaccacgctggtttcagccacggcacacccttgtccccacctgagccagagtttgtggcctttaaatctcataaacaaggcacctctgtgccagcagtgagactgtgacagcaagaatgtactcctcaggacacctgcccactctttccctggaataacagcctctgagtggattctgcatgttatgtgatttgttctgttcatcgagagggctcccaaacatctgcagctgatttgaaattaaaagtaagtcgcagccgctcctcccgcagccacttcagcagcatcttagattttaagcctcacgtgcgcagctggttcatgaactattggctgcatcctgcttaggtgcccaccaagaaggtttttacctacttaac

SEQ ID NO: 195161 - DNA, 2568 bp, Artificial Sequence
  derived and/or modified sequence
atggccgccctgggcgtggccgaggccgtggccgccccccaccccgctgagggcgccgagactgccgaagcagtagagctctccagagccctgtctcgcctgctgcccggtctcgaagcggattcgaagccagggcgccgacgcgccctggaggcactgaggcgcgcgctcgaggagcctgggcccgcagccgaccccacagctttccaggggccttgggcccgcctactgctgcccaggttgctgaggtgtctgtccgatcctgctgagggttgcagagctctcgcggtgcacctgctggacctaggcctgagacgtgcggctcggccaagagatgcactgcctcgtcttttgcctgcgctcgctgctagactggcgggaccggtgcccgctcgaaggccccctgaggcctgcgaagaactgaggctcgccctcgtccagctgctgggcttagccgtcgatctgtgtggcgcagcactggccccgcatctggatgacgcactaagggccctgcgctgctcccttctcgaccctttcgctgccgttcgcagagagagctgctcttgtgccgctgcgttagcccaggcgacacccgaccattttcacatgcaaagcgagagtctcatcggcccactcatgcagaccatctcacatcaacattggaaggtcagagtcgccgctatcgaagccactggcgctgtgatccattttggaaacggcaagagtgtcgacgatgttctgtcgcactttgcccagaggttgttcgatgacgtgccacaggtgcgcagggccgttgcgtccgtagtgggcgggtggctcctctgcctcagggacaggtatagcttcttccacaagctgatcccgctgttactatcttccctgaacgacgaagtgccggaagttcggcaactggctgcgagtctctgggaagacgtgggtctccaatggcagaaagaaaatgaggaagatttgaaggacaaactggacttcgcgccccccacgcccccccactatcctccgcacgagcggcggccggtactgggctgtagagaactggtgttcagaaatctatctaagatcctcccagcattatgccatgatattactgactgggtcgttggtacgcgggtcaaaagcgctcagctgcttcctgtgcttctgcttcacgcggaggatcacgccacacagcatctggaagtcgtcctcagaacactatttcaggcctgcaccgatgaagaagccgcagtcgtccagtcgtgcacccggtccgcggagctcgtgggcaccttcgtctccccagaggtgtttctcaagctgatactctccacgctgaaaaaaacaccgagcgctagcggtttacttgtcctggcatctgcgatgcggggctgccccagggaagcgctgcaaccacacctcgcagccatcgcgacagagctggcacaagcgcatatctgccaggcgagcgaaaatgacctgtacctcgaacgccttctgctgtgtgtgcaggccttggtgtccgtgtgtcacgaagactgcggagtagctagcttgcaacttctcgacgtgcttctgaccatcgtagctctggctggcgctactggcctgcgggacaaagctcaggaaacaatggactcacttgcaatggtagaaggggtcagttcctgtcaggacttgtacagaaagcatatcggacctctgctggaacgcgtgactgcttctcaccttgattggaccgctcactctccagagctgttgcagttctccgtgatagttgcacagagcggaccggctctgggggaggcacttccacatgtggtgcccaccttacgtgcctgcttacagccctctcaagatccccagatgaggctcaagctgttcagcattttgagcaccgttcttctgcgtgctactgacactattaattcacagggccagttccctagttacctcgaaactgtgactaaggacattctggcccccaacctgcagtggcacgccggaaggactgcagctgccatacgcaccgcagccgtttcttgcctgtgggccctcaccagttccgaagttctctctgccgagcagatcagggacgtgcaggaaacgttgatgccgcaggtactgaccaccctggaggaggattcgaagatgaccaggctcatttcatgccgtattattaatacattcttgaaaacctcaggcggaatgaccgatccggagaaattgattagaatttacccggagctgctcaagcggctagacgacgtcagcaatgatgtgcgaatggctgccgcctccactctagtgacatggctacagtgcgtgaagggtgcaaatgccaaatcgtattaccagagctccgtgcagtacctatacagagaattactggttcatctggatgatccagaacgagccatccaagatgcaatcctggaagtgctcaaagaagggagcggcctgttccctgacttgctcgtcagggagaccgaggctgtcatacataaacacaggtctgcgacctattgcgaacaactgctccagcatgttcaagcagtgcccgctacacaatag

SEQ ID NO: 195162 - DNA, 2532 bp, Artificial Sequence
  derived and/or modified sequence
atggccgccctgggcgtggccgaggccgtggccgccccccaccccgcagaaggcgcggaaaccgcggaagccgtggagctctccagggccctctctcgcctgctgcctgggctggaagccgacagtaaaccaggccggcgtcgagctttggaagcactgcgaagggcgctcgaggaacctggacccgcggccgatccaaccgcttttcagggtccttgggctaggctactactgcctcgactgttgcgctgtctgtccgatcccgctgagggctgcagagccctagcagtgcacctgctggatctgggattgcgcagggcagctcgcccgcgggatgccctcccgagactcctacctgcacttgctgctcgactggccggaccagtgccagcgcgtcgccccccagaggcctgcgaagagctgcggctggcgctggtgcagctgctcggtttggcggtggatctgtgcggggctgcactcgcccctcaccttgatgacgccctccgggcactcaggtgttcccttctggatccctttgccgccgtgaggcgggagtcttgctcatgcgctgcagcgcttgcgcaggccaccccagaccatttccacatgcagtcagagtcccttattggcccgctgatgcagaccatctcgcatcagcactggaaagtgcgtgtggccgccattgaggccacaggagcagtcattcacttcggaaacggaaagagtgtggatgatgtcctgtcccacttcgcgcaacgcctcttcgacgatgttccccaagtccgacgtgcagttgcctcggtcgttggcggctggctgttatgtctgcgggaccgctattctttcttccataaactgatacctctgctgctctctagccttaatgacgaggtccctgaggttagacaactggccgcctcactttgggaagacgtggggctgcagtggcagaaagagaatgaggaggatttgaaggacaaactagatttcgcccctccaacacccccacactaccctcctcacgaacgacgtccggttcttgggtgtcgagagctggtattcaggaacctctctaaaattttacccgccctgtgccatgacataaccgactgggtggttggaacccgagtcaagtctgctcagttgctgcctgtactcctgctgcatgctgaagaccacgctacccagcacctcgaagtcgtacttcgaacactgtttcaggcgtgcactgatgaggaggctgcggtcgtccagagctgcactcgaagcgcagaactagtgggaacatttgtatcgccagaagtgttcctgaagctaatcttgtccaccctcaagaagaccccaagcgccagtgggctcttggtgctggcatcggccatgagggggtgtcccagagaagccctgcaaccccacctggctgcgatagcgacagagttggcccaggcgcacatatgccaggcatccgagaatgacctgtatcttgagcgattactgctatgtgtccaggccctcgtcagtgtgtgtcatgaggattgtggcgtagcaagcctgcagctgctggatgtgctgctcactatagttgctttagccggcgcgacaggtcttcgcgataaggctcaggaaacaatggattcgcttgctatggtcgagggcgtgtctagttgtcaggacttatatcggaagcacatagggcctctgctggaacgagtcaccgccagccaccttgattggactgcccactctccggaactcttacagttttccgtcatagtcgcgcagagcgggcctgcgctcggtgaagccctcccacacgtcgtgccaaccctgagggcctgcctccagcctagtcaggaccctcaaatgcgactgaaactgttctctatcctgagcactgtgctgttgcgggccaccgatacgattaactctcaaggccaattccctagttaccttgaaacagtaaccaaggatatcctcgccccgaacctgcaatggcatgccggcaggactgcggccgccatcaggacggccgcagtcagctgcctgtgggccctgactagttccgaagttctgagcgcagaacaaattcgcgatgtccaggagacacttatgccacaggttcttactactctggaagaggacagcaaaatgactaggttgatcagctgcaggataatcaatactttccttaaaacgtctgggggtatgaccgaccctgaaaagctaattcgcatctaccccgaacttttgaagcggttggacgatgtctcaaacgatgtaagaatggcggctgcatcaactttagttacatggttgcagtgcgttaagggagcaaatgccaagagctattaccagagctccgttcaatatttatacagagaactcctcgtacatctggacgaccccgagcgtgcgattcaggacgccatcctggatgttcccggcagtccgtctcctagcgccatgatcggaagcttcctcagaccccctcatccctggagaacagtgtcccagctaaatctgttctccagttag

SEQ ID NO: 195163 - DNA, 1806 bp, Artificial Sequence
  derived and/or modified sequence
atggacagcttcagcgaggtgcggcgggccgtggccagcgtggtggggggctggcttttgtgcctgcgtgacagatactcattcttccacaaactgatccccctcctacttagtagccttaacgatgaagtccctgaggtgaggcagcttgcagcctccctgtgggaggatgtagggctacaatggcaaaaggaaaatgaggaagatttaaaagataagttggattttgccccaccaactccaccgcactatccacctcacgagaggcgaccagtgctaggctgccgggaactggtcttcaggaacctgagcaagattctgcctgcactatgccacgacataacggattgggtcgtcggcacacgcgtgaagagcgcccagcttctgcccgtgctgctcctgcacgcagaagatcatgcaacccagcacctcgaagtggttctccgtactttgtttcaagcctgcactgatgaagaggccgctgtggtacagagttgtactagaagtgcagagctcgtcgggacctttgtgtcccctgaagtctttctcaagcttattctgtccacactcaaaaagacaccttccgcatcaggtttgttagtgttagcttcagcaatgcgtgggtgccccagagaggccttgcagccacacttagcggccatcgctaccgagctggctcaggcccacatctgccaggcttccgagaatgatttgtatctggagcgactcctactatgtgttcaggcactcgtctccgtgtgtcatgaagattgcggagtcgccagtttgcaactcttagacgtgctcctgaccatcgtcgctcttgccggggccactggtctgcgggacaaggcccaagagacgatggactccctagccatggttgagggggtgagctcttgtcaagacctgtaccgcaaacatatcggaccactcttagaacgggtcactgcctcccatctagattggacagcccattccccagagctcctccaatttagcgttatcgtggctcaaagcggacctgcactgggtgaggctctgccccatgtcgtgccaacactgagggcgtgtcttcagccttcccaagacccacagatgaggttgaaactcttcagcatcctctcgaccgttctactgagagcgacagatactatcaactctcagggacagttcccttcctatctggagacagtgaccaaagacattctggcccccaacctccagtggcacgccggtcgcactgcagctgccattagaactgctgcggtgtcctgcttgtgggcacttacgagttctgaggtattatcagccgaacagatccgagatgtccaggagactctcatgcctcaggtccttactacattagaggaagactctaaaatgactcgactgattagctgcaggattatcaacacctttctaaaaactagcggagggatgactgatcccgaaaagcttatccgtatttatccggaactgttaaagcggctcgatgacgtcagcaacgatgttcgcatggctgcagcttctacgctcgttacgtggctgcaatgcgtgaagggcgccaatgctaagtcctattatcaatcctccgtgcaatacctttacagggagctgctcgtgcatcttgacgacccagaaagagcgattcaggatgcgattttggaagtgctgaaagaaggtagcggcctgttcccagacttgcttgtcagggagacagaggctgtgattcataaacatcgcagcgccacgtattgcgagcagcttctacagcacgtgcaagctgtgcccgctacccagtag

SEQ ID NO: 195164 - DNA, 2568 bp, Artificial Sequence
  derived and/or modified sequence
atggctgctcttggagttgccgaggccgtcgctgcccctcacccagctgaaggagctgagacagcggaagccgtggaactgtcccgcgctctgtcccgccttctgcctggcctagaggccgattccaaacctggcagacgcagggcccttgaggctctcagacgtgcactcgaagagccagggcctgcggcagatcccacagccttccaaggtccttgggcaaggctgctcctcccccgactgctgaggtgtctctcagatccagcggaggggtgccgcgctttagctgtccacctgctggaccttggacttaggagagcagccaggcctcgtgatgctcttccacggcttttgcctgctttggccgctagactcgctgggcctgtgcccgcaagaagaccacccgaagcttgcgaagaattgcgcctcgccctggtgcagcttctgggtttagctgtagatttatgcggggcagccctcgctcctcatctggatgacgcactacgagctttgcggtgcagtctgctggaccctttcgcggctgtccgccgtgaaagctgttcgtgcgccgctgccctcgcccaggctacccccgatcatttccacatgcagagcgaatctctgatcggcccacttatgcaaacaatcagtcaccagcactggaaggtcagggtggctgccattgaagccactggagctgtcatccactttgggaatggcaagtccgtagacgatgtcctgtctcactttgcacaaagacttttcgacgacgtaccacaggtccggagagctgtcgcaagtgtcgtgggagggtggcttctgtgtttaagagatcgatactcattttttcataagctgatacctctgctgctctcctcacttaacgacgaagtacctgaagttcgtcaattagcggcttctctttgggaggatgttggactgcagtggcaaaaggagaatgaggaggatctgaaagataagctcgattttgccccacccaccccaccccattatccaccccacgaaaggcggccagttctgggatgccgggagctggtgttcagaaatttgagtaaaattcttcctgcactgtgtcatgacatcactgattgggttgtagggacaagagtgaagtcagctcaactgctccctgttctgctgctgcacgcagaggatcatgctacccagcacctagaagtggttctgaggaccctcttccaggcctgtacggacgaagaggccgctgtggttcagtcatgcaccaggagcgccgaactggtggggacgtttgtatcgcccgaagttttcctcaagctgatactcagcaccctgaagaaaaccccttccgcgagcggactgttggtacttgctagtgcgatgcggggatgcccgagagaagcattgcagcctcacctcgctgccatcgccaccgaactggctcaggcccacatttgccaggcaagcgaaaatgacctttacctggagaggctgctgctctgcgtccaggccctcgtgagtgtatgccatgaagattgtggcgtcgcctcactgcagttgctggatgtgctgctgacaattgtcgccctggccggtgcaaccgggctcagggataaggctcaagaaacaatggacagcctggctatggtggaaggcgtgtcgtcttgccaagatctgtaccggaaacatattggcccattattggagcgtgtgactgcgtcacacctcgattggacagcccattcaccagaattgttgcaattcagtgtgatcgttgcacagtccgggcctgccctgggagaagcacttccgcacgttgttccgacactccgtgcatgtctgcagccatctcaggacccccagatgcgacttaaactatttagcattttatccacagtgctcctgcgagccactgatacaatcaattcacaggggcaatttccttcgtatcttgagaccgtgactaaagatatcctggccccaaatcttcagtggcacgccggtaggaccgccgcagctattcgcaccgcagcagttagctgcttgtgggctttgacaagttctgaggttctcagtgctgagcagattagagatgtgcaagaaaccctgatgccacaagtgctgacgacattagaagaagattccaagatgaccagactaataagctgcagaattatcaacaccttcctcaagacttccggaggcatgactgatcctgagaagcttattaggatctatccagaactgctgaaacggctggacgatgtctctaacgacgtccgcatggctgccgctagtacgcttgtgacatggctgcagtgcgtaaaaggcgcaaacgctaaatcttactaccagagttcggtccagtatttgtatcgggagctgctagtgcacctcgatgatccagaaagggccatccaggatgctatacttgaagtgctcaaagagggatctgggctcttccctgacttactcgttcgcgagaccgaggctgtcattcacaagcataggagcgctacgtactgcgaacagctgctgcagcatgttcaggcggtgccggctacacagtag

SEQ ID NO: 195165 - DNA, 2532 bp, Artificial Sequence
  derived and/or modified sequence
atggccgctttgggggtggcagaggctgttgctgcacctcatcccgcagagggtgcagaaacggcagaggcagtagagttgtcacgtgcgttgagtagattgctccccggattagaggctgatagcaagcccggtcgcaggagagccctggaagccttgaggcgagcgctggaggagccaggacctgctgcagaccccaccgccttccaggggccttgggccaggctgctgctcccgcgactattaagatgcctcagtgaccccgctgagggttgccgcgctcttgccgttcatctgctggacctcggactccgtcgtgcagccaggccccgtgacgcgctaccccgactccttccagctctggcagccaggctggctggccctgtgcccgctaggcggccacccgaggcatgtgaggagctgaggttagcgctcgtgcagctgctcggcctggcggtggatctttgcggcgctgctttggccccacacttggacgatgcactccgggcactccgctgttcgttgctcgacccttttgccgctgttcgtcgtgaatcctgttcctgtgccgctgcgctagcgcaggccactcctgatcatttccacatgcaaagcgaatctttaattggtcctctgatgcagaccatttcccaccagcactggaaggtgcgggtggccgctatagaggcaaccggagccgttattcatttcggaaacggcaagtccgtggatgacgtgctgtcacactttgcccagagacttttcgacgatgtacctcaggttcgcagggctgtggcctccgtcgtcggagggtggttactctgcctgagggataggtactctttctttcataagctcatcccactattgctctccagtctgaatgatgaggtgcctgaggtccggcaacttgctgccagcctatgggaagatgtgggtttgcaatggcaaaaggaaaatgaggaagacctgaaggacaagctggactttgcaccacccacaccaccccactatcctccgcatgagcggcgaccagtgctgggatgcagagagttagttttcaggaatctgtcgaaaatcctgcccgctctctgccacgacataaccgattgggtggtcggaacacgtgtgaaaagtgcgcaactcctaccagtgttattactccacgctgaggaccatgccacccaacatctggaagttgtattgcgcaccctcttccaggcttgtaccgacgaggaggccgctgtcgtgcagtcgtgtacgcggtccgcggagttggtcgggactttcgtttcccccgaggtgttcctgaagttgatattgagtaccttaaagaagactccctctgcttcaggtctactagtgctcgcgagcgccatgagagggtgtccgagagaggctctccaaccgcacttggccgctatcgccactgagctggctcaggcacatatctgccaagccagcgagaatgatttatatctggaaaggcttctgctgtgtgtgcaggccctggttagcgtatgtcacgaagattgcggtgtcgcctcacttcagcttctcgatgtgttgctgaccattgttgccttggcgggtgctaccgggctaagggacaaggcccaagaaaccatggatagtcttgccatggtggagggtgtctcgtcttgtcaggacctgtaccgcaagcacatcgggcctcttttagagcgcgtgaccgctagtcacctcgattggacagcacattctcccgagctcctccagttttccgtgattgtggctcagtcgggcccagcgctaggggaggctcttccgcacgtcgtgcccactcttcgtgcttgtctacagcctagccaggatccgcagatgcgactgaaactattttctattcttagcaccgtgcttctgcgggcaaccgatacaattaattcccagggacagtttccgtcttacctcgagacagtgacaaaggatattctggcccctaatcttcagtggcacgccggaagaaccgccgctgcaatcagaacggcagcagtaagctgcctatgggccctcaccagttcggaggttttgagcgctgagcagattcgagacgtccaggaaactctgatgcctcaggtgctaacaaccctggaagaggattccaagatgaccagactcatctcatgccgaataatcaatacctttttaaaaacatcggggggaatgacagatcccgaaaagctcatcaggatttaccccgaactcctgaaacggctggatgatgtcagcaatgatgtcagaatggccgctgcctctactttggtgacatggctccagtgtgtcaagggagccaacgcaaagtcttactatcagagcagcgttcagtacttgtatcgcgagctccttgtgcatctcgatgacccagagcgggctatccaggacgcgatactggacgtaccaggatctccatctccgtcagccatgatcgggagctttctgcgcccacctcatccttggcgcactgtgagccagctcaatctgttcagctcttag

SEQ ID NO: 195166 - DNA, 1806 bp, Artificial Sequence
  derived and/or modified sequence
atggactctttctcagaggtccgtagagccgtggcttctgtcgtgggaggctggctgctctgcctgcgggatcgatactcattctttcataagctaatccctctcctcctctcctctttgaatgacgaagtccccgaagtccggcagctagctgcttctctttgggaggatgtggggttgcaatggcagaaggagaacgaggaggacctcaaggataagctcgacttcgccccaccaacacctccacactatccccctcacgaacgccgaccagtgctggggtgccgagaactagtttttcgtaacctgtcaaaaatcttgccagccttgtgccacgatatcaccgattgggtcgtagggactcgggtcaagtcagctcagctgttacccgtgctcctgctgcacgccgaggatcatgccactcagcacctggaggtcgtcttgcgcacattgtttcaggcctgcacggacgaggaagccgcagtggtgcagtcatgcacgaggtccgccgaactggtcggcacctttgtctctcccgaagtttttctcaagctgatcctcagtaccctaaaaaagacaccgagtgcatcaggcttactcgtgctggcctctgctatgcgtggttgccccagagaagctttacagccacatctggctgctatcgctaccgagcttgcccaggcacacatctgtcaggctagcgagaacgacttgtacctggaacgtctgctactatgtgtgcaggctctggtgtccgtatgtcacgaggactgtggagtcgccagcttgcaactgctggatgtccttctaaccatcgtagctttggccggagccactgggctacgcgacaaggcacaggagacgatggatagtttggccatggtggagggggtgtcctcctgccaggatctctatagaaagcacattggaccccttctggaaagagtgacagcgtcacatctggactggactgctcattcccccgagttgcttcagttctccgtgatcgtcgcccaatctggccctgccttgggcgaagctctgccccatgtcgtgcccaccttacgagcctgtttgcagccctcccaggaccctcagatgaggctgaaattgttcagcatcctgagcacggtccttctacgggctacagacaccattaattcccagggacagtttccttcttatcttgagacggttaccaaggatatcctggctcctaacttgcagtggcacgcgggtcgtacagctgctgccatcagaactgccgcagtctcatgcctatgggcccttacatcaagtgaggtactctcagctgaacaaattagggatgtgcaggaaacccttatgcctcaggtgctgacaactctggaagaggattcaaaaatgacccgcctgatttcttgccggatcataaacacctttctcaagaccagtggtggtatgacagatccagaaaagcttattaggatataccctgagctgcttaagcggcttgacgacgtctccaacgacgtcaggatggcggctgcgagtacgctggtgacctggctgcagtgcgtcaaaggagccaatgccaagagctattaccagtcttcagtgcagtatttgtatcgggaattgctggttcatctagacgatcctgagagagcaattcaggatgccatacttgaggtactgaaggagggctcgggcctgtttccagacttgctggtgcgtgaaaccgaagccgtgatacataaacacagaagtgctacctactgtgagcagcttctgcagcacgtgcaggctgtgccggctacccagtag

SEQ ID NO: 195167 - protein, 963 aa, Artificial Sequence
  derived and/or modified sequence
MLSGERKEGGSPRFGKLHLPVGLWINSPRKQLAKLGRRWPSAASVKSSSSDTGSRSSEPLPPPPPHVELRRVGAVKAAGGASGSRAKRISQLFRGSGTGTTGSSGAGGPGTPGGAQRWASEKKLPELAAGVAPEPPLATRATAPPGVLKIFGAGLASGANYKSVLATARSTARELVAEALERYGLAGSPGGGPGESSCVDAFALCDALGRPAAAGVGSGEWRAEHLRVLGDSERPLLVQELWRARPGWARRFELRGREEARRLEQEAFGAADSEGTGAPSWRPQKNRSRAASGGAALASPGPGTGSGAPAGSGGKERSENLSLRRSVSELSLQGRRRRQQERRQQALSMAPGAADAQIGTADPGDFDQLTQCLIQAPSNRPYFLLLQGYQDAQDFVVYVMTREQHVFGRGGNSSGRGGSPAPYVDTFLNAPDILPRHCTVRAGPEHPAMVRPSRGAPVTHNGCLLLREAELHPGDLLGLGEHFLFMYKDPRTGGSGPARPPWLPARPGATPPGPGWAFSCRLCGRGLQERGEALAAYLDGREPVLRFRPREEEALLGEIVRAAAAGSGDLPPLGPATLLALCVQHSARELELGHLPRLLGRLARLIKEAVWEKIKEIGDRQPENHPEGVPEVPLTPEAVSVELRPLMLWMANTTELLSFVQEKVLEMEKEADQEDPQLCNDLELCDEAMALLDEVIMCTFQQSVYYLTKTLYSTLPALLDSNPFTAGAELPGPGAELGAMPPGLRPTLGVFQAALELTSQCELHPDLVSQTFGYLFFFSNASLLNSLMERGQGRPFYQWSRAVQIRTNLDLVLDWLQGAGLGDIATEFFRKLSMAVNLLCVPRTSLLKASWSSLRTDHPTLTPAQLHHLLSHYQLGPGRGPPAAWDPPPAEREAVDTGDIFESFSSHPPLILPLGSSRLRLTGPVTDDALHRELRRLRRLLWDLEQQELPANYRHGPPVATSP

SEQ ID NO: 195168 - DNA, 2892 bp, Artificial Sequence
  derived and/or modified sequence
atgctgagcggcgagagaaaggagggcggcagccccagattcggcaagctgcacctgcccgtgggcctgtggatcaacagccccagaaagcagctggccaagctgggcagaagatggcccagcgccgccagcgtgaagagcagcagcagcgacaccggcagcagaagcagcgagcccctgccccccccccccccccacgtggagctgagaagagtgggcgccgtgaaggccgccggcggcgccagcggcagcagagccaagagaatcagccagctgttcagaggcagcggcaccggcaccaccggcagcagcggcgccggcggccccggcacccccggcggcgcccagagatgggccagcgagaagaagctgcccgagctggccgccggcgtggcccccgagccccccctggccaccagagccaccgccccccccggcgtgctgaagatcttcggcgccggcctggccagcggcgccaactacaagagcgtgctggccaccgccagaagcaccgccagagagctggtggccgaggccctggagagatacggcctggccggcagccccggcggcggccccggcgagagcagctgcgtggacgccttcgccctgtgcgacgccctgggcagacccgccgccgccggcgtgggcagcggcgagtggagagccgagcacctgagagtgctgggcgacagcgagagacccctgctggtgcaggagctgtggagagccagacccggctgggccagaagattcgagctgagaggcagagaggaggccagaagactggagcaggaggccttcggcgccgccgacagcgagggcaccggcgcccccagctggagaccccagaagaacagaagcagagccgccagcggcggcgccgccctggccagccccggccccggcaccggcagcggcgcccccgccggcagcggcggcaaggagagaagcgagaacctgagcctgagaagaagcgtgagcgagctgagcctgcagggcagaagaagaagacagcaggagagaagacagcaggccctgagcatggcccccggcgccgccgacgcccagatcggcaccgccgaccccggcgacttcgaccagctgacccagtgcctgatccaggcccccagcaacagaccctacttcctgctgctgcagggctaccaggacgcccaggacttcgtggtgtacgtgatgaccagagagcagcacgtgttcggcagaggcggcaacagcagcggcagaggcggcagccccgccccctacgtggacaccttcctgaacgcccccgacatcctgcccagacactgcaccgtgagagccggccccgagcaccccgccatggtgagacccagcagaggcgcccccgtgacccacaacggctgcctgctgctgagagaggccgagctgcaccccggcgacctgctgggcctgggcgagcacttcctgttcatgtacaaggaccccagaaccggcggcagcggccccgccagacccccctggctgcccgccagacccggcgccaccccccccggccccggctgggccttcagctgcagactgtgcggcagaggcctgcaggagagaggcgaggccctggccgcctacctggacggcagagagcccgtgctgagattcagacccagagaggaggaggccctgctgggcgagatcgtgagagccgccgccgccggcagcggcgacctgccccccctgggccccgccaccctgctggccctgtgcgtgcagcacagcgccagagagctggagctgggccacctgcccagactgctgggcagactggccagactgatcaaggaggccgtgtgggagaagatcaaggagatcggcgacagacagcccgagaaccaccccgagggcgtgcccgaggtgcccctgacccccgaggccgtgagcgtggagctgagacccctgatgctgtggatggccaacaccaccgagctgctgagcttcgtgcaggagaaggtgctggagatggagaaggaggccgaccaggaggacccccagctgtgcaacgacctggagctgtgcgacgaggccatggccctgctggacgaggtgatcatgtgcaccttccagcagagcgtgtactacctgaccaagaccctgtacagcaccctgcccgccctgctggacagcaaccccttcaccgccggcgccgagctgcccggccccggcgccgagctgggcgccatgccccccggcctgagacccaccctgggcgtgttccaggccgccctggagctgaccagccagtgcgagctgcaccccgacctggtgagccagaccttcggctacctgttcttcttcagcaacgccagcctgctgaacagcctgatggagagaggccagggcagacccttctaccagtggagcagagccgtgcagatcagaaccaacctggacctggtgctggactggctgcagggcgccggcctgggcgacatcgccaccgagttcttcagaaagctgagcatggccgtgaacctgctgtgcgtgcccagaaccagcctgctgaaggccagctggagcagcctgagaaccgaccaccccaccctgacccccgcccagctgcaccacctgctgagccactaccagctgggccccggcagaggcccccccgccgcctgggaccccccccccgccgagagagaggccgtggacaccggcgacatcttcgagagcttcagcagccacccccccctgatcctgcccctgggcagcagcagactgagactgaccggccccgtgaccgacgacgccctgcacagagagctgagaagactgagaagactgctgtgggacctggagcagcaggagctgcccgccaactacagacacggcccccccgtggccaccagcccctag

SEQ ID NO: 195169 - DNA, 2892 bp, Artificial Sequence
  derived and/or modified sequence
atgctttcaggggaacggaaggaaggcggatcgcctagattcggcaagctgcaccttccagtaggcctgtggatcaatagtcctaggaagcagcttgctaaattaggcagaaggtggccttcagccgcttccgttaaaagcagttctagtgataccgggagccgctcctcggagccgctgccacctcctcccccacacgtcgaactgcgtcgtgtgggcgctgtgaaggccgctgggggggcgtccggttccagagccaagcgtatctcacagctctttcggggatcgggcaccgggaccacaggctcgtcgggcgctggagggcccgggactcctggcggcgcgcagaggtgggcatctgagaagaagctgcccgaactggctgccggcgttgctcctgagccccccctggcgacacgcgcaaccgcgcctccaggagtgctgaagattttcggtgctggccttgcatccggggctaactataagtccgtgctggctaccgcccggagtaccgctagggaattggtagccgaggctcttgaaagatatggcctcgccgggagtccaggcggcgggcccggcgagagctcctgcgtggatgccttcgctctgtgtgacgctctgggccgcccagcagccgcgggcgtggggtctggcgagtggcgcgccgaacacctcagggtgctgggagacagtgagcgacctctgttggtgcaggagctctggagagcccgaccaggttgggcaaggcggttcgagctccgcggccgcgaagaggcccgcagactggagcaggaggcttttggcgccgcagattccgaaggcacaggcgccccctcatggagaccccagaagaacagatcccgcgctgccagcggaggcgcggccctggcatctccaggtcctggtacaggctcaggggcccccgcaggctcaggcggaaaagaaagatcagaaaatctatcactgcgcaggtcagtgagtgagctgagcctgcagggacgcagacgtaggcagcaggaaaggaggcagcaagcactgtccatggctccaggggcggcagatgctcaaataggaactgcggacccaggagatttcgaccagctcacccagtgtttaattcaggcaccatctaatcgtccatactttcttcttctgcaaggctatcaggacgcacaggactttgtggtatatgtaatgaccagggaacagcatgtttttggtagaggcgggaacagctccgggcgcggcggctcacctgcaccgtacgtggacacattccttaatgcccccgatattctgccacgccactgtacagtgcgtgccggtccggaacaccctgccatggtgagacctagcaggggagctccggtaacccacaacggttgcttactactgagggaggccgaactacaccccggggatttactcggactcggagagcacttcttgttcatgtacaaagacccccgcaccgggggatccggccccgctcgccctccctggcttcctgcccgccctggagcgacacctccaggcccggggtgggccttttcctgtcgcttgtgtggacgcggtctgcaagaacggggggaggccctggcggcttatctcgatggacgagagcccgtgctcagattccggcccagggaggaggaagctctcctgggtgagatcgtgcgcgccgctgcagccggaagtggtgatctcccgccactcggccctgcaacccttctcgccctgtgcgttcagcattctgcaagagaactcgagcttggtcacctcccccgtctcctggggagactagcgagattaattaaagaagccgtctgggaaaaaataaaagagatcggagaccgccagcccgaaaatcaccctgaaggtgtgccagaggtgcctctaacgccagaagcagtgtctgtcgaactgcgcccattaatgttgtggatggctaacacaacagagctgctctcattcgtgcaggagaaagtgttggagatggagaaggaagccgaccaggaggatccccagctgtgcaacgacctggagctatgtgacgaagcgatggccctgcttgacgaggttattatgtgcactttccaacagagcgtgtactatctgactaaaacgctgtattctaccttgcccgctctgctcgactcaaatccatttaccgccggagctgagttacctggcccaggagccgagctaggagcaatgcctcctgggcttcggccaacgctcggagtctttcaggcagcactcgagttaacctcccagtgcgaactgcatcccgatctggtgagtcagacattcggatacctctttttcttttcaaatgcctcgcttttaaacagtctgatggaacggggccaaggacggcccttctaccagtggtctcgcgccgtgcaaattaggactaatctggaccttgtgctggactggcttcaaggtgcaggactgggcgacatcgccaccgagtttttccggaaactctctatggccgtgaacctcctttgcgtcccccgcacctctttgctgaaagcttcttggtcaagccttcggaccgaccaccccaccctcacccctgctcagctgcatcatctgctgagccactaccagcttggacctggacgcggaccgcctgcagcctgggatcctccacccgctgaaagagaagccgttgacacaggtgacattttcgagagtttttcatcgcacccccctcttattctcccattgggcagcagcagactcagactgacagggccggttaccgatgacgcattgcatcgtgagttgaggagacttcgaagacttctgtgggacttggaacagcaggagttgccggccaactacagacacgggcctcctgttgccactagcccatag

SEQ ID NO: 195170 - DNA, 2892 bp, Artificial Sequence
  derived and/or modified sequence
atgctgtctggagagaggaaggagggcggcagccccaggtttgggaagctgcacctgcctgtgggcctgtggatcaacagccccaggaagcagctggccaagctgggccgccgctggcccagcgctgcctctgtgaagagcagcagcagtgacaccggcagccgcagcagcgagcccctgcccccacctccaccccacgtggagctgcggcgggtgggcgctgtgaaggccgccggcggggccagcggcagccgggccaagaggatcagccagctgttccggggcagcggcaccggcaccaccggcagcagcggggccggcggccctggcacccctgggggcgcccagcgctgggccagcgagaagaagctgcctgagctggccgccggcgtggcccctgagccccccctggccacccgggccacagcccctcctggggtgctgaagatctttggagctggcctggccagcggggccaactacaagtctgtgctggccacagcccggagcacagcccgggagctggtggccgaggccctggagagatatggcctggccggcagccctgggggcggccctggagagagcagctgtgtggatgcctttgccctgtgtgatgccctgggccggcctgctgctgctggggtgggcagcggggagtggagggctgagcacctgcgggtgctgggggacagcgagcggcccctgctggtgcaggagctgtggagggcccggcccggctgggccaggagatttgagctgcggggccgggaggaggcccggcggctggagcaggaggccttcggggctgctgacagcgagggcaccggggcccccagctggaggccccagaagaacagaagccgggccgccagcggcggggccgccctggccagccctggccctggcaccggcagcggggccccagctggcagcggcggcaaggagaggtctgagaacctgagcctgcggcgctctgtgtctgagctgagcctgcagggcagaagaagacggcagcaggagcggcggcagcaggccctgtccatggcccctggagctgctgatgcccagatcggcacagctgaccccggggactttgaccagctgacccagtgcctgatccaggcccccagcaaccggccctacttcctgctgctgcagggctaccaggatgcccaggactttgtggtgtatgtgatgacccgggagcagcacgtgtttggccggggcggcaacagcagcggccggggcggcagccctgccccctacgtggacaccttcctgaatgccccagacatcctgcccaggcactgcaccgtgcgggccggccctgagcacccagccatggtgcggcccagcagaggagcccctgtgacccacaacggctgcctgctgctgcgggaggccgagctgcaccctggggacctgctgggcctgggggagcacttcctgttcatgtacaaggaccccaggactggaggcagcggccctgcccggcccccctggctgcctgcccggcctggggccaccccacctggccctggctgggccttcagctgccgcctgtgtggccggggcctgcaggagcggggggaggccctggccgcctacctggatggccgggagcctgtgctgcgcttccggccccgggaggaggaggccctgctgggggagatcgtgcgggctgctgctgctggcagcggggacctgccccccctgggccctgccaccctgctggccctgtgtgtgcagcacagcgcccgggagctggagctgggccacctgccccggctgctgggccgcctggcccggctcatcaaggaggccgtgtgggagaagatcaaggagattggagaccggcagcctgagaaccaccctgagggcgtgcctgaggtgcccctgaccccagaggccgtgtctgtggagctgcggcccctgatgctgtggatggccaacaccacagagctgctgagctttgtgcaggagaaggtgctggagatggagaaggaggccgaccaggaggacccccagctgtgcaatgacctggagctgtgtgatgaggccatggccctgctggatgaagtcatcatgtgcaccttccagcagagcgtgtactacctgaccaagaccctgtacagcaccctgcctgccctgctggacagcaaccccttcaccgctggagctgagctgcccggccctggagctgagctgggcgccatgcctcctggcctgcggcccaccctgggcgtcttccaggccgccctggagctgaccagccagtgtgagctgcacccagacctggtgtcccagaccttcggctacctgttcttcttcagcaatgccagcctgctgaacagcctgatggagcggggccagggccggcccttctaccagtggagcagagctgtgcagatccgcaccaacctggacctggtgctggactggctgcagggcgccggcctgggggacatcgccacagagttcttcaggaagctgtccatggctgtgaacctgctgtgtgtgcccaggaccagcctgctgaaggcctcctggagcagcctgaggacagaccaccccaccctgaccccagcccagctgcaccacctgctgagccactaccagctgggccctggccggggccccccagctgcctgggaccccccacctgctgagcgggaggccgtggacacaggagacatctttgagagcttcagcagccaccccccactcatcctgcccctgggcagcagccggctgcggctgaccggccctgtgacagatgatgccctgcaccgggagctgcggcggctgcggcggctgctgtgggacctggagcagcaggagctgcctgccaactacagacatggcccccctgtggccaccagcccctag

SEQ ID NO: 195171 - DNA, 2892 bp, Artificial Sequence
  derived and/or modified sequence
atgctgagcggcgagcggaaggagggcggcagcccccggttcggcaaacttcatctgccggtggggctatggatcaattctccgaggaagcagttagccaaactgggaagacgttggcccagcgccgcatctgtgaagagttcgagctccgacaccggctcccgcagcagcgagcccctgcctccgccgcccccacatgtagagctccggcgggtgggtgcagtaaaggcagctggaggagccagcggcagccgcgcgaaacgcatatctcagctgttccgaggatctggtactgggaccactggaagctccggcgctggcggcccgggaacacccggaggcgcccagaggtgggcctcggaaaaaaaactccctgagcttgcagcaggagtggccccggagcctcccctcgcaacccgggcgacagcaccaccgggcgtgctgaaaatattcggggccggcctggcctctggcgccaactacaagtcagtcctggctactgctcgctcaacagcgcgggaactggtggctgaggcattagaaaggtatggactggccggcagcccaggcggggggcccggcgagtccagctgtgtggatgcattcgctttatgcgatgctctgggacgacccgcggctgctggagtgggatccggtgagtggagagccgagcacctcagagtgttaggtgatagcgaaaggccactgctagtgcaagaattatggcgggcacgacctggctgggctagaagattcgaactgcgcgggagggaagaagcacggaggttggaacaggaagccttcggcgctgccgactcggagggaaccggtgcgccaagctggagacctcagaaaaatcggagtagggccgcttctggaggggcggccctggcttctcctggccctgggacaggctcgggggcgccagcaggatccggcggaaaggagcgatctgaaaacttgagtctgcggcggtccgtctcagagcttagtctgcaagggaggcgcaggcgccagcaggaaaggcggcaacaggctctttcgatggccccaggtgcagccgatgctcagataggtaccgcagaccctggagactttgatcagcttacccagtgtctgattcaagcaccgtcaaacaggccatactttttactgttgcaggggtatcaggatgctcaggacttcgttgtgtacgtcatgacgcgcgaacagcacgtgtttggacgcggcgggaactccagcgggcgaggcggttcccccgccccgtatgtagatacctttttgaacgctcccgacatactgccacgacattgcacagtgagagctggcccagagcatcccgcgatggtgaggccaagccgaggagcccctgtgacccacaacgggtgcctgttgctgagggaggcggagctgcatccaggagacctgttgggtctgggcgaacacttcctctttatgtacaaagacccgcgcactggcggctctgggcccgcacgacctccctggttgcctgcacgccctggcgcaaccccacccggtcctggatgggcattcagttgcagactttgcgggcggggtctccaggaacgtggggaagcactggccgcatatctcgatggaagggaacccgtcctccgttttagaccgcgagaggaagaagcactcctaggggaaatagttcgtgccgctgctgctggtagcggcgatctgcctcctctgggccccgccacccttctggctttgtgcgttcagcactcagctcgcgaattagagctggggcacctccccaggttactgggcaggctggcccgactgataaaagaagccgtctgggagaagatcaaagagatcggggaccgccagcctgagaaccatcctgaaggggttcctgaagtgcctctaactccagaggcggtcagcgttgagctaagacctctgatgctgtggatggctaatactactgagctcctgagtttcgttcaagagaaagttttggaaatggaaaaggaggccgatcaggaggacccccagctttgtaatgacctggagctgtgcgatgaggcaatggctctgctcgacgaggtaatcatgtgcacatttcagcagtcagtgtactatttaacaaagaccttgtacagcaccttgcctgcactgttggactcaaacccatttacggcaggagcggagctcccaggaccaggggccgagctgggcgctatgccccctggactcagacccaccctgggcgtgtttcaggcagctctggaactcacatcccagtgtgagttacatcccgatctggtgagccagacgttcggttatttattcttcttcagcaatgcctccttgcttaactcactcatggagaggggccagggtcggccattttatcagtggtctagggctgtacagatccgaacaaacctggatctcgtacttgactggttgcaaggagctggccttggggacattgcaacggagttttttcgcaagctatccatggcggtaaacttactgtgtgtgccaaggacttcgctcttgaaggcctcttggtcaagcctgcggactgatcaccccactttgactcccgctcagttgcaccacttgctcagccattatcagttggggccagggagaggtcctccagcagcctgggaccctccccccgctgagcgcgaggctgttgacacaggagatattttcgagtcattctcttctcatccgccactcatcttacctctcggcagttcaagacttaggcttaccgggcccgtgaccgacgatgctctacatcgagaactccgccggctgagacgtctgctatgggatctggaacagcaggaactgcctgccaattacaggcatgggccgccagttgcgactagcccttag

SEQ ID NO: 195172 - DNA, 2892 bp, Artificial Sequence
  derived and/or modified sequence
atgttgagcggcgaacgcaaggaaggaggaagccctcgatttgggaagctgcacctgccggtgggtctctggattaacagcccgaggaagcagctggctaaactcggacgtcgctggccgtctgccgcttccgtgaagtcatcttcgagtgacacgggctccaggagtagcgagcctctgccacctcctccacctcacgtggagttgcgacgcgtgggcgcagtgaaagccgcaggaggcgctagtgggagccgtgcgaaaagaatctcacagttgtttaggggctcaggaaccggcacaaccggaagttccggcgcagggggacccggtaccccgggtggcgcacagcggtgggcaagcgagaagaagcttccagagctcgccgctggcgtggccccagaaccacctttggccacacgggctacagctcccccaggcgtcctcaaaattttcggtgcaggattggccagcggcgctaactacaagtctgtcttggcaacggccaggagtacagctcgcgagcttgtggctgaggcactcgaaaggtacggcctcgccggtagcccaggaggcggtccaggcgagtccagctgcgttgacgcatttgctctgtgcgacgccttgggcagaccagctgccgctggagtggggagtggtgagtggagggcggaacatctacgcgtgctgggtgattccgagcggccactgctggtccaggagctgtggcgggctcgcccaggctgggcaaggcgttttgaactcaggggcagagaggaagctagaaggcttgaacaggaggcgtttggagctgcagatagtgaaggaactggcgctccatcgtggcgaccacagaaaaatagatcccgggcagcgtctggaggtgcagcccttgcttcccccggaccgggaactggctctggtgctcctgctggatccgggggtaaagagagaagcgaaaacctgagcctccgcagatccgtctcggagctgagccttcagggacgacgcaggagacagcaggaaagacggcagcaggctctgagtatggccccaggcgcagctgacgcccagatcgggaccgccgatcccggagatttcgatcagctgactcagtgtctcatccaggccccttcgaaccgcccatactttcttcttctacagggttatcaagatgcacaagatttcgttgtgtatgtcatgacaagggagcagcacgtcttcgggcgtggtggaaacagctctggacggggtggctctccagccccatatgtagacacatttctcaacgccccagacatccttcctcggcactgtaccgtgagagccggacccgaacacccggcaatggtacggccaagtaggggtgcccctgttacacacaacggctgtctgcttcttcgagaggcagagctccatccaggcgatttacttggccttggcgagcacttcttattcatgtataaagatcccagaactgggggatctggacctgccagacctccctggttgcccgcacggcctggagctactcctcccggtcccggatgggcattcagttgtcggctgtgtgggagggggctacaggagcggggtgaagcccttgctgcctacctggacggccgtgaaccagttcttaggtttcgcccacgggaggaggaggctctgctgggtgagatcgtgcgggcagccgctgctggatctggcgatctacctcccctcggccctgcaactctcttggccctgtgcgtccagcacagcgcacgagaacttgaactagggcatcttcctcgtctcctcggccgacttgccagactgattaaagaggctgtatgggagaaaattaaggagataggtgatcgtcaaccagaaaaccatcctgaaggcgtgccggaggtgcccttaacccctgaagcagttagtgtcgagctcaggccacttatgctgtggatggccaatactaccgagctgctgagctttgttcaggaaaaagtgttagagatggaaaaggaagctgatcaagaagacccacagctgtgcaatgacttggagctctgtgatgaagctatggccctgcttgatgaagtcattatgtgcaccttccagcaaagcgtgtattacttaacaaagactctgtactcaacattgcctgcactgctggacagcaatcccttcacggctggggctgaactccctggcccaggtgccgagctgggggcaatgccacctggcctcaggcccaccctgggtgtgtttcaggcagcgctcgaattaacaagccagtgcgagctgcatcctgatctggtgagccaaactttcggctacctgtttttctttagcaacgcttcgcttctgaatagtttaatggagaggggacagggtcggccattctatcagtggtcaagagccgtacaaattcgtaccaacctggatttggtgttggattggcttcagggcgcaggactgggagacattgcgactgagtttttcaggaagctgagtatggccgtgaatcttctttgtgtccccagaacttcattattgaaggcctcttggtcttcactccgaaccgaccatccaacactcacacccgcacagctacaccatttactgagtcactaccagctgggacctggacgtggcccacctgccgcatgggatcccccaccggctgaacgggaagccgttgacacaggggacatttttgagtcattttcctcccatccgccactgattttgcccctgggtagtagtagacttcgactcactgggccagttactgatgatgccttgcacagagaactgcgaaggctgaggcggctgctgtgggatctggagcagcaggagctgccggcaaactatcgccacggaccgcctgttgccacctcaccatag

SEQ ID NO: 195173 - DNA, 3301 bp, Artificial Sequence
  derived and/or modified sequence
caaccctacccagatctcctcccccaggcctggtctcctcacaggacgccccctccccgctcttcctgccgggtttcctcttgccttttcctgtcccccacccagtgctgggagccgtggcagaggcaagagcagtggaactgacccaggccagtggagccagggcctccgggtgtgccggacccgaagcaggggccatgctgtctggtgaacggaaggagggcggaagcccccgcttcgggaagcttcatctccccgtgggcctgtggatcaattcccccaggaagcagctggcgaagctggggcggcgctggcccagcgcagcctctgtcaagtcttcttcgtcggacacggggagccgcagcagcgagccgctacctccgcccccgccgcacgtggagctgcggcgagtgggcgctgtcaaggcggccgggggagcctccggtagccgcgccaagcgcatctcccagctcttccggggctcggggaccgggaccacggggtccagcggcgcaggaggccctgggaccccggggggcgcgcagcgctgggccagcgagaagaagctgccggagctggcggcgggcgtggcccccgagcccccgctggctacccgcgccacggcgcctccgggggtcctcaagatcttcggcgccggactggcatcgggcgccaactacaagagcgtgctggccacggcgcgctccacggcgcgcgagctcgtggccgaggcgctagagcgctacggcctagcaggcagccccggcggtggccccggcgagagcagctgcgtggacgccttcgctttgtgcgacgctctgggccggcccgcggcggcgggcgtgggaagcggcgagtggcgggcggagcacctgcgcgtgctgggcgactccgagcgcccgctgctggtgcaggagctgtggcgggcgcggcccggctgggcgcggcgcttcgagttgcgcggccgcgaggaggcgcggcgcctggagcaggaggccttcggggccgcggacagcgaaggcaccggcgccccttcgtggcggccacagaagaaccgctcccgggcggcgtcgggtggggcagcgctggccagtcctggcccggggaccggatcaggggccccagctgggtctggaggcaaggagcgctcagaaaacttgtctttgcggcgcagcgtgtcggagcttagccttcaggggcggcggcggcggcagcaggagcggagacagcaggcacttagcatggccccaggggcagccgacgcccaaatcggaactgcagaccccggggacttcgatcagttgactcagtgcctcatccaggcccccagcaaccgcccctacttcctgctgctccagggctaccaggacgcccaggactttgtggtgtatgtgatgacgcgagagcagcacgtgtttgggcgaggtgggaactcgtctggccgcggggggtccccggctccctatgtggacaccttcctcaacgccccggacatcctgccgcgtcactgcacagtgcgcgcgggccctgagcacccggccatggtgcgcccgtcccggggcgccccagtcacgcacaacgggtgcctcctgctgcgggaggctgagctgcacccgggcgacctcctggggctgggcgagcacttcctgttcatgtacaaggacccccgcactgggggctcggggcctgcgaggccgccgtggctgcccgcgcgccccggggccacgccgccaggccctggctgggccttctcctgtcgcctgtgcggccgcggcctgcaggagcgcggcgaggcactggccgcctacctggacggccgtgagccagtcctgcgcttccggccgcgcgaggaggaggcgctgctgggcgagatcgtgcgcgccgcagccgccggctcgggagacctgccgcccctcgggcccgccacgctgctggcgctgtgcgtgcagcattccgcccgtgagctggagctgggccacctgccacgactgctgggccgcctggcccggctcatcaaggaggccgtctgggaaaagattaaggaaattggagaccgtcagccagaaaaccaccctgagggggtccccgaggtgcccctgactcctgaagctgtgtctgtggagctgcggccactcatgctgtggatggccaacaccacggagctgcttagctttgtgcaggagaaggtgctggaaatggagaaggaggctgaccaagaggacccacagctctgcaatgacttggaattatgtgatgaggccatggccctcctggatgaggtcatcatgtgtaccttccagcagtctgtctactacctcaccaagactctctattcaacgctgcctgctctcctggatagtaaccctttcacagctggtgcagagctgccggggcctggcgcggagctgggggccatgcctccaggattgagacctaccctgggcgtgttccaggcagccttggagctgaccagccagtgcgagctgcaccctgacctcgtgtctcagacttttggctacttgttcttcttctccaacgcatcccttctcaactcgctgatggaacgaggtcaaggccggcctttctatcaatggtcccgagctgttcaaatccgaaccaacctggacctcgtcttggactggctacagggagctgggctgggcgacattgccactgagttcttccggaaactctccatggctgtgaacctgctctgtgtgccccgcacttccctgctcaaggcttcatggagcagcctaagaaccgaccaccccaccttgacccccgcccagctgcaccatctgctcagccactatcagctgggccctggccgcgggccgccagccgcgtgggaccctccccctgcagagcgggaggctgtggacacaggggacatcttcgaaagcttctcctcgcacccgcccctcatcctccccctggggagctcgcgcctgcgcctcactggtccagtgacggacgatgccttgcaccgtgaactccgtaggctccgccgcctcctctgggatcttgagcagcaggagctgccagccaattatcgccatgggcctcccgtggccacgtctccttgagaaccaataccaaacgagcgcgcgaaccttgaaatgtcacgggcttctacggacaggagcccgcctgagcgcaaagctttctgggagttgtagttcttatcccgcgtggaatgttgggagattgagttttcgggaagtagcggatgggacggtgggagcatgggcttaggatgtgaatgccagggagcaataaaggtatccgtggtatcggc

SEQ ID NO: 195174 - protein, 335 aa, Artificial Sequence
  derived and/or modified sequence
MPAVLGFEGSANKIGVGVVRDGKVLANPRRTYVTPPGTGFLPGDTARHHRAVILDLLQEALTESGLTSQDIDCIAYTKGPGMGAPLVSVAVVARTVAQLWNKPLVGVNHCIGHIEMGRLITGATSPTVLYVSGGNTQVIAYSEHRYRIFGETIDIAVGNCLDRFARVLKISNDPSPGYNIEQMAKRGKKLVELPYTVKGMDVSFSGILSFIEDVAHRMLATGECTPEDLCFSLQETVFAMLVEITERAMAHCGSQEALIVGGVGCNVRLQEMMATMCQERGARLFATDERFCIDNGAMIAQAGWEMFRAGHRTPLSDSGVTQRYRTDEVEVTWRD

SEQ ID NO: 195175 - DNA, 1008 bp, Artificial Sequence
  derived and/or modified sequence
atgcctgctgtcctgggctttgagggatccgccaataagattggagtcggtgtcgtgcgcgatggtaaagtgcttgctaatccaagaaggacatatgtgactccccccggaactggctttctgcccggcgacactgccaggcaccaccgcgctgtgatcctggatctgctgcaggaagcccttacagaaagcggactcaccagccaggatattgattgtattgcctacaccaagggtcctggaatgggcgcccctcttgtgtcagtggctgtagtggccaggacggtggcgcaactctggaacaagcccctcgtgggggtcaatcactgcatcggtcatattgaaatgggtcgtctgatcacaggtgcgacatctcctacggtgctttatgtgagcgggggtaacacccaggtgatcgcatacagtgagcatagatatagaatcttcggagagactatcgacatagcagtagggaattgtctggacagatttgccagagtgcttaaaatatcaaacgacccctcccccggctataacatagaacagatggccaagcgcggcaaaaagctggttgagctcccttatactgtgaagggcatggacgtctccttctctggcatcctctcgtttatcgaggacgtcgcccaccggatgctggcaactggggagtgtacacccgaagacctgtgtttctcacttcaggaaacggtctttgccatgctggtggagataaccgaaagggccatggctcactgcggaagccaggaggctctgatagttggcggggtgggatgtaacgtgcgccttcaagagatgatggccacgatgtgccaggaacgtggcgcgcgcctctttgcaactgatgaaagattttgcatagacaacggggccatgattgcacaggccggctgggagatgttccgggcgggccataggacacccctgagtgactccggcgtgacacagagatacaggactgacgaggtggaagtgacctggcgggattag

SEQ ID NO: 195176 - DNA, 1008 bp, Artificial Sequence
  derived and/or modified sequence
atgcctgctgtgctgggctttgagggcagcgccaacaagattggagtgggcgtggtgagagatggcaaggtgctggccaaccccaggaggacctacgtgaccccacctggcaccggcttcctgcccggggacacagcccggcaccacagagctgtgatcctggacctgctgcaggaggccctgacagagagcggcctgaccagccaggacatcgactgcatcgcctacaccaagggccctggcatgggcgcccccctggtgtctgtggccgtggtggccaggacagtggcccagctgtggaacaagcccctggtgggcgtgaaccactgcatcggccacatcgagatgggccgcctcatcactggagccaccagccccaccgtgctgtatgtgtctgggggcaacacccaggtgattgcctacagcgagcaccgctaccgcatctttggagagaccattgatattgctgtgggcaactgcctggacagatttgcccgggtgctgaagatcagcaatgaccccagccctggctacaacatcgagcagatggccaagaggggcaagaagctggtggagctgccctacacagtgaagggcatggatgtgtccttcagcggcatcctgtccttcattgaagatgtggcccacaggatgctggccactggagaatgtaccccagaggacctgtgcttcagcctgcaggagaccgtgtttgccatgctggtggagatcacagagcgggccatggcccactgcggcagccaggaggccctgattgtgggcggcgtgggctgcaatgtgcggctgcaggagatgatggccaccatgtgccaggagcggggggcccggctgtttgccacagatgagcgcttctgcatcgacaatggagccatgattgcccaggccggctgggagatgttccgggccggccacaggacccccctgagtgacagcggcgtgacccagcgctacagaacagatgaggtggaggtgacctggagggactag

SEQ ID NO: 195177 - DNA, 1008 bp, Artificial Sequence
  derived and/or modified sequence
atgcccgccgtgctgggcttcgagggcagcgccaacaagatcggcgtgggggtcgttcgggacgggaaggtactggccaatccacgacggacatacgtgactccccccggaaccgggtttctgccgggcgatactgcccgccatcatagagccgtcatcctagatttactgcaggaggcgcttacggaaagcggactcacgagccaggacatagactgtattgcatacacgaagggtccaggcatgggcgccccccttgtgtctgtggcggtggtcgcacgaacggtggcacaactgtggaataaacctcttgttggagtgaatcactgcatagggcatatcgagatgggaaggctgatcactggcgcaacctcacctacagtgctatatgtgtcaggtggcaatacccaggttatcgcttactcagaacacaggtataggatcttcggcgagaccattgacatcgccgtgggcaattgcctggaccggttcgctcgggtcctgaagatctccaatgacccatctcctggctacaatatcgagcaaatggcaaagagaggcaaaaagttggtcgagcttccatacaccgtgaaaggcatggacgtgtcattttccggaatcctgtctttcatcgaggacgtcgcacatagaatgctggccaccggagaatgtacacctgaagacctgtgcttctcccttcaggaaacagtgttcgccatgctggttgagatcaccgaacgtgctatggctcattgcgggtcccaggaggcacttattgtgggaggagtggggtgtaacgtgcggctccaggagatgatggcaaccatgtgtcaggagcgaggggccagattgttcgccacagacgagcgcttctgtatcgacaacggcgccatgattgctcaggcaggatgggagatgttcagagccggtcacagaaccccactctcagactccggtgtcacacagcgttataggactgacgaggtggaggtgacatggagggactag

SEQ ID NO: 195178 - DNA, 2002 bp, Artificial Sequence
  derived and/or modified sequence
ctcgcctccctcctctaattctctaggacacttaggtccccaaccctccctcgggctgtttatcgttgtgccagatgcacagcacattgtgtgacactgacttaagattctaactatgtgcaagagggaaaaaaacagtggagaaggctgggctggaccacgggaaagagataggaaaacggatacgaatgtaaggcacagagttggctcggcgtccctggcagttaggaagacaggtccctggaggggccttggcgggtctccgctcgcgggagttccgcggtgtctttcccagtgctatctgcaggctggccagcttcctctgcgctccggaaagctgcggcccagcgcggactagtgaggacctccacagctcctgacattgccaggagtcctgtcggcgttttctcccagcctccgccatgccggcggtgctgggttttgaaggcagcgccaataagattggcgtgggcgtggtgcgggatggcaaggtgctggcgaacccgcggcggacttacgtcacgcctcctggcacaggattccttccaggtgatacagccaggcatcaccgagctgttatcctagacctgctgcaggaggcactaacagagtctggattaacctcccaggatatcgactgcattgcatacaccaagggccctggcatgggtgccccactggtttctgtggctgttgtggcccgtactgtggcccaactgtggaataagccattggtgggtgtgaaccactgtataggccacattgagatgggccgcctcatcactggagccaccagcccaaccgtgttgtatgtgagtggaggaaatacgcaggtgattgcatactcggaacatcgttaccgtatctttggggaaaccatcgatattgcagtgggtaattgtctggatcgttttgctcgagtgctgaagatttctaacgacccaagtccaggatacaacattgaacagatggcaaagcgaggcaagaagctagttgagctgccatacactgtaaaggggatggacgtctcattctcagggatcctgtctttcattgaggatgtagcccatcggatgctggccacaggcgagtgtactcctgaggatctgtgtttctccctgcaggaaactgtgtttgcaatgctggtagagatcacagagcgagccatggcacattgtggctcccaggaggccctcattgtgggaggagtggggtgtaatgtgaggctacaggagatgatggcaacaatgtgccaggaacgtggagcccggctttttgctacagatgagagattctgtattgacaatggagcgatgatagcccaggctggctgggagatgtttcgggctggacacaggaccccactcagtgattctggggttacacagaggtatcggacagatgaagtagaggtgacctggagggactaataagatcaacagaatcagagtagatagttccttaatcggaacccaaaggaccccgtgcctcaatctctatcctgatgtcatgggagtcctagcaaagctatagactccaagcaaggcttggggtcctttatggaaccccaggatgactcagcaataaaatatttttggttttttggttttgtatgttggtgattggattgtgttgttcaggaccaatgtagatttggtgctggataaattcttgttggagcttgctgctgtggaaccaagaatgaggtatctttttttttttttttaagaaacggaatcttgctgtgtttcccaggctggtctcgaactgggctcaagcagtcttaccacctcagcctcctgagtaaggatgccattgtgcctggcaacaatagtagtatcataactattattatagcatcgggtcccgtgctaactgctttacattcattctctcatttaaattctttgaagtaggtgtgcaagacttctctcaaaatagcctggaggctcacacctgttatcccagtgctgtgggaggccaagtcaggaggatcccttga

SEQ ID NO: 195179 - DNA, 1008 bp, Artificial Sequence
  derived and/or modified sequence
atgcccgctgtgctgggatttgaaggctcagctaataagatcggtgtgggcgtggtgagagacgggaaagttctcgccaaccccaggaggacgtacgtgacgccccctggcacaggcttcctgcctggagatacagcccgtcaccaccgcgctgtgattttggatctgctgcaagaggcactgaccgagtctggactgactagccaggatattgattgtatcgcatatacaaagggcccagggatgggcgcaccactggtctctgtggccgtcgttgctagaactgtggcccaactatggaacaagccgctcgtcggcgtaaatcactgcatcggacacatcgaaatggggaggctgatcacaggggctacatccccgaccgtattgtatgtgagtgggggaaacactcaggtcatagcttatagcgagcacagataccgaattttcggggagactattgacatcgctgtcggtaattgcctcgatcggttcgcacgcgttttgaaaatttccaatgatccttcccccggatacaacatcgagcagatggccaaacgagggaagaaactggtcgagcttccctacactgtgaaaggtatggacgtgagcttctccggcattttgagttttatagaagacgttgcacatcgcatgctagccacaggtgaatgcaccccggaagatttatgtttctcactgcaggagactgtgttcgctatgcttgtggagatcactgaacgagccatggcccactgtggcagtcaggaggcccttatcgttggcggtgtgggatgcaatgtgcgtttacaagaaatgatggccactatgtgtcaggagagaggcgctaggctttttgctactgacgagagattctgcattgacaatggggctatgatcgcccaggccggatgggaaatgtttagagccggtcaccggacaccactgagtgacagtggagtgacacagcgctatcgaaccgacgaggtggaggtgacctggagggactag

SEQ ID NO: 195180 - DNA, 1008 bp, Artificial Sequence
  derived and/or modified sequence
atgcccgccgtgctgggcttcgagggcagcgccaacaagatcggcgtgggcgtggtgagagacggcaaggtgctggccaaccccagaagaacctacgtgaccccccccggcaccggcttcctgcccggcgacaccgccagacaccacagagccgtgatcctggacctgctgcaggaggccctgaccgagagcggcctgaccagccaggacatcgactgcatcgcctacaccaagggccccggcatgggcgcccccctggtgagcgtggccgtggtggccagaaccgtggcccagctgtggaacaagcccctggtgggcgtgaaccactgcatcggccacatcgagatgggcagactgatcaccggcgccaccagccccaccgtgctgtacgtgagcggcggcaacacccaggtgatcgcctacagcgagcacagatacagaatcttcggcgagaccatcgacatcgccgtgggcaactgcctggacagattcgccagagtgctgaagatcagcaacgaccccagccccggctacaacatcgagcagatggccaagagaggcaagaagctggtggagctgccctacaccgtgaagggcatggacgtgagcttcagcggcatcctgagcttcatcgaggacgtggcccacagaatgctggccaccggcgagtgcacccccgaggacctgtgcttcagcctgcaggagaccgtgttcgccatgctggtggagatcaccgagagagccatggcccactgcggcagccaggaggccctgatcgtgggcggcgtgggctgcaacgtgagactgcaggagatgatggccaccatgtgccaggagagaggcgccagactgttcgccaccgacgagagattctgcatcgacaacggcgccatgatcgcccaggccggctgggagatgttcagagccggccacagaacccccctgagcgacagcggcgtgacccagagatacagaaccgacgaggtggaggtgacctggagagactag

SEQ ID NO: 195181 - protein, 238 aa, Artificial Sequence
  derived and/or modified sequence
MAQQQMTSSQKALMLELKSLQEEPVEGFRITLVDESDLYNWEVAIFGPPNTLYEGGYFKAHIKFPIDYPYSPPTFRFLTKMWHPNIYENGDVCISILHPPVDDPQSGELPSERWNPTQNVRTILLSVISLLNEPNTFSPANVDASVMFRKWRDSKGKDKEYAEIIRKQVSATKAEAEKDGVKVPTTLAEYCIKTKVPSNDNSSDLLYDDLYDDDIDDEDEEEEDADCYDDDDSGNEES

SEQ ID NO: 195182 - DNA, 717 bp, Artificial Sequence
  derived and/or modified sequence
atggcccagcagcagatgaccagcagccagaaggccctgatgctggagctgaagagcctgcaggaggagcccgtggagggcttcagaatcaccctggtggacgagagcgacctgtacaactgggaggtggccatcttcggcccccccaacaccctgtacgagggcggctacttcaaggcccacatcaagttccccatcgactacccctacagcccccccaccttcagattcctgaccaagatgtggcaccccaacatctacgagaacggcgacgtgtgcatcagcatcctgcacccccccgtggacgacccccagagcggcgagctgcccagcgagagatggaaccccacccagaacgtgagaaccatcctgctgagcgtgatcagcctgctgaacgagcccaacaccttcagccccgccaacgtggacgccagcgtgatgttcagaaagtggagagacagcaagggcaaggacaaggagtacgccgagatcatcagaaagcaggtgagcgccaccaaggccgaggccgagaaggacggcgtgaaggtgcccaccaccctggccgagtactgcatcaagaccaaggtgcccagcaacgacaacagcagcgacctgctgtacgacgacctgtacgacgacgacatcgacgacgaggacgaggaggaggaggacgccgactgctacgacgacgacgacagcggcaacgaggagagctag

SEQ ID NO: 195183 - DNA, 717 bp, Artificial Sequence
  derived and/or modified sequence
atggcacaacagcagatgacatcttcgcagaaggcactcatgctcgaactgaaatcactgcaggaagagcctgtggaaggatttcgaatcacactagtagacgagagcgacctgtataattgggaagtcgccatttttgggcctcctaataccctctatgagggaggttattttaaagcacatataaagtttcccatagactacccttacagtccccctacatttcgttttctcaccaagatgtggcaccctaatatctacgagaacggagatgtgtgtatttccatcttgcacccgccagtggacgacccgcagtccggagagttaccaagtgaaagatggaatccaacacagaacgtaaggaccattctgttgtctgtgatcagcttgctgaacgaaccaaataccttctcccctgccaacgtggatgctagcgtcatgtttaggaagtggagagattcaaaagggaaggacaaagagtacgccgagatcattagaaaacaggtgtcagccaccaaagcagaggcagagaaggacggggtgaaagttccaacaactctcgcggaatattgtataaagacgaaggtgcctagtaatgataattcgtccgatctgctgtacgacgatttatacgatgacgacatcgacgacgaggatgaggaggaagaagatgctgattgctatgacgatgacgacagcggaaatgaagagtcatag

SEQ ID NO: 195184 - DNA, 717 bp, Artificial Sequence
  derived and/or modified sequence
atggcccagcagcagatgaccagcagccagaaggccctgatgctggagctgaagagcctgcaggaggagcctgtggagggcttccgcatcaccctggtggatgaaagtgacctgtacaactgggaggtggccatcttcggcccccccaacaccctgtatgaaggaggctacttcaaggcccacatcaagttccccatcgactacccctacagcccccccaccttccgcttcctgaccaagatgtggcaccccaacatctatgaaaatggagatgtgtgcatcagcatcctgcacccccctgtggatgacccccagagcggggagctgcccagcgagcgctggaaccccacccagaatgtgaggaccatcctgctgagcgtcatcagcctgctgaatgagcccaacaccttctccccagccaacgtggatgcctctgtgatgttcaggaagtggagggacagcaagggcaaggacaaggagtatgcagagatcatcaggaagcaggtgtctgccaccaaggccgaggccgagaaggatggagtgaaggtgcccaccaccctggccgagtactgcatcaagaccaaggtgcccagcaatgacaacagcagtgacctgctgtatgatgacctgtatgatgatgacattgatgatgaagatgaggaggaggaggatgctgactgctatgatgatgatgattctggaaatgaggagagctag

SEQ ID NO: 195185 - DNA, 717 bp, Artificial Sequence
  derived and/or modified sequence
atggcccagcagcagatgaccagcagccagaaggccctgatgctggagcttaagagtttgcaagaagaacctgtcgaggggttcagaatcacattagttgatgagtcagatctctacaactgggaggttgccatcttcggccctcccaacaccctttatgaaggaggctacttcaaggcccatatcaaatttcccatcgactacccctactctccccctacctttagattcttaaccaaaatgtggcaccccaatatatatgagaatggagacgtttgtatctctattctccatccaccagtggatgacccacagagtggtgagctaccgagcgaacgatggaatccaacccagaacgtgcgcaccatccttctgagcgtcatctcccttttgaatgagcctaacacgttcagtccagcgaacgttgatgcttcggttatgttcaggaaatggcgcgacagcaagggtaaggataaggaatacgccgaaatcatacgcaaacaggttagcgcaaccaaggccgaggccgaaaaggacggcgtgaaagtgccgaccactctagcagagtactgtatcaaaaccaaggtgccgtccaacgacaactcatcagacctgctgtacgatgacttgtatgatgacgatattgatgatgaagacgaagaagaagaggatgcggattgctatgatgatgatgattcaggcaacgaggaaagctag

SEQ ID NO: 195186 - DNA, 717 bp, Artificial Sequence
  derived and/or modified sequence
atggcacagcaacagatgaccagctctcagaaggcgcttatgctagagcttaagtcactccaggaagagccagtggaaggcttcagaattaccctggtggatgagtctgacttgtataactgggaggtggccatcttcgggccacccaataccctgtatgagggcggttattttaaggcccacattaagtttcccatcgattacccttatagcccccctacctttagattcttgacaaagatgtggcaccctaatatctatgaaaatggcgacgtgtgtattagcatcttacacccccctgtcgatgacccccaaagcggggagttgccttcagagcgttggaatccaacccagaatgtgaggactatcctcttgtctgtgattagcttactgaatgaacccaacactttcagtcccgcaaatgtggatgcgtcagtcatgttccgaaagtggcgagattcaaaggggaaagataaggagtatgctgaaatcatcaggaagcaggtctctgcaacaaaagccgaagccgagaaggacggagtgaaggtgccaactacactggctgaatactgtatcaagacaaaagtgcctagcaatgacaatagcagtgacctgctgtacgacgatctgtatgacgacgatatcgacgacgaagatgaagaggaggaagacgccgactgttatgatgatgatgatagtgggaacgaagaatcctag

SEQ ID NO: 195187 - DNA, 4075 bp, Artificial Sequence
  derived and/or modified sequence
tcgtgtgtgaggaggaccccgggcgggcccacgggccgtgtggggcctggtctggcccgccgggtgtgtgaagaccggggcccggtgctgcccggccggagggcgagcggaggggaggggcctggtccggcccggccggtgcgtgaggactggggcccgggcccggcgccgccgccgccgccgccgccgcgatggcccagcagcagatgaccagctcgcagaaggccctgatgctcgagctgaaatccctgcaggaggaaccggtggagggcttccggatcaccctggtggacgagtccgacctctacaactgggaggtggccatcttcggaccccccaacaccctctacgaaggcggctacttcaaggcgcatattaaatttcctattgactacccctattcaccacctaccttcagattcttgaccaaaatgtggcaccccaacatttatgagaatggagatgtatgcatttcgattcttcatccgcctgtagatgacccacagagtggagaactgccttctgaaaggtggaatcctactcagaatgtgaggactatcctattaagtgtaatctcactgcttaatgagcccaacaccttctccccagccaatgtcgatgcttcagttatgttcaggaaatggagagacagtaaaggaaaagacaaagaatatgctgaaattattaggaaacaagtttcagccactaaggccgaagcagaaaaggatggagtgaaggtccccacaaccctggcggaatactgcatcaaaactaaagtgccttccaatgacaacagctcagatttgctttacgacgacttgtatgatgacgacattgatgatgaagatgaggaggaggaagatgccgactgttatgatgatgatgattctgggaatgaggagtcgtgacgtgctccttcagtgcccctgtactgccctgccatctcaggccaaagggaggggagcaagtggggacctggccatggcccctcagcaaaaacctattcacagcgggtggggaaacacacacagctcctgctgactccccttatggatctcagtttgctcctttttatggacctttaatggagagagagtaaccctccacagaatgtctgaattcttgcattctttacccttccatcactatattgattctttttttaaaaaatatgaacccaaactcccgcctcacttcgtctctacagaatgttcacagcaaaacacgtttggtctgtttttagattcttgaagaattcaatagtctttcaagatgtttaatgtgtttaaagctgggaacctgttgggagttcacaagtgctgcatatactgggtagcaaaagaaaatggaaaaaaacccacaaaacaaactttaaaaaaaaaaaaaaacaaatttgccaaggtttagctgctcatttacattagtgtgtgtgcattcgttcagccccatggtggtgaattctgtttctttcctttcctaaggctgggacatggtgggcatcagggactttgtgctaagcctgatgaaatgtgctccttcaatctccatgaaaccatcgtaacatggaggcctcagctgctctgaggagagaaatcagactttgttttttgaaatcgattgggatcgaaagcctgaaataaatattcatactttccatagaactgagcacttggttgctatttattttaaaggcagggttatttccccccagggagtggggcaagcggggaagttgggatgagtgcgtgtgggagcaaagagttaaaaatcactatgctaagtttggttgatgctactggggggaaaaagttgaaactactggtgaccactgttgggagaggaaacatctgttttatagatttagcatggccttcccatcaaaaatacactcgtaccatgacgttttgtttttgttttttaagtagccacttttaattactcagtattaatcctaggtgcatgtgttaagatttcggttttcatcgagctgcttatactgatagtgaaaaacttggatgtgtgtgagacgagttaccgccttcttcattggatgtgatctgaactttttttctcctttcaacatacttaggctgtggagtgcaagcagaattatgcatagaaattgtggcagggctgagggagttgactgcaggcagtttttaggccagataaggctagatcttcctgcaatgcacttgctgcagctttgattttccagatctcaatcgtgttgcttcaatcaatattgagatccagcagccttcaccatccaggagacttcagaacttgaaggtaatttttggttgttatgggggtgcaccagatcataggagggcattatttggaggaaaccgctataatgtaaaatcagatttcagaaggaaaatgcagcaaggactgactgtagtcctatttcagacccctgggcactagtgtcaactcctcctttggctcgtaactcagaaagaaccaaagggcagattagggacggggcaggagggatcctaggatggccagagtaggtgacgcttacttccttagctcctccttccattctgatctcagggttttcactcttcaaactcccaaacacatgacttcttcccagcagcccttcccggcctctaaagtttggtcccagcagcccttcccagcctctaaagtttggtctggtatgaaatgggactgtttaacaagcaaggctcttaggggacactgttgagcctggtcccagaatctgtgatctccacagggccagggttgctacttgcacccagaatctagtgattttagtcagatccatggaacagagcagcttcgtaatacattgtcaagttacctgattacaaactctcatagatgttggaactacctttttactccccatactttgtaagtaatgcttccagattaacctgcaaatcttgtggagccaaagcctctcacagtgctgatttacctcccccaaaatgcccccaaacccccatgcaagtttacagccagtagcttggtcttattctcttggagccctaaaattaagcctttcattcccctttgctaaagcatctcactcccagggcagccccagcaccctggcattgcgggaggtgctctgctgcacagctgttccatcaggccctattggcctctgttagacattgactcagggagccggagcgccaagtggaggttgtacctttcagccctttggggtgttaaaagtgtcaagggctgggtttgcctctgatgagtacaatcagttccagaagactgggtaagtctcttgctagcaggtggacattctggtattttagactgactgaacgaaacccagaggctggttccagagctctgtccctgagaacacatccctgtggaaaatacttgagtttgtaattttttttcccccttctgggagtggaggtctcaggctcaatccggaaccatgtacgtacagttttgcttattatttgatgtgacatgaactcaaaatcctgcatttttagattccttttagttctaattgaggcctcactagatgctcttcagttctgtgtattttgaggctgggtggagaagtatatgattctgctgttgattctttcagtcttccccccttctccttttatcaatcattccagagttattttctattagtcaaacttttttgtagaaccttctttcccttaccctggcaaattgcttctttacttgctggtttccttacgtttggggcacatgttgtaagaaactgattggaaggggaaatgtgcagctctccactggaaaggaactctccacccctcccatcctgataaaacaaacaaggtttacatttacaactaaaaggattcagatgcaattttcaactattctgaaaccagcaggacacacctgactttaatagttttagctgaaattgtagatgttttgcttcagtttaacttatgagaaaagattatctgacggattttgtgttgacttcccctttagtggtttattttgtctttttctgcccatctgtctactaataaaatgtgaaataaaatacctgtattgctacttccccatgaaa

SEQ ID NO: 195188 - protein, 227 aa, Artificial Sequence
  derived and/or modified sequence
MGGTTSTRRVTFEADENENITVVKGIRLSENVIDRMKESSPSGSKSQRYSGAYGASVSDEELKRRVAEELALEQAKKESEDQKRLKQAKELDRERAAANEQLTRAILRERICSEEERAKAKHLARQLEEKDRVLKKQDAFYKEQLARLEERSSEFYRVTTEQYQKAAEEVEAKFKRYESHPVCADLQAKILQCYRENTHQTLKCSALATQYMHCVNHAKQSMLEKGG

SEQ ID NO: 195189 - DNA, 684 bp, Artificial Sequence
  derived and/or modified sequence
atgggcggtacaacctcgaccagacgagtgacctttgaggctgacgagaatgaaaacatcaccgtggtgaaggggatccggctcagtgagaacgtcattgacaggatgaaggaatcgtccccgagtggctctaaatcccaaagatacagcggggcgtacggggcatccgtaagcgacgaggaattgaaacgaagggtagctgaggaactagctctggaacaggcaaagaaggaatccgaggatcagaaaagactgaagcaggccaaagagctcgaccgggaacgcgcagctgccaacgagcagcttacccgtgccatcctcagagagcggatctgttcagaagaagagcgagccaaggcgaaacatcttgctagacagcttgaagaaaaagacagggtcttgaaaaagcaagacgccttttacaaggaacagctagcccgcttagaggaaagaagcagtgaattctacagggtgacgacagaacagtaccagaaggcagccgaggaggtagaggccaaattcaagaggtacgagtcacacccagtgtgcgctgacttgcaggccaagatcttacagtgttatcgcgagaatactcaccagacactcaaatgctcggccctggctacccagtatatgcactgcgtcaatcatgccaaacaaagcatgctggagaaaggcggatag

SEQ ID NO: 195190 - DNA, 684 bp, Artificial Sequence
  derived and/or modified sequence
atgggcggcaccaccagcacccggcgggtgacctttgaagcagatgaaaatgaaaacatcaccgtggtgaagggcatccggctgtctgaaaatgtgattgacaggatgaaggagagcagccccagcggcagcaagagccagcgctacagcggggcctatggagcctctgtgtctgatgaggagctgaagagaagagtggccgaggagctggccctggagcaggccaagaaggagagcgaggaccagaagaggctgaagcaggccaaggagctggaccgggagagagctgctgccaatgagcagctgacccgggccatcctgcgggagcgcatctgcagcgaggaggagcgggccaaggccaagcacctggcccggcagctggaggagaaggacagagtgctgaagaagcaggatgccttctacaaggagcagctggcccggctggaggagaggagcagcgagttctacagagtgaccacagagcagtaccagaaggctgctgaggaggtggaggccaagttcaagagatatgagagccaccctgtgtgtgccgacctgcaggccaagatcctgcagtgctaccgggagaacacccaccagaccctgaagtgcagcgccctggccacccagtacatgcactgtgtgaaccacgccaagcagagcatgctggagaagggcggctag

SEQ ID NO: 195191 - DNA, 684 bp, Artificial Sequence
  derived and/or modified sequence
atgggcggcaccaccagcacccggcgggtgaccttcgaggccgacgagaacgagaacattacggtggtcaagggaatccgcctctctgaaaacgtgattgacagaatgaaagagagtagcccttcaggcagcaagagccagcgatacagcggggcatacggggcatcagtgagcgacgaagagcttaagcgtcgggtggctgaggaactggctttagaacaggctaaaaaagaatctgaagaccagaagcgcctcaagcaggctaaagagctcgacagagagagagctgctgccaacgagcaactgacgcgggctatccttagggagcgcatttgttcggaagaggaacgagccaaggcaaagcacctcgctcgtcagttagaggaaaaggatagagtgctgaaaaagcaggacgcattttacaaagagcagctcgcccgcttagaagaacgcagttctgaattttatagggtcaccaccgagcagtatcagaaggcggctgaggaagtggaagccaaatttaaacgttatgagtcacatccagtctgcgccgatctgcaggctaagatcctgcagtgttatcgcgagaatactcatcagactctgaagtgttcggcactggccacccagtacatgcactgcgtgaaccatgccaagcaatccatgcttgagaagggcggttag

SEQ ID NO: 195192 - DNA, 684 bp, Artificial Sequence
  derived and/or modified sequence
atggggggaacgacgtcaactcggagagtcacctttgaggcggacgagaacgagaacattaccgtggtgaaggggattcggctctcggaaaacgtgattgaccgtatgaaagaatcttcgccgtcgggatcaaaaagccaacgatactctggcgcatacggtgcgagcgtaagcgacgaagagctcaaacgccgtgtcgctgaagagttggcgttagaacaggctaagaaggaatcagaagatcagaagcgccttaagcaggcaaaagagttggatagagagcgggctgccgcaaatgaacaactgacacgggctatcctcagggaacgtatatgcagtgaagaagagcgcgcaaaagctaagcacctggccagacaactcgaggaaaaggaccgggtacttaagaaacaggacgcattctacaaagagcagctggctcgcctcgaagagcgctcctccgagttttatagggtgaccaccgagcagtaccagaaagcagcagaggaagttgaagccaaattcaagcgttacgagtctcatccggtgtgtgccgatctgcaggcaaaaattctacagtgctatagagagaacacccaccaaaccctgaaatgctccgccctagctacccaatatatgcactgtgtgaaccacgcaaagcagtccatgctcgagaaaggtggctag

SEQ ID NO: 195193 - DNA, 1598 bp, Artificial Sequence
  derived and/or modified sequence
cgccttctccttgcttctgggggtcgtggccttgctcccgctgtgcgggaaaagaatccaggcccttccacgcgcgtgtgggtgcgggggccccgaagtgctcgtggttccccgctaggtctccgctggggcaggaaccggaatcatgggtgggaccaccagcacccgccgggtcaccttcgaggcggacgagaatgagaacatcaccgtggtgaagggcatccggctttcggaaaatgtgattgatcgaatgaaggaatcctctccatctggttcgaagtctcagcggtattctggtgcttatggtgcctcagtttctgatgaagaattgaaaagaagagtagctgaggagctggcattggagcaagccaagaaagaatccgaagatcagaaacgactaaagcaagccaaagagctggaccgagagagggctgctgccaatgagcagttaaccagagccatccttcgggagaggatatgtagcgaggaggaacgcgctaaggcaaagcacctggctaggcagctggaagagaaagaccgagtgctaaagaagcaggatgcattctacaaagaacagctggctagactggaggagaggagctcagagttctacagagtcaccactgaacaatatcagaaagctgctgaagaggtggaagcaaagttcaagcgatatgagtctcatccagtctgtgctgatctgcaggccaaaattcttcagtgttaccgtgagaacacccaccagaccctcaaatgctccgctctggccacccagtatatgcactgtgtcaatcatgccaaacagagcatgcttgagaagggaggataaaaactttcagaatgagcaaaacaccatcaacgttaattccagagatggaacattttttttcctagtgagaaaacaacccatttgaagagaagaccactaatgagaagaccactaaagagagacatcaagaatggattcagcagaatcatttcacgttttgaacagcagcagtttgaagggccaaagccttgatcagggatcagtcattaaaggacactcttgagtattagtaaaccctcttatgatgattaaaagagaagggcagccctctccaccttttggtactttctattcaacttgcactgaccataaaatgtttctcttctgaacaagccccatcatttggtgaacctccaccctaacaaagtaggatggggttgggggctaaattaattggagtggggcgaggagagagccagaaaacatagatccgagggcagcagtgctgggtggagagagccagaaaacagatctggaggcagcagtgctggatggaattgtctaggctgtggcatgttggttttgtctttcttttctcctttgattatgtaagagctatttcattataacttattatggtgattatacaggcaagaagacaaaaaggagagaaaatgtacctcttctactggaataatgtttatgattacaagtgagataaggtatttttatcaatatgaaggcaaccttggctgataaaacctctatagtgaatactcacatctttacttcactcactatcaataataaatatattttctgacaaaga

SEQ ID NO: 195194 - DNA, 684 bp, Artificial Sequence
  derived and/or modified sequence
atgggcggcaccaccagcaccagaagagtgaccttcgaggccgacgagaacgagaacatcaccgtggtgaagggcatcagactgagcgagaacgtgatcgacagaatgaaggagagcagccccagcggcagcaagagccagagatacagcggcgcctacggcgccagcgtgagcgacgaggagctgaagagaagagtggccgaggagctggccctggagcaggccaagaaggagagcgaggaccagaagagactgaagcaggccaaggagctggacagagagagagccgccgccaacgagcagctgaccagagccatcctgagagagagaatctgcagcgaggaggagagagccaaggccaagcacctggccagacagctggaggagaaggacagagtgctgaagaagcaggacgccttctacaaggagcagctggccagactggaggagagaagcagcgagttctacagagtgaccaccgagcagtaccagaaggccgccgaggaggtggaggccaagttcaagagatacgagagccaccccgtgtgcgccgacctgcaggccaagatcctgcagtgctacagagagaacacccaccagaccctgaagtgcagcgccctggccacccagtacatgcactgcgtgaaccacgccaagcagagcatgctggagaagggcggctag

SEQ ID NO: 195195 - protein, 359 aa, Artificial Sequence
  derived and/or modified sequence
MAPMGIRLSPLGVAVFCLLGLGVLYHLYSGFLAGRFSLFGLGGEPGGGAAGPAAAADGGTVDLREMLAVSVLAAVRGGDEVRRVRESNVLHEKSKGKTREGAEDKMTSGDVLSNRKMFYLLKTAFPSVQINTEEHVDAADQEVILWDHKIPEDILKEVTTPKEVPAESVTVWIDPLDATQEYTEDLRKYVTTMVCVAVNGKPMLGVIHKPFSEYTAWAMVDGGSNVKARSSYNEKTPRIVVSRSHSGMVKQVALQTFGNQTTIIPAGGAGYKVLALLDVPDKSQEKADLYIHVTYIKKWDICAGNAILKALGGHMTTLSGEEISYTGSDGIEGGLLASIRMNHQALVRKLPDLEKTGHK

SEQ ID NO: 195196 - DNA, 1080 bp, Artificial Sequence
  derived and/or modified sequence
atggcaccaatgggcattagattgagtccattaggcgtcgcagtgttttgcttactgggtctcggggtgctctaccatttgtactctggatttttagctggccgcttttcactcttcggtcttggcggtgaaccaggggggggggcagccggccccgcggctgccgctgacggggggaccgtggatctcagagagatgttggccgtcagtgtgctggccgctgttcgggggggagatgaggttcgacgagtcagagaaagtaatgtgctgcacgagaagtcgaaaggcaagacacgtgagggagccgaagataaaatgaccagtggtgatgtgctttctaatcgcaagatgttctatctgcttaagactgctttcccgagtgtgcagatcaacactgaagaacacgtagatgccgccgaccaagaagttatcctgtgggatcacaagatacctgaggacatcctgaaggaagtgacaacaccaaaggaggttcctgctgagtcagtgactgtgtggatcgacccgctggacgcaacacaggagtacacggaggaccttcggaagtatgtaacaacaatggtatgtgtggccgtcaacggtaaaccaatgctcggggtcatccataagcctttttcagagtatacagcctgggccatggtagatgggggaagcaatgtcaaagctagatctagttataacgagaaaacgccaagaatcgtggtgagccgtagccactctgggatggtgaaacaagtggccctacagacgttcggaaatcagaccactattattcccgcgggcggcgccggctacaaagtccttgccctattggatgtcccagataagagccaggagaaggccgacctttacattcacgtgacctatattaaaaaatgggacatttgcgcaggcaacgctatcctgaaagcacttggtggacacatgaccacactgagcggagaagagatcagttatacaggcagtgatggcatcgaggggggcctccttgccagcatcaggatgaatcatcaggcattggtgcgaaaactgccagatctggagaaaaccggccacaaatag

SEQ ID NO: 195197 - DNA, 7199 bp, Artificial Sequence
  derived and/or modified sequence
ggaagtcggaccagccggccggcggaagaacctagagcgcgctgcctggcgagtcaggcgcgcggggcggcgttggtggtcttcgcggcgcaactcggcctttcctgggagggagtgatggggcgcaccggggccggggagcgggcgccagtgtagcccgcgcggcgcctggcccggagcgcggcggctgcggcggcggcggcggcgggcgctggaggcctgtgagagccgcagcccggagcgcccggcttcccacgccatggcccccatgggcatccgcctttccccactgggggtggcagtgttttgcctgctggggctcggcgtgctctaccacctctactcgggcttcttggccggccgcttcagcctcttcggcctgggcggcgagcctggcggcggcgcggcggggcccgcggccgcggccgatgggggcaccgtggacttgcgcgagatgctggctgtgtcagtgctggccgcagtccgcggcggcgacgaggtgaggcgcgtccgcgagagcaacgtcctccacgagaagtccaaggggaagacgcgcgagggagccgaggacaagatgaccagcggcgacgtgctgtccaaccgcaagatgttctacctgctcaagaccgccttccccagcgtccagattaatactgaggaacacgtggatgcagctgatcaggaggttatcttgtgggatcataagattcctgaggatatcctaaaggaagtaactactcctaaagaggtaccagcagaaagtgttactgtctggattgacccacttgatgctacacaggaatatacagaggatcttcgaaagtacgtcactactatggtgtgtgtggctgtaaatggtaaacccatgctaggagttatacataagccattttccgaatatacagcttgggcaatggtagatggtggttcaaatgtgaaagcccgctcttcctacaatgagaagaccccaaggatcgttgtgtctcgttcccattcagggatggtcaaacaggtcgctcttcagacttttggaaaccagactacaattatcccagctggtggtgctggttataaagttttagcacttttggatgtgcctgataagagtcaagaaaaagctgatttatacatccatgtgacatacatcaaaaagtgggatatatgtgctggtaatgccatcttaaaagccctaggggggcatatgactaccctgagtggtgaagaaatcagttacactggttcagacggcattgaagggggactccttgctagcatcagaatgaaccaccaggccctggtcagaaaactcccagatctagaaaagacaggacataaatgagcataactgattacagggtacagttcttcacagctgaaatggttagcctgagatgctggaagcttcaaaggattggtggagactatgcatggttaaggccatcccgaactttttaaagtatttatgaagcatcagagacttattttccctgtaatagaatgcaaaatcagggaaaatgggttgctttgtgtctcaagtattgtctttatttttgagactattttcatacagttgtcatacacaaggcgcatatatatatttgtgaattaaaatctgtagctgagtctacattgttatgagtcaccattttcacacaacatcatgaatcttcactgttagtactttcatatagaattcggttgaaggaaagattgatttttgtgtagatgtttaatataactttacaactatatctcattgaaaataaagtcattggggatttttacctctaatttggatggaaagcacaagaagccacacattcattaatatgcaacaaatgttgtatttatgttactgaatatttctatggattaaaatagaaaaagtttaattgattttttcttttaaattttaataacaggttcaccagctggtagaaaatagagacacatgatgatttgcattgtaataatttctgtgtgtatgtgtgtgtgttgttttgtttttataaagaaaagtgtgtttgtacccatgagttcagcatttctgccatcttgctattttcattttccctgtggaagatgcatggttgcatccttttccttctgaccaacacttagtctttaactttgtaaggttcggtttaaggtttcagggttagcactatagttttggttcattttctcattaacgataaaatatgctgtaaggcactataagaatataaatgattctattacaattgaaagttacttgacattacatgaattgaactgcctttcattatcttcagacactttgttttagtatttttttttaatttgctaggtttgtatatagaagatcctttcattatcaagaatgagtatggttgcttttgccatggttgcttttactattaataaatgtatctagcctacccaaactctgtagtaacttttgagattctcttaatttcccctcagattaaaatagagaaggttgaaggtactttttgatgaaatttttttctagtctggttagaaaaaaaaagttgtgacatattcattgtgttaccgtaactagaaccttgctttgtgaactgtctttcattgggatgtatggtttctctcaatgtgaaatctggaaacttcatgtaaactacccatgccgttatttcatgtgactccagtgcccttgtattccataacatgctgatgagagggatttctcacggtttctttctttgctaaattttttaaccataaagcagcttaccctttattttcccatcttggaagtaaaattgaccaaagaatgtacgttctagcctggtggaatgtgcatactttaggtttgtatgttacattgtccaaagccctttactttcttattagtaaactgaatctaatatgacacaaatgttttcacccaatctcttgcaactggtcaaattcgagaaggtgttgggccttagcagtaggccttttcagtgaaaattcattcaaagttttggtaggtggaacacttgatatttaaataggacttgaaaattttgaaaagagtatcagagacctcatttttttcctttgcaataagctgaagaaactttctttttcaggagagatggcaaaggtatatgctgttgccagagtcctgtggtataagcatctgtttttattatagtatgtcaaagttagggaaatgggactggcaagtaaaaaatggaatttaatttcaatgttttatgggaactctgatttaatgggaagcaaactagttcatattagcaggaattattttattttttcgagacagagtttcactctcgttggccaggctggagtgcaatggcgtgatctcggctcaccgcaacctctgcttcccgggttcaagcgattctcctgcctcagcctcccaagtagctgggattacaggcatacaccaccacacccagctaatttttttgtatttttgttagagacagggtttctccatgttggtcaggctggtctcgaactcccgacctcaggtgatccgcccacctcggcctcccaaagtgatgattttatttttatttttaattgtattaatctgcatctagataatgactttgtgaagggtgtgtgttgtgtgcaaaacttaaggtattggttgagagttaaatacattatttttataatatgttgggtatagtctagttactaatgattttttttaagtacttttataaaaagttcatttttaaaattgtttgtttttaaaagccaatatacgttgcagaattaggaacagtatttatatttatttacacaagacattgtgccatagcatcctagtaaaacaccttcatgaatgagtaatgttatctcccagaattacattaaaattatttctaaaaagtagcaaagtcattaccttttgcttttaatgacccacacctcaccagctcctggtcttttcttcactgttgcccttattttgaggcaatttttcttaaaatatgacttttatgcaccacatttagtagaggcagtgacatcagtgatctcagtacccatcagctgtccccctcctctgcccttcttcatctcttctaccttgtgaccatttcccttaccggttcatgttctcctttatctctgcttttctttcttagccaggatacttccctcacaactctcactcccaaattcttttagatatacatttttctggatattggctgctgaaatctgaagctctggtaaagttcctagtatcagagatcaatcctggaggaggcctagttcactattagattacaaagactcctcacaaagtaaaggaaaatcaccttcaaaaccacaaccctttatgttgtcaagtctaatatgagtgtttttacgaagtatttctttctacccattgttcaagaatgtaaatgtaaaaaaaaatacaagagagttgggtagatatgcatgcttgaggaaacttgcttttactgttttcctacttgtatccccagttcagttgaatttacaaggacctacaagatggtcatgtttgtcttggtatgtgctaccccaattttagtgtttctttctttattttaaatcagtaattattcagttgattgtttatactatataatgaagtaacaaaaacattttggtttgtatgttttaagtaacagttgtgcaaattcctcttgtttgttaggtgctccctttgaatattttgtgaactgtgtcagagggagaggggtggtggctaggaagagggtcagaaagaagctagagggaggtcaggagaagggtaacagggaggatgcaaagcagacatctaccctggtcaccccaggatcaggatatctgtccttgtttcatgttgaattcaaaaattggatctcacttaggctttgaaggtgacagccatctctgatagctgagcataagtaaagaaaggtggagtgccgatgcagaaaggaaaatattcagctttcctctcttagatcgcactttgaagatggccttttggagacaatctgacaggttaaaacaggaactgttggaattattctagctgtaactacctattggctatgtgttgattgatcctagaaagaaaaaataatttttcattttagatcttgattgaatttaagatgtatttatatgcctacaaaaggtctgtcttgtaactgttgtataaaataaacctaatctatggtttcatttttaatctaaaaaaagttgtgccttaacaatagggcattgtatgttaataagggaaaacaacctttttagtagatgggggaaaataggaactttttgccattaaaacttaagttcttttgatgtttttaatattatagttgggggagattcattaaaattaaattgaaataaaattatttttgcataacctagcatttacaactaaagtatgttttttataagaactggcatcttgatgtatataggtctgaaataatatttcatcttttgatttttaattttaataatattagaccaggatagatcacagttttacaaatcttagttttaaataaattatttcagtgtgctgttagtcctctacagtcattttggtttaaaaagtgactatttatttatggtagcatatcaataatttattaatgttaaaaaatactgtgtatgacattacaaaccagaacagttcctgggggagaggattctaattgattggcagttctgagagggcaagaagaatggaactttatacttcaaaaggaggttttggttttaccaggtactgcttatgtaaatcgtttatttttatttcatcaaagcctggcaagtatatgcattccaatttaccattggcaaagctttatttatttttaaggttggatgttgaattaattttgtgggaaaatgagatttgtaagtagttttctttctagataagataacataaaccaaactttcagaagttaaggatgatgaataatattgaaatgacttgttatatattgtaagggttcccttaagtatcataattaacaatttgtggaaattgaaaaagcataaactgtgttatttgattagtaatatgttcccttaaaattcattttgaggtgtatgttatacacacagtaaatttttgttcaggaatgacttgctcattctgtgtttttaaaaataggaaataaggcatagtgagtcatcattacatcaattaaccaaaaaatatttcatcccctccgtcactgaaattatctacttcagccacctttcttattctcgtgttaggagggcacgtttatggactttttaatttccatgtgccatattgtccactaccggcagtagccaaagctagctgtttcagtcccacagaagagacagtgctctgccatgatgacagggcactgctagggctggtttttcttgtttttcccttttggcagtgtggacttcaggaactagatgtatatgcacaagggattgagtttacactaaaactaggaaatggagttttcaatctatgttcttgcctcttcatacttttatttattttttgtcatcctgccttatactgggctaacaatgagataaaataaaaatacctttgaatactcttttccctttcatgcatttaaagccatggaggaactagaccattagctgttgccgtcacatgcttagacaccagtttacttagcgtgttatgaccttcctcacccatactaccaaatttaaatgggtcccgacttcaccctctggaaggaagtaaactcttctctccccatggtttcagagcagtttttacctgcaagcaccatctctgtatgtgctcttactagattatacagttcttgagagggattgcatcttagtgtttttgtatttccacctcacccccagcacatagcccagtctcttgcacaaattaagtacttaatgtgtgttgagctaaattgaataaaggattattagcattagcatattttgtgccttggttgtataagctggttgtttgttttgttacctttgcaaatatttatgattatcacccccccacatactaaattgtttttaaaagttttgcctttccttcagatactaccccaggcaatttgctgtagataatgtgattgcttccaatgacataattatcccaaactctctgccccggatatactttgccaaacgaaatttgaattctctgaataaattggtcatgtctaaaa

SEQ ID NO: 195198 - DNA, 1080 bp, Artificial Sequence
  derived and/or modified sequence
atggcccccatgggcatccggctgagccccctgggcgtggccgtgttctgcctgctgggcctgggcgtgctgtaccacctgtacagcggcttcctggccggccgcttcagcctgtttggcctgggcggggagcccggcggcggggccgccggccctgctgctgctgctgatggcggcaccgtggacctgcgggagatgctggccgtgtctgtgctggccgctgtgagaggaggagatgaggtgcggcgggtgcgggagagcaatgtgctgcacgagaagagcaagggcaagacccgggagggcgctgaggacaagatgaccagcggagatgtgctgagcaacaggaagatgttctacctgctgaagacagccttccccagcgtgcagatcaacacagaggagcacgtggatgctgctgaccaggaggtgatcctgtgggaccacaagatccctgaggacatcctgaaggaggtgaccacccccaaggaggtgcctgctgagagcgtgacagtgtggattgaccccctggatgccacccaggagtacacagaggacctgaggaaatatgtgaccaccatggtgtgtgtggccgtgaatggcaagcccatgctgggcgtcatccacaagcccttcagcgagtacacagcctgggccatggtggatggcggcagcaatgtgaaggcccggagcagctacaatgagaagaccccaagaattgtggtgagccgcagccacagcggcatggtgaagcaggtggccctgcagacctttggaaaccagaccaccatcatcccagctgggggcgccggctacaaggtgctggccctgctggatgtgcctgacaagagccaggagaaggctgacctgtacatccacgtgacctacatcaagaagtgggacatctgtgctggaaatgccatcctgaaggccctgggcggccacatgaccaccctgtctggagaggagatctcctacacaggcagtgatggcattgaaggaggcctgctggccagcatccgcatgaaccaccaggccctggtgaggaagctgcctgacctggagaagacaggccacaagtag

SEQ ID NO: 195199 - DNA, 1080 bp, Artificial Sequence
  derived and/or modified sequence
atggcccccatgggcatccggctgagccccctgggcgtggccgtgttctgtttgctgggtctgggtgtgctttaccatctgtactcagggttcttagcgggacgtttcagtctcttcggcttgggtggcgaacctggtggcggagccgccggaccagccgccgctgccgatggtggcacggtggatcttagagagatgctggcagtatccgtactggctgccgtacgcggaggtgatgaggtgaggcgagtgagagaaagcaatgtattacacgagaagagcaagggcaaaactagagagggagctgaggataagatgacctcaggagacgtcctctctaatcggaagatgttctacctgttgaaaacggctttccctagcgtgcagatcaacacggaggaacacgtggacgccgccgaccaggaagtcatcctgtgggaccataaaatccccgaagatatcttaaaggaagtgaccactcccaaagaagtgccggccgagagtgtgacagtgtggattgaccccttggacgccactcaagagtatactgaggacttgcgtaagtatgtgaccacgatggtgtgcgtggcagtgaacggtaaaccaatgctgggggtcatacacaaacccttctcagagtacaccgcgtgggcaatggttgacggcgggtcaaatgtgaaagcaaggtcttcctataacgagaaaacacccagaattgtagtgtcaaggagccatagcggcatggtgaaacaggtggcactgcagacctttggtaaccagacaaccattattcccgccggaggagcaggctacaaggtcctcgcactcttggacgtgcccgacaagtcccaggagaaggctgacctgtacatccacgtgacctatatcaaaaagtgggatatctgcgctggaaacgctattctgaaggcgctgggcggtcatatgactaccttgtccggtgaggaaattagttacactggaagcgacggaatagaaggcggcctgttggcgtctatccgcatgaaccaccaggcactggtacggaagctgcctgacctggaaaagaccggccataagtag

SEQ ID NO: 195200 - DNA, 1080 bp, Artificial Sequence
  derived and/or modified sequence
atggcgcctatgggaatccggttgagccctctcggggttgccgtgttttgccttctgggactgggagtcttgtaccatctgtatagcgggtttttagccggaaggttctccctttttggtctggggggagagcctgggggaggagctgccggacccgcagctgccgctgacggcggtactgtggacttgcgagagatgctggccgtgagtgtcctggctgctgtgagagggggtgatgaggttcggcgagtgagagagtcaaatgtgctgcatgagaaaagcaaaggcaagacccgagaaggagctgaagacaagatgacctccggcgatgttttgtcaaatcgaaaaatgttctacttgctgaagactgcctttccctcagttcaaatcaataccgaggagcacgtagacgccgcagaccaggaagtgattctgtgggaccacaaaatacccgaagacatcctgaaggaagttacaacgcccaaggaggtccccgcagaaagcgtcactgtctggattgatccccttgacgccactcaagaatacacagaagacctgaggaagtatgtcactacaatggtgtgcgtggctgtgaacggcaagccaatgctcggggtcatccacaagccattctctgaatatactgcatgggctatggtggacggagggtcaaatgtcaaagcaaggtcttcttacaacgagaagacgccacgaatagttgtgagccgttcccactccggcatggtcaagcaagtagcgttacagacatttgggaatcaaaccaccatcattcccgctggcggagcgggttataaagttctagcgctcctggatgtaccagataagagccaagagaaagccgacctttatatccacgttacatacatcaaaaagtgggatatctgcgccggaaacgctattctcaaggctcttggcggtcatatgaccacactcagcggcgaggagatcagttacaccggatccgacggcatcgagggcggactgctcgcttcaatccgcatgaatcatcaagcgctggtgcgcaaactccccgacctggaaaagaccggccacaagtag

SEQ ID NO: 195201 - DNA, 1080 bp, Artificial Sequence
  derived and/or modified sequence
atggcccccatgggcatcagactgagccccctgggcgtggccgtgttctgcctgctgggcctgggcgtgctgtaccacctgtacagcggcttcctggccggcagattcagcctgttcggcctgggcggcgagcccggcggcggcgccgccggccccgccgccgccgccgacggcggcaccgtggacctgagagagatgctggccgtgagcgtgctggccgccgtgagaggcggcgacgaggtgagaagagtgagagagagcaacgtgctgcacgagaagagcaagggcaagaccagagagggcgccgaggacaagatgaccagcggcgacgtgctgagcaacagaaagatgttctacctgctgaagaccgccttccccagcgtgcagatcaacaccgaggagcacgtggacgccgccgaccaggaggtgatcctgtgggaccacaagatccccgaggacatcctgaaggaggtgaccacccccaaggaggtgcccgccgagagcgtgaccgtgtggatcgaccccctggacgccacccaggagtacaccgaggacctgagaaagtacgtgaccaccatggtgtgcgtggccgtgaacggcaagcccatgctgggcgtgatccacaagcccttcagcgagtacaccgcctgggccatggtggacggcggcagcaacgtgaaggccagaagcagctacaacgagaagacccccagaatcgtggtgagcagaagccacagcggcatggtgaagcaggtggccctgcagaccttcggcaaccagaccaccatcatccccgccggcggcgccggctacaaggtgctggccctgctggacgtgcccgacaagagccaggagaaggccgacctgtacatccacgtgacctacatcaagaagtgggacatctgcgccggcaacgccatcctgaaggccctgggcggccacatgaccaccctgagcggcgaggagatcagctacaccggcagcgacggcatcgagggcggcctgctggccagcatcagaatgaaccaccaggccctggtgagaaagctgcccgacctggagaagaccggccacaagtag

SEQ ID NO: 195202 - protein, 234 aa, Artificial Sequence
  derived and/or modified sequence
MRKPDSKIVLLGDMNVGKTSLLQRYMERRFPDTVSTVGGAFYLKQWRSYNISIWDTAGREQFHGLGSMYCRGAAAIILTYDVNHRQSLVELEDRFLGLTDTASKDCLFAIVGNKVDLTEEGALAGQEKEECSPNMDAGDRVSPRAPKQVQLEDAVALYKKILKYKMLDEQDVPAAEQMCFETSAKTGYNVDLLFETLFDLVVPMILQQRAERPSHTVDISSHKPPKRTRSGCCA

SEQ ID NO: 195203 - DNA, 705 bp, Artificial Sequence
  derived and/or modified sequence
atgagaaagcccgacagcaagatcgtgctgctgggcgacatgaacgtgggcaagaccagcctgctgcagagatacatggagagaagattccccgacaccgtgagcaccgtgggcggcgccttctacctgaagcagtggagaagctacaacatcagcatctgggacaccgccggcagagagcagttccacggcctgggcagcatgtactgcagaggcgccgccgccatcatcctgacctacgacgtgaaccacagacagagcctggtggagctggaggacagattcctgggcctgaccgacaccgccagcaaggactgcctgttcgccatcgtgggcaacaaggtggacctgaccgaggagggcgccctggccggccaggagaaggaggagtgcagccccaacatggacgccggcgacagagtgagccccagagcccccaagcaggtgcagctggaggacgccgtggccctgtacaagaagatcctgaagtacaagatgctggacgagcaggacgtgcccgccgccgagcagatgtgcttcgagaccagcgccaagaccggctacaacgtggacctgctgttcgagaccctgttcgacctggtggtgcccatgatcctgcagcagagagccgagagacccagccacaccgtggacatcagcagccacaagccccccaagagaaccagaagcggctgctgcgcctag

SEQ ID NO: 195204 - DNA, 705 bp, Artificial Sequence
  derived and/or modified sequence
atgcggaagccagattccaaaatcgtgttgctcggagacatgaacgtggggaagactagtctgttacaacggtatatggaacgacggttcccagatacggtctcaactgtcggaggtgctttctacctgaaacaatggagatcatataacattagcatctgggatacggccggaagggagcagtttcacgggctgggttccatgtattgcagaggcgccgctgcgatcatcctgacctatgacgttaaccataggcagtctctggtggaacttgaggacagattcttaggccttacggatactgcctctaaggactgcctttttgcaattgtgggtaataaggtagatctaacagaagagggtgccctggctggccaggagaaggaggagtgcagccccaatatggacgccggagaccgagtgtcaccaagagccccgaagcaagttcagctggaggatgcagtcgcactgtataaaaaaatcctgaaatacaaaatgctggatgagcaagatgtgccagcagcagaacagatgtgtttcgagactagcgccaagaccgggtacaatgtcgacctactatttgaaactctcttcgacctggtcgtcccaatgatcctgcaacagagagccgagcgcccatctcacaccgtggatataagcagtcacaagcccccaaaaaggacgaggtcgggctgctgtgcttag

SEQ ID NO: 195205 - DNA, 705 bp, Artificial Sequence
  derived and/or modified sequence
atgaggaagccagacagcaagatcgtgctgctgggggacatgaatgtgggcaagaccagcctgctgcagcgctacatggagcggcgcttcccagacacagtgtccacagtgggcggggccttctacctgaagcagtggaggagctacaacatcagcatctgggacacagctggccgggagcagttccacggcctgggctccatgtactgcagaggagctgctgccatcatcctgacctatgatgtgaaccaccggcagagcctggtggagctggaggaccgcttcctgggcctgacagacacagccagcaaggactgcctgtttgccatcgtgggcaacaaggtggacctgacagaggagggcgccctggccggccaggagaaggaggagtgcagccccaacatggatgctggggacagagtgagcccccgggcccccaagcaggtgcagctggaggatgctgtggccctgtacaagaagatcctgaagtacaagatgctggatgagcaggatgtgcctgctgctgagcagatgtgctttgagaccagcgccaagacaggctacaacgtggacctgctgtttgagaccctgtttgacctggtggtgcccatgatcctgcagcagagagctgagcggcccagccacacagtggacatcagcagccacaagccacccaagaggaccaggagcggctgctgtgcctag

SEQ ID NO: 195206 - DNA, 705 bp, Artificial Sequence
  derived and/or modified sequence
atgcggaagcccgacagcaagatcgtgctgctgggcgacatgaacgtggggaagacatcgctgctgcagcgatatatggagcgccgcttcccagacaccgtgtcaacggttgggggtgccttttacctgaagcagtggcggtcatataacatctccatctgggatactgcgggtagagagcagtttcacgggcttggaagtatgtactgtagaggagcagctgcaatcatcctgacatacgacgtaaatcataggcagagcctggtggagttggaagatagattcctcggactaacagacactgcttcaaaggattgtctctttgccatagtgggtaataaggtggacttgactgaggagggtgcccttgctggccaggaaaaggaagagtgctcacccaatatggatgcgggcgatcgagtcagcccgagggcacctaagcaggtgcagctggaagacgctgtggcgctctacaaaaagatcctgaagtacaaaatgctagatgaacaagacgtgcccgctgcagagcagatgtgtttcgagaccagtgctaagaccgggtacaatgtggacttactctttgagacgctcttcgacctggttgtccccatgatcctccagcaacgggccgagaggcctagtcatacagttgatattagctcacacaaaccacccaaaaggacgagaagtgggtgttgtgcctag

SEQ ID NO: 195207 - DNA, 705 bp, Artificial Sequence
  derived and/or modified sequence
atgagaaagcctgacagcaaaatcgttcttctcggggacatgaatgtcggaaaaacgtccctcctgcagaggtatatggaaaggcggttcccggatacagtcagcactgtggggggagccttctacctgaagcagtggagaagctacaatatcagcatttgggataccgccggaagggaacaattccacggattgggaagtatgtattgtcgcggtgccgctgccatcattctgacctacgacgttaatcaccgccagtccctggtggagctggaggataggttcctggggctcaccgataccgcctcaaaggattgcctatttgcaattgttggtaataaggtggatctgacagaggagggcgcacttgcagggcaagagaaggaagaatgcagtcccaacatggatgccggtgacagggttagtccacgagctcccaaacaagttcagctagaggacgccgtggccctgtacaagaagatacttaagtacaagatgctggacgaacaagatgtgcctgcagctgaacagatgtgttttgaaacgtctgccaaaactgggtataacgttgacctgctttttgaaactttgttcgatctggtggtgccaatgatactgcagcagcgagcggaacgcccatctcatacagtggacatcagtagccacaagccgccaaagcgaacacgtagtggatgttgtgcctag

SEQ ID NO: 195208 - DNA, 1514 bp, Artificial Sequence
  derived and/or modified sequence
gtgggctccgtgctctgcacccagctccttcccgggcgcgcacacgcgcttcctctcttgagctcccgggcgtccggaggcgaaggtcccggagcgttcacgagaatccgggtcccggcgagtccggggtccgctcctccagctgcgcccagggcgcacgagccggccagcctcggggagagggcgcgggggcgctgggggttcttacgggaagatgaggaagcccgacagcaagatcgtgctcctgggggacatgaacgtggggaagacgtcgctgctgcagcggtatatggagcggcgcttcccggacacggtcagcacggtgggcggcgccttctacctgaagcagtggcgctcctacaacatctccatctgggacaccgcagggcgggagcagttccacggcctgggctccatgtactgccggggggcggccgccatcatcctcacctatgatgtgaatcaccggcagagcctggtggagctggaggaccggttcctgggcctgacagacacagccagcaaagactgcctctttgccatcgtggggaacaaagtggacctcactgaggagggggccttggcgggccaggagaaggaagagtgcagtcccaatatggacgctggggaccgtgtctccccaagggcacctaagcaggtgcagctggaggatgcggtggccctttataaaaagatcctcaagtacaagatgctggatgagcaggatgtgccggccgctgagcaaatgtgctttgagaccagcgccaagaccggctacaatgtggacctcctgtttgagaccctctttgacctggtggtgccaatgatcttacagcagagagctgagaggccgtcacacacagtggatatatccagtcataagccacccaagaggaccagatctgggtgttgtgcctgactttcgagggcctcctggactcagactgtgcatgttgggaaggggtctgaccaggcaagctgtgatctgaaaggagcaaggaacagcaaggaattattttccagaatgacacccgcagcagaatgttggagtggaaatgatggctggctatgaagaggaggtcaacgtgtgtggtctcctcagtctctgtcagaggggtggggaggtgggaaacaggaatcctctgcaaagcccaatctgcagagtcgagacccctggtgctctctgccccgctgcctggcactggtcctttgcagccagccaccaacggcccccttgcccttgcagaggcagaagcctgcgtctgcacctgcacctctgaccgtttcagcaccctgggttgttaccacgtcctacaactctgacatttcttgttctcaagcgtttctcttcactgtgagttgtctttggtcctcccacttggtacttgtatcttgatgctttataatcctgactctcgacgtgttcatttatacaaaatcaggaataactttgtttttatactgattgcagcaatgttggctacatgtattattaaagaggatttttggaacaa

SEQ ID NO: 195209 - protein, 876 aa, Artificial Sequence
  derived and/or modified sequence
MDPGDPAGDPAAGERHRMGRDPLLLLQALQTLWSTRERKQLREEAWRGFAALDDPLAGLLDMLESCRGQRGEGPSLAAWISHQLQCWLQAQPCPSLAQHSLRLKQLQARAVKVLTESPPSLAAPLASIFQLQDADRSCLLAHVHRLHHEGRFREAATLGATLKLQSELGVEKMSIPLLLQDKVALVERYVAGFPDLQRRLLVLMDSWCQPGFDIKDVARRYPEVTSLSLEKLSPKALSRQVLRLQERYGVAPALCPNAAIQQRLAALRHLCHKRFVEKSLSQENWTDHVQGLVGQSPWLQEQLSQLLVSHSDPVTAAQCAMELLLPEERLPAAVAVELRRFRLQGRATEADSRLEVKDMKDRYYQLPIPRENVHLLASWEDLTRHEGALLQCHQVVGVDVEWTPVFVAGGRPRPSLLQVAVEGHVFLLDVLALSQPPTGQGAQAFSRLVAQLLSDPSITKLGYGMVGDLQKLGTSCPALAHVEKQILGGMDLLLVHRQMRVASVPAPAVDRARELRGLSLLVQQVLGTALDKTQQLSNWDRRPLCEEQVIYAAADAYCLLEVHQALCREPARFHLSEDLAGSRRPRHRERPGARKPPGLQKASAPAAPRQVPVAVAVSEGAAPQIPARAFRVVCDNMLQGLARSLRCLGVDARMLGNGEDHRRAAEVARQEGRIILTSGQPFHKLRAQVGAGRCLSVDCSLKAQQQAKAVLKHFNVRVTHADIFSRCQACNCDQYLKVSRDMMKQLMWLSSHQEGPRSSGDEATQSQAVQEPGPAPDAAPEGCTYDRPCRWLQMADLRAETPDMLADGTRLQLAGVPVGVLRTPGLRCFYCCTGCGKVFWDGSHLGRVATHFRDMLESAPSPCEPSPAPSPASSPF

SEQ ID NO: 195210 - protein, 514 aa, Artificial Sequence
  derived and/or modified sequence
MELLLPEERLPAAVAVELRRFRLQGRATEADSRLEVKDMKDRYYQLPIPRENVHLLASWEDLTRHEGALLQCHQVVGVDVEWTPVFVAGGRPRPSLLQVAVEGHVFLLDVLALSQPPTGQGAQAFSRLVAQLLSDPSITKLGYGMVGDLQKLGTSCPALAHVEKQILGGMDLLLVHRQMRVASVPAPAVDRARELRGLSLLVQQVLGTALDKTQQLSNWDRRPLCEEQVIYAAADAYCLLEVHQALCREPARFHLSEDLAGSRRPRHRERPGARKPPGLQKASAPAAPRQGLARSLRCLGVDARMLGNGEDHRRAAEVARQEGRIILTSGQPFHKLRAQVGAGRCLSVDCSLKAQQQAKAVLKHFNVRVTHADIFSRCQACNCDQYLKVSRDMMKQLMWLSSHQEGPRSSGPAPDAAPEGCTYDRPCRWLQMADLRAETPDMLADGTRLQLAGVPVGVLRTPGLRCFYCCTGCGKVFWDGSHLGRVATHFRDMLESAPSPCEPSPAPSPASSPF

SEQ ID NO: 195211 - DNA, 2631 bp, Artificial Sequence
  derived and/or modified sequence
atggaccccggcgaccccgccggcgaccccgccgccggcgagagacacagaatgggcagagaccccctgctgctgctgcaggccctgcagaccctgtggagcaccagagagagaaagcagctgagagaggaggcctggagaggcttcgccgccctggacgaccccctggccggcctgctggacatgctggagagctgcagaggccagagaggcgagggccccagcctggccgcctggatcagccaccagctgcagtgctggctgcaggcccagccctgccccagcctggcccagcacagcctgagactgaagcagctgcaggccagagccgtgaaggtgctgaccgagagcccccccagcctggccgcccccctggccagcatcttccagctgcaggacgccgacagaagctgcctgctggcccacgtgcacagactgcaccacgagggcagattcagagaggccgccaccctgggcgccaccctgaagctgcagagcgagctgggcgtggagaagatgagcatccccctgctgctgcaggacaaggtggccctggtggagagatacgtggccggcttccccgacctgcagagaagactgctggtgctgatggacagctggtgccagcccggcttcgacatcaaggacgtggccagaagataccccgaggtgaccagcctgagcctggagaagctgagccccaaggccctgagcagacaggtgctgagactgcaggagagatacggcgtggcccccgccctgtgccccaacgccgccatccagcagagactggccgccctgagacacctgtgccacaagagattcgtggagaagagcctgagccaggagaactggaccgaccacgtgcagggcctggtgggccagagcccctggctgcaggagcagctgagccagctgctggtgagccacagcgaccccgtgaccgccgcccagtgcgccatggagctgctgctgcccgaggagagactgcccgccgccgtggccgtggagctgagaagattcagactgcagggcagagccaccgaggccgacagcagactggaggtgaaggacatgaaggacagatactaccagctgcccatccccagagagaacgtgcacctgctggccagctgggaggacctgaccagacacgagggcgccctgctgcagtgccaccaggtggtgggcgtggacgtggagtggacccccgtgttcgtggccggcggcagacccagacccagcctgctgcaggtggccgtggagggccacgtgttcctgctggacgtgctggccctgagccagccccccaccggccagggcgcccaggccttcagcagactggtggcccagctgctgagcgaccccagcatcaccaagctgggctacggcatggtgggcgacctgcagaagctgggcaccagctgccccgccctggcccacgtggagaagcagatcctgggcggcatggacctgctgctggtgcacagacagatgagagtggccagcgtgcccgcccccgccgtggacagagccagagagctgagaggcctgagcctgctggtgcagcaggtgctgggcaccgccctggacaagacccagcagctgagcaactgggacagaagacccctgtgcgaggagcaggtgatctacgccgccgccgacgcctactgcctgctggaggtgcaccaggccctgtgcagagagcccgccagattccacctgagcgaggacctggccggcagcagaagacccagacacagagagagacccggcgccagaaagccccccggcctgcagaaggccagcgcccccgccgcccccagacaggtgcccgtggccgtggccgtgagcgagggcgccgccccccagatccccgccagagccttcagagtggtgtgcgacaacatgctgcagggcctggccagaagcctgagatgcctgggcgtggacgccagaatgctgggcaacggcgaggaccacagaagagccgccgaggtggccagacaggagggcagaatcatcctgaccagcggccagcccttccacaagctgagagcccaggtgggcgccggcagatgcctgagcgtggactgcagcctgaaggcccagcagcaggccaaggccgtgctgaagcacttcaacgtgagagtgacccacgccgacatcttcagcagatgccaggcctgcaactgcgaccagtacctgaaggtgagcagagacatgatgaagcagctgatgtggctgagcagccaccaggagggccccagaagcagcggcgacgaggccacccagagccaggccgtgcaggagcccggccccgcccccgacgccgcccccgagggctgcacctacgacagaccctgcagatggctgcagatggccgacctgagagccgagacccccgacatgctggccgacggcaccagactgcagctggccggcgtgcccgtgggcgtgctgagaacccccggcctgagatgcttctactgctgcaccggctgcggcaaggtgttctgggacggcagccacctgggcagagtggccacccacttcagagacatgctggagagcgcccccagcccctgcgagcccagccccgcccccagccccgccagcagccccttctag

SEQ ID NO: 195212 - DNA, 1545 bp, Artificial Sequence
  derived and/or modified sequence
atggagctgctgctgcccgaggagagactgcccgccgccgtggccgtggagctgagaagattcagactgcagggcagagccaccgaggccgacagcagactggaggtgaaggacatgaaggacagatactaccagctgcccatccccagagagaacgtgcacctgctggccagctgggaggacctgaccagacacgagggcgccctgctgcagtgccaccaggtggtgggcgtggacgtggagtggacccccgtgttcgtggccggcggcagacccagacccagcctgctgcaggtggccgtggagggccacgtgttcctgctggacgtgctggccctgagccagccccccaccggccagggcgcccaggccttcagcagactggtggcccagctgctgagcgaccccagcatcaccaagctgggctacggcatggtgggcgacctgcagaagctgggcaccagctgccccgccctggcccacgtggagaagcagatcctgggcggcatggacctgctgctggtgcacagacagatgagagtggccagcgtgcccgcccccgccgtggacagagccagagagctgagaggcctgagcctgctggtgcagcaggtgctgggcaccgccctggacaagacccagcagctgagcaactgggacagaagacccctgtgcgaggagcaggtgatctacgccgccgccgacgcctactgcctgctggaggtgcaccaggccctgtgcagagagcccgccagattccacctgagcgaggacctggccggcagcagaagacccagacacagagagagacccggcgccagaaagccccccggcctgcagaaggccagcgcccccgccgcccccagacagggcctggccagaagcctgagatgcctgggcgtggacgccagaatgctgggcaacggcgaggaccacagaagagccgccgaggtggccagacaggagggcagaatcatcctgaccagcggccagcccttccacaagctgagagcccaggtgggcgccggcagatgcctgagcgtggactgcagcctgaaggcccagcagcaggccaaggccgtgctgaagcacttcaacgtgagagtgacccacgccgacatcttcagcagatgccaggcctgcaactgcgaccagtacctgaaggtgagcagagacatgatgaagcagctgatgtggctgagcagccaccaggagggccccagaagcagcggccccgcccccgacgccgcccccgagggctgcacctacgacagaccctgcagatggctgcagatggccgacctgagagccgagacccccgacatgctggccgacggcaccagactgcagctggccggcgtgcccgtgggcgtgctgagaacccccggcctgagatgcttctactgctgcaccggctgcggcaaggtgttctgggacggcagccacctgggcagagtggccacccacttcagagacatgctggagagcgcccccagcccctgcgagcccagccccgcccccagccccgccagcagccccttctag

SEQ ID NO: 195213 - DNA, 2631 bp, Artificial Sequence
  derived and/or modified sequence
atggacccgggggatccagccggagacccagctgctggagaaagacatcggatgggcagggatccactcctcttgctgcaggcactgcaaaccttgtggagtactcgagaacgcaagcagttgcgtgaagaagcttggagaggattcgcggccttagatgatccattagcaggccttctggatatgctggaatcatgtcgaggccagcgcggggaagggccgtcactcgccgcatggatttcacaccagttgcaatgctggttgcaggctcagccttgcccctccctggctcagcattcattaaggctcaaacagctacaggcccgcgccgtgaaggtgcttacagaatcacctcccagccttgccgctcccctcgcctcaatctttcagttgcaggacgctgataggagctgcctgttggcccacgttcatagacttcaccatgaaggtcgtttcagagaagcagccacgttgggggccacgctgaagctccaatccgagctaggcgtggagaagatgagtattcccctcctgctgcaggacaaggtcgctttggtggagcgctacgttgccggttttccagatctccagaggaggctgctggtcctgatggattcctggtgccagccaggttttgatataaaggacgtggcacgcagatatcctgaggtgaccagcctgtctctggaaaagctaagccctaaggccctctctcggcaggtgctccgcctccaggagcggtatggggtcgccccagccctttgtcccaatgcagctatccagcagaggttggcggccctgagacatttgtgtcacaaaaggtttgtggaaaagagtctatcccaggagaattggaccgaccacgttcaggggttagtcggacagagcccctggctgcaggagcagctctctcagctgcttgtgtctcacagcgaccctgtaacagcagcacaatgcgcgatggaacttctcctgcctgaagagagattacctgccgctgttgcggtggaactccgcaggtttcgcctgcagggtagagctaccgaggcagactctagactggaggttaaggatatgaaggatcgatattatcagcttccgatcccgcgagagaatgtccatctgttagcaagttgggaggacctgactaggcacgagggcgcccttctgcagtgtcatcaggtggtaggggtcgacgtggaatggaccccagttttcgtcgccggcggtcggccgcggccttcactcttacaagtagccgtggaggggcacgtcttcctgcttgatgttctggccctctcccagccaccaactggccagggcgcccaggcattcagccgtttggtggcacaacttctgagcgatccctccattaccaagctgggttacggcatggttggggacctgcagaagctgggcacgagctgtcccgctctggctcacgtggagaaacagatcttaggcggcatggacctcttgctcgtgcatcggcagatgcgcgtggccagcgttcccgccccagccgtggatcgtgcccgcgagctgagagggctttccctgcttgtacagcaggtcctgggtaccgcactcgataagacacagcagctatccaattgggaccggcggcccctgtgcgaagaacaggtgatctacgccgcagccgatgcttactgtcttttggaggtccaccaggccctctgcagagagccagccagatttcatctgagcgaggatctggccggttctaggcggccccggcacagagagcggcccggagctaggaagcctccaggactgcagaaagctagtgcccctgccgcgcctcgccaggttcctgtcgccgtggccgtcagcgagggcgcggcacctcaaatcccagccagggcctttcgggtggtatgtgataacatgctgcaggggctggcccgttccctcaggtgcttgggtgtggacgcgagaatgctcggtaatggagaggaccaccgtcgagccgcagaagtggctcgccaagaggggcggatcatcttgacctctgggcagcccttccacaaactcagggcccaggtgggagctggacggtgcctatcggttgactgcagcctgaaggctcaacagcaggcgaaagccgtccttaagcatttcaatgtgagggttacccatgctgatatttttagtagatgtcaggcctgtaattgcgatcagtacctgaaggttagccgagatatgatgaagcaactcatgtggctgagcagccaccaggagggacctaggagctccggtgatgaggccactcagagccaggctgtacaagagcctggacccgcacccgatgctgcgcctgaggggtgtacctatgaccggccatgtagatggctgcagatggccgatctgagagctgaaacacccgacatgttggcagacggaacacgactgcaactagccggggtgcctgtcggtgtgctgcggacccccgggcttcgttgcttttactgctgcacaggctgcggcaaggtgttctgggacggaagtcacttgggacgcgtggccactcatttccgcgatatgctggaaagtgccccctccccctgtgagccctccccagccccttcaccagctagctctcccttttag

SEQ ID NO: 195214 - DNA, 1545 bp, Artificial Sequence
  derived and/or modified sequence
atggagctcttgctgcccgaggagagattaccagctgcagttgcagtggaattgcgccggttcaggctgcagggacgcgccaccgaagcggactctcgcctagaagtgaaggatatgaaagatcggtactatcagttgccaattcctcgcgaaaacgttcacctgctggctagctgggaggacctgacgcgacatgaaggagctttactgcagtgccaccaggtagtgggtgttgacgttgagtggacccctgtgtttgtggctggcggtcgccctcgcccgagcttattacaggtggccgtcgagggacatgtattcctgcttgatgtcctcgctctgagccagccacctaccgggcaaggcgctcaggccttcagcagactggtcgcacaactcctttcggaccctagcattacaaagctcggatatggcatggttggggaccttcaaaaattagggactagctgtcctgcattagcccatgtggagaaacaaattctgggggggatggatctcctgttagttcatcggcagatgagagtcgcttcagtacctgcaccagccgtcgacagggcacgggagcttcgagggttgagtctactggtccagcaggttctgggcactgccctagataagacccaacagctgtctaattgggaccggcgaccactttgtgaagagcaggtgatctacgccgcggccgatgcgtactgtctgttggaagtgcatcaagctctatgccgggagccagctaggtttcacttatccgaggacttggccggctctcgaagaccgaggcaccgcgagcgacccggcgctcgaaaaccccccggtttgcaaaaagcatctgcacctgctgcaccacgccaggggctcgcccgttcgctacggtgtctgggagtggacgcaaggatgctgggtaatggggaggatcaccggcgagcagccgaggtggctcggcaagagggccgaattattctgacctccgggcagccctttcacaagctacgcgcccaggttggagccggtagatgtctgagtgtggattgttccttaaaagcccaacaacaagcaaaggctgtgctgaagcactttaatgtccgcgtgacccatgctgacatattctcccgttgtcaagcatgtaattgtgatcagtatctaaaagttagcagagacatgatgaagcagctgatgtggctgtcaagccatcaggaaggaccacgcagcagcggcccagccccagacgccgcaccggagggttgcacttacgatagaccctgcaggtggctccagatggccgacttacgcgcagaaacccccgacatgctcgctgacggcactagactgcaacttgccggagtgccggtgggcgtgctgcgaacccccggtctaagatgtttctattgttgcaccggctgcgggaaagtgttctgggatggatcgcacctgggcagagtcgcaacgcatttccgcgacatgctggagtctgcgccaagtccttgtgagccgtcacctgctccatcacccgctagttctcctttttag

SEQ ID NO: 195215 - DNA, 2872 bp, Artificial Sequence
  derived and/or modified sequence
acttccgccgggagctttgtgcgcccggcttcctcgccccgcccgcgctggccttggtgcgccggataaagccctccgggccagcggctgcggtcgggccaaggttccgcgccgggcgtggacggtgtggggcggtcccggccccgcagatcctcgttcctagctgcctgccagcgtcctcggcccggccctgaggatggacccaggagatcccgctggtgaccctgccgctggcgagcgccaccgcatgggccgggaccccctcctgctcctgcaggccctgcagaccctgtggtccacgcgggagcggaagcagctccgggaggaagcctggcgggggtttgctgccttggacgaccccctggccgggcttctggacatgctggagagctgccggggccagcggggagagggcccctccctggcggcctggatctcccaccagctgcagtgctggctacaggcacagccatgcccgagcctggcccagcacagcctgaggctgaagcagctgcaggcccgagcggtcaaagtcctcactgagagcccccccagccttgcggcaccactggccagcatcttccagctgcaggatgcagacaggagctgcctgctggcacacgtccaccgcctccaccacgagggcaggttcagagaagcagccacgctgggcgcgacgttgaagctgcagtcggagcttggcgttgaaaagatgagcatcccactgctcctccaggacaaggtggccctcgtggagcgctatgtggccggcttcccggacctccagaggaggctgctggtcctcatggattcctggtgccagcccggctttgacatcaaggacgttgccagacggtaccctgaggtgacctccttgagcctggagaagctgagtccgaaggcgctgagcaggcaggtcttgcgtctgcaggagcggtacggcgtagccccagcgctgtgtcccaacgcggccattcagcagcgcctggcggccctgcggcacctgtgccacaagcggtttgtggagaagagcctgtcacaggagaactggaccgaccatgtgcagggcctggtggggcagagcccgtggcttcaggagcagctgtctcagctgctggtctcccacagtgacccagtcacggccgcccagtgtgccatggaactcttgctgcccgaggagcggctgccggctgcggtggctgtggaactccgccggttcaggctccaggggagggcgactgaggctgactcgaggctggaggtgaaggacatgaaggaccgttactaccagctgcccatccccagggagaacgtccacctcctggcctcgtgggaagacctgaccagacacgagggtgcactcctgcagtgccaccaagtggttggtgtagacgtggagtggacacctgtgtttgttgctgggggccggcctcggccgtcactcctgcaggtggccgtggagggccacgtgttccttctggacgtcctggcactctcgcagccaccaacagggcagggagcccaggccttttcccggctggtggcccagctcctctcggacccctctatcaccaagctgggctacgggatggtgggggacctgcaaaaactgggcacgtcctgccccgccctggcccatgtggagaagcagattctgggcggcatggacctgctgctggtgcacagacagatgcgggtggcgagcgtgccagccccagccgtggacagggccagggagctgaggggcctgagcctcctggtgcagcaggtgctgggcacagccctggacaagacgcagcagctgtccaactgggaccggaggccgctctgcgaggagcaggtcatctacgcagctgccgacgcctactgcctgctggaggtgcaccaagccctgtgcagagagcccgcccgcttccacctgtcggaggacctggctgggagccggaggcccaggcacagagagagaccaggggcacggaagccacccggcctgcagaaagcgtcagcaccggccgcacccaggcaggtccctgtggctgtggctgtgtctgagggcgctgcccctcagattccggccagggccttccgtgtggtgtgtgacaacatgctgcaggggctggcacggagcctccgctgtctcggtgtggatgcacgcatgctgggcaatggtgaagaccaccgcagggcggccgaggttgccaggcaggaggggaggatcattctgacgtcggggcagccattccacaagctccgggcccaggtcggggctgggcgctgcctctcggtcgactgctccctgaaggcccagcagcaggccaaggctgtgctcaagcatttcaacgtgcgtgtcacccacgcagacatcttcagccgctgccaggcctgtaactgtgaccagtacctaaaggtctccagggacatgatgaagcagctcatgtggctcagcagtcaccaggaggggcccaggagctcaggtgacgaggccacccagagccaggcggtgcaggagccaggcccagccccagacgcagcccctgagggctgcacctatgaccgcccctgccgctggctgcagatggctgacctgcgggcggagacaccggacatgctggccgacggcacccggctgcagctggcaggggtcccggtgggtgtgctgaggacacctgggctgcggtgcttctactgctgcacgggctgtggaaaggtcttctgggacggctcccacctgggtcgtgttgccacccacttccgagacatgctggagagcgcccccagcccctgcgagccgagcccagcccccagcccggccagcagtcccttctgaggacagccagacaataaacatggaaagtgcccgactgctgggccc

SEQ ID NO: 195216 - DNA, 2755 bp, Artificial Sequence
  derived and/or modified sequence
acttccgccgggagctttgtgcgcccggcttcctcgccccgcccgcgctggccttggtgcgccggataaagccctccgggccagcggctgcggtcgggccaaggttccgcgccgggcgtggacggtgtggggcggtcccggccccgcagatcctcgttcctagctgcctgccagcgtcctcggcccggccctgaggatggacccaggagatcccgctggtgaccctgccgctggcgagcgccaccgcatgggccgggaccccctcctgctcctgcaggccctgcagaccctgtggtccacgcgggagcggaagcagctccgggaggaagcctggcgggggtttgctgccttggacgaccccctggccgggcttctggacatgctggagagctgccggggccagcggggagagggcccctccctggcggcctggatctcccaccagctgcagtgctggctacaggcacagccatgcccgagcctggcccagcacagcctgaggctgaagcagctgcaggcccgagcggtcaaagtcctcactgagagcccccccagccttgcggcaccactggccagcatcttccagctgcaggatgcagacaggagctgcctgctggcacacgtccaccgcctccaccacgagggcaggttcagagaagcagccacgctgggcgcgacgttgaagctgcagtcggagcttggcgttgaaaagatgagcatcccactgctcctccaggacaaggtggccctcgtggagcgctatgtggccggcttcccggacctccagaggaggctgctggtcctcatggattcctggtgccagcccggctttgacatcaaggacgttgccagacggtaccctgaggtgacctccttgagcctggagaagctgagtccgaaggcgctgagcaggcaggtcttgcgtctgcaggagcggtacggcgtagccccagcgctgtgtcccaacgcggccattcagcagcgcctggcggccctgcggcacctgtgccacaagcggtttgtggagaagagcctgtcacaggagaactggaccgaccatgtgcagggcctggtggggcagagcccgtggcttcaggagcagctgtctcagctgctggtctcccacagtgacccagtcacggccgcccagtgtgccatggaactcttgctgcccgaggagcggctgccggctgcggtggctgtggaactccgccggttcaggctccaggggagggcgactgaggctgactcgaggctggaggtgaaggacatgaaggaccgttactaccagctgcccatccccagggagaacgtccacctcctggcctcgtgggaagacctgaccagacacgagggtgcactcctgcagtgccaccaagtggttggtgtagacgtggagtggacacctgtgtttgttgctgggggccggcctcggccgtcactcctgcaggtggccgtggagggccacgtgttccttctggacgtcctggcactctcgcagccaccaacagggcagggagcccaggccttttcccggctggtggcccagctcctctcggacccctctatcaccaagctgggctacgggatggtgggggacctgcaaaaactgggcacgtcctgccccgccctggcccatgtggagaagcagattctgggcggcatggacctgctgctggtgcacagacagatgcgggtggcgagcgtgccagccccagccgtggacagggccagggagctgaggggcctgagcctcctggtgcagcaggtgctgggcacagccctggacaagacgcagcagctgtccaactgggaccggaggccgctctgcgaggagcaggtcatctacgcagctgccgacgcctactgcctgctggaggtgcaccaagccctgtgcagagagcccgcccgcttccacctgtcggaggacctggctgggagccggaggcccaggcacagagagagaccaggggcacggaagccacccggcctgcagaaagcgtcagcaccggccgcacccaggcaggggctggcacggagcctccgctgtctcggtgtggatgcacgcatgctgggcaatggtgaagaccaccgcagggcggccgaggttgccaggcaggaggggaggatcattctgacgtcggggcagccattccacaagctccgggcccaggtcggggctgggcgctgcctctcggtcgactgctccctgaaggcccagcagcaggccaaggctgtgctcaagcatttcaacgtgcgtgtcacccacgcagacatcttcagccgctgccaggcctgtaactgtgaccagtacctaaaggtctccagggacatgatgaagcagctcatgtggctcagcagtcaccaggaggggcccaggagctcaggcccagccccagacgcagcccctgagggctgcacctatgaccgcccctgccgctggctgcagatggctgacctgcgggcggagacaccggacatgctggccgacggcacccggctgcagctggcaggggtcccggtgggtgtgctgaggacacctgggctgcggtgcttctactgctgcacgggctgtggaaaggtcttctgggacggctcccacctgggtcgtgttgccacccacttccgagacatgctggagagcgcccccagcccctgcgagccgagcccagcccccagcccggccagcagtcccttctgaggacagccagacaataaacatggaaagtgcccgactgctgggcccatggccgtg

SEQ ID NO: 195217 - DNA, 2631 bp, Artificial Sequence
  derived and/or modified sequence
atggaccccggggaccctgctggggaccctgctgctggggagcggcacaggatgggccgggaccccctgctgctgctgcaggccctgcagaccctgtggagcacccgggagaggaagcagctgcgggaggaggcctggaggggctttgctgccctggatgaccccctggccggcctgctggacatgctggagagctgccggggccagagaggagagggccccagcctggccgcctggatcagccaccagctgcagtgctggctgcaggcccagccctgccccagcctggcccagcacagcctgcggctgaagcagctgcaggcccgggctgtgaaggtgctgacagagagcccccccagcctggccgcccccctggccagcatcttccagctgcaggatgctgacaggagctgcctgctggcccacgtgcaccggctgcaccacgagggccgcttccgggaggccgccaccctgggcgccaccctgaagctgcagagcgagctgggcgtggagaagatgagcatccccctgctgctgcaggacaaggtggccctggtggagagatatgtggccggcttcccagacctgcagaggcggctgctggtgctgatggacagctggtgccagcccggctttgacatcaaggatgtggcccggcgctacccagaggtgaccagcctgagcctggagaagctgagccccaaggccctgagccggcaggtgctgcggctgcaggagagatatggagtggccccagccctgtgccccaatgctgccatccagcagaggctggccgccctgcggcacctgtgccacaagagatttgtggagaagagcctgagccaggagaactggacagaccacgtgcagggcctggtgggccagagcccctggctgcaggagcagctgagccagctgctggtgagccacagcgaccctgtgacagctgcccagtgtgccatggagctgctgctgcctgaggagcggctgcctgctgctgtggccgtggagctgcggcgcttccggctgcagggccgggccacagaggccgacagccggctggaggtgaaggacatgaaggaccgctactaccagctgcccatccccagagaaaatgtgcacctgctggcctcctgggaggacctgaccaggcatgaaggagccctgctgcagtgccaccaggtggtgggcgtggatgtggagtggacccctgtgtttgtggccggcggccggccccggcccagcctgctgcaggtggccgtggagggccacgtgttcctgctggatgtgctggccctgagccagccccccaccggccagggcgcccaggccttcagccggctggtggcccagctgctgagtgaccccagcatcaccaagctgggctacggcatggtgggggacctgcagaagctgggcaccagctgcccagccctggcccacgtggagaagcagatcctgggcggcatggacctgctgctggtgcaccggcagatgagggtggcctctgtgcctgccccagctgtggaccgggcccgggagctgcggggcctgagcctgctggtgcagcaggtgctgggcacagccctggacaagacccagcagctgagcaactgggacagaagacccctgtgtgaggagcaggtgatctatgctgctgctgatgcctactgcctgctggaggtgcaccaggccctgtgccgggagcccgcccgcttccacctgtctgaggacctggccggcagcagaagacccaggcaccgggagaggcctggggccaggaagcccccaggcctgcagaaggccagcgccccagctgccccccggcaggtgcctgtggccgtggccgtgtctgagggcgccgccccccagatcccagcccgggccttccgggtggtgtgtgacaacatgctgcagggcctggcccggagcctgcgctgcctgggcgtggatgccaggatgctgggcaatggagaggaccaccggcgggctgctgaggtggcccggcaggagggccgcatcatcctgaccagcggccagcccttccacaagctgcgggcccaggtgggcgccggccgctgcctgtctgtggactgcagcctgaaggcccagcagcaggccaaggctgtgctgaagcacttcaacgtgcgggtgacccatgctgacatcttcagccgctgccaggcctgcaactgtgaccagtacctgaaggtgtcccgggacatgatgaagcagctgatgtggctgagcagccaccaggagggccccaggagcagtggagatgaggccacccagagccaggccgtgcaggagcccggccctgccccagatgctgcccctgagggctgcacctatgaccggccctgccgctggctgcagatggctgacctgcgggcagagaccccagacatgctggctgatggcacccggctgcagctggccggcgtgcctgtgggcgtgctgcggaccccaggcctgcgctgcttctactgctgcaccggctgcggcaaggtgttctgggatggcagccacctgggccgggtggccacccacttccgggacatgctggagagcgcccccagcccctgtgagcccagccctgcccccagccctgccagcagccccttctag

SEQ ID NO: 195218 - DNA, 1545 bp, Artificial Sequence
  derived and/or modified sequence
atggagctgctgctgcctgaggagcggctgcctgctgctgtggccgtggagctgcggcgcttccggctgcagggccgggccacagaggccgacagccggctggaggtgaaggacatgaaggaccgctactaccagctgcccatccccagagaaaatgtgcacctgctggcctcctgggaggacctgaccaggcatgaaggagccctgctgcagtgccaccaggtggtgggcgtggatgtggagtggacccctgtgtttgtggccggcggccggccccggcccagcctgctgcaggtggccgtggagggccacgtgttcctgctggatgtgctggccctgagccagccccccaccggccagggcgcccaggccttcagccggctggtggcccagctgctgagtgaccccagcatcaccaagctgggctacggcatggtgggggacctgcagaagctgggcaccagctgcccagccctggcccacgtggagaagcagatcctgggcggcatggacctgctgctggtgcaccggcagatgagggtggcctctgtgcctgccccagctgtggaccgggcccgggagctgcggggcctgagcctgctggtgcagcaggtgctgggcacagccctggacaagacccagcagctgagcaactgggacagaagacccctgtgtgaggagcaggtgatctatgctgctgctgatgcctactgcctgctggaggtgcaccaggccctgtgccgggagcccgcccgcttccacctgtctgaggacctggccggcagcagaagacccaggcaccgggagaggcctggggccaggaagcccccaggcctgcagaaggccagcgccccagctgccccccggcagggcctggcccggagcctgcgctgcctgggcgtggatgccaggatgctgggcaatggagaggaccacagaagagctgctgaggtggcccggcaggagggccgcatcatcctgaccagcggccagcccttccacaagctgcgggcccaggtgggcgccggccgctgcctgtctgtggactgcagcctgaaggcccagcagcaggccaaggctgtgctgaagcacttcaacgtgcgggtgacccacgccgacatcttcagccgctgccaggcctgcaactgtgaccagtacctgaaggtgtcccgggacatgatgaagcagctgatgtggctgagcagccaccaggagggccccaggagcagcggccctgccccagatgctgcccctgagggctgcacctatgaccggccctgccgctggctgcagatggctgacctgcgggcagagaccccagacatgctggctgatggcacccggctgcagctggccggcgtgcctgtgggcgtgctgcggaccccaggcctgcgctgcttctactgctgcaccggctgcggcaaggtgttctgggatggcagccacctgggccgggtggccacccacttccgggacatgctggagagcgcccccagcccctgtgagcccagccctgcccccagccctgccagcagccccttctag

SEQ ID NO: 195219 - DNA, 2631 bp, Artificial Sequence
  derived and/or modified sequence
atggaccccggcgaccccgccggcgaccccgccgccggcgagcggcaccgaatgggccgagaccccctcctcttacttcaggcactgcagaccttgtggtctacccgcgagcgtaaacaactgcgcgaagaggcatggagagggttcgcagcacttgacgacccgttggctggtttacttgacatgctcgagtcctgcagaggccagaggggggagggccccagccttgctgcctggatttcccaccagctccagtgctggctccaggcgcagccatgtccctccttggcccagcacagcctccgcctcaaacaactgcaggcccgagctgtcaaggtcttaactgagtctcctccgtctctggccgcgcctcttgcttccattttccagctgcaggatgctgataggtcatgcttgctcgcccatgtgcatcgcctgcatcatgaaggcagattcagagaggcagctacccttggcgcgacacttaaactccagagcgagttaggcgtcgaaaagatgagcatccctttgctattgcaggataaggtggcattggtagagagatatgtggcaggctttcccgacttacagcgcagactgctagtccttatggactcttggtgtcagccgggtttcgacattaaagacgtcgcaaggaggtatccagaggtcacgagcctgagccttgagaagttgtcccccaaagccctttctcggcaggttctgcgtctgcaggagcgctacggtgtcgccccggctctgtgcccaaatgccgccatccaacaaagacttgctgccctccgacacctttgccacaagcggtttgtcgagaagagcctgtcacaggagaattggactgatcacgttcaagggcttgtggggcagagcccatggctgcaggagcagcttagccagcttcttgtttctcattcagaccccgtcacagctgcccagtgtgccatggaactcctcctccccgaagaaaggctgcctgccgcagtggccgtggagttaagaaggttccggctccagggtagagccacggaggccgattctcgccttgaagtgaaagacatgaaagaccgctattatcaactgccaatccccagggaaaacgttcaccttctggctagttgggaggacctgacaaggcatgagggagccctgctgcagtgccaccaagtcgtgggggtggatgtcgagtggaccccagtgttcgtagccggaggacgacctagacccagtctactccaggtggccgtggagggccatgtcttcttgctcgatgtcctcgctctgtcacagcccccaactggacaaggtgcccaggccttttccagactcgtggcccagttgctctccgacccatcgattaccaagctgggctatgggatggtgggcgacctgcagaaattgggcacgagctgtcccgctctcgcccacgtggagaagcagattctgggggggatggacttgctgcttgttcaccgccagatgagggtagcgtccgtaccagccccggccgtggacagagctagagaacttaggggactctccctattggtccagcaagtgttaggaacggccctggataagacccaacagctcagcaattgggatcgccgcccactgtgtgaggaacaagttatttatgctgccgccgacgcctactgccttcttgaagtgcaccaagccctttgccgtgaacctgcccggtttcatttgtccgaagacctggccggctcccgtcgtcctcgtcacagagagaggcccggcgcccgcaagcctccaggcctgcaaaaggcttctgcaccagccgcgccacgtcaggttcctgttgctgttgccgttagcgagggtgctgcaccacaaattcccgcacgggcctttagggttgtgtgtgacaacatgttgcagggcctcgccagatcactaaggtgtctcggcgttgatgcccgaatgctggggaatggggaagatcatagaagggcagcagaggtagcgagacaagagggtcgcattattttaaccagcggccagccttttcataagctgcgggcccaagtcggcgcaggacggtgtctgtctgtggactgttctctaaaggcgcagcaacaagctaaggctgtgctgaagcacttcaacgtgcgggtcacccatgcggacattttcagccggtgtcaggcctgcaattgtgatcagtaccttaaggtcagccgtgacatgatgaaacagttgatgtggctatcatctcaccaggaagggccccggagtagcggagacgaagctacacagtctcaggccgttcaggagccaggccctgctccggacgccgcacctgaaggctgcacctatgatcgaccctgtcgatggctacagatggccgatctccgggcagaaacaccagatatgctggccgacgggacgcgactgcagctggccggagttccagtgggagtactcaggactcccggactccggtgcttctactgctgcaccggatgtggtaaggtattttgggatggttctcaccttgggcgcgttgctactcatttcagagatatgctagagtcggccccttctccatgcgaaccctcgccggcaccgagtcccgccagctctccattttag

SEQ ID NO: 195220 - DNA, 1545 bp, Artificial Sequence
  derived and/or modified sequence
atggagctgctgctgcccgaggagcggctgcccgccgccgtggccgtggagcttcgtaggttccgactccaggggagggccactgaagctgattcccgcttggaggtgaaggacatgaaagacagatactatcaactaccgattccccgagagaatgtgcatctcctcgctagctgggaagatctcactcggcacgagggcgctttgctacaatgccaccaggtcgtgggagttgatgtggagtggactcccgtgttcgtggcaggaggccgaccgagaccctcactcctgcaagttgcggtcgaggggcatgtgtttctgctggacgtgttggccttaagtcaaccaccaacagggcaaggggcccaggcttttagtaggttagtcgctcagctactcagcgacccgtctatcacgaagcttggttacgggatggtcggcgatctgcagaaactgggcacaagttgtcccgccctggctcacgtagaaaaacaaatcctcggagggatggatctcttactggtgcaccgacagatgcgcgtggccagcgtccccgcgcccgcagtggacagggccagagagttaaggggcctctctctgctagtgcagcaagttctgggaaccgctttggataaaacccagcagctttccaattgggaccgccgcccattatgcgaggaacaggtcatttatgcagccgcagacgcctactgcctgctcgaagtccaccaggccctgtgtcgtgagcctgcccgattccacctgagcgaggacctggcaggctcccggaggcctcgccatcgggaacggccaggagctcggaagcctcccggtctccagaaggcttcagcccccgccgcacctcgccaaggattggctaggagtcttcgttgtctgggcgttgacgctcgaatgttaggcaacggcgaggaccatagacgcgccgccgaggttgccagacaggagggcaggattattctcacatcaggacagcccttccataagctacgtgcccaggtgggcgccgggcgttgcctttccgtggattgcagtctgaaagcccagcagcaggccaaggctgtcctgaaacatttcaacgtgcgggtcacacatgccgacatatttagcagatgtcaggcctgcaactgcgaccagtatttgaaggtgagccgggatatgatgaaacagctaatgtggctttcctcgcatcaggagggcccccggagctccgggccagcccctgacgccgcacctgagggctgcacctatgatcgcccgtgccggtggttgcagatggcagacctccgggcggaaactccggatatgctcgccgacggcacgcgcctgcagctggcgggcgtcccggtgggcgttctccggactcccggcctaagatgtttctactgttgtactggttgcggcaaggtcttttgggatgggtcccacctggggagagttgcaacgcatttccgagacatgctggagagtgctcccagtccttgcgaaccgagccccgccccttcccccgcaagtagtcctttctag

SEQ ID NO: 195221 - DNA, 2631 bp, Artificial Sequence
  derived and/or modified sequence
atggaccctggcgatccagcaggagaccccgcagccggtgaaaggcaccgaatgggaagagatcctctgctgttgctgcaggccttgcagaccctgtggtccaccagagaacgtaaacagctgagagaagaggcctggcggggatttgctgctctggacgatccactggccggactacttgacatgcttgaaagctgccgaggacagcgaggagaaggtccatcgctggcagcgtggattagtcatcagctacagtgttggctgcaggctcagccgtgccccagccttgcgcagcacagcctgcggctgaagcagctgcaagccagagcggtgaaggtccttacggaatcaccaccctcactagccgcacctctcgctagcatatttcaactgcaggacgcagataggtcatgtctgctcgcccacgtccaccgtttgcaccatgagggcagatttcgagaggctgccactctgggcgctacattgaagctgcagtccgagctcggcgttgaaaagatgtcaattccactgctacttcaggacaaggtggctcttgtggaaaggtacgtggccggattccccgacctccagcggcgattgcttgtgctgatggatagttggtgtcagccaggttttgacataaaagacgtcgcacggcgatacccagaggttacctctctaagtctggagaaactgagcccaaaggctttatcacgacaggtgcttaggctgcaggagaggtacggggttgctcctgccttgtgtcccaacgctgccatccaacagcgtttggccgcacttagacatctgtgtcataagcgattcgttgagaaatcgctgtctcaggagaattggacagatcatgtacagggcctcgtgggtcagtcaccgtggcttcaggagcagctcagccagcttctggttagtcactcagaccctgtcacagcagctcagtgtgctatggaactgctgctgccagaggaaagacttcccgctgccgtagccgtggagctcagacggttcaggctgcaaggcagagcaaccgaagctgacagtagactcgaggtgaaggacatgaaggatagatattatcagctccccattccacgagagaacgttcaccttctcgcaagctgggaggatttgacacgccacgagggtgcccttttgcagtgccaccaggttgtgggtgtggacgttgaatggacccccgtgtttgtggcgggtggcagaccacgtcctagcttattgcaggtggccgttgagggtcacgtctttttgttggacgtcctcgccctctcccagcccccaactggccagggcgctcaggccttttcacggttagtagctcagcttctgtctgatccgagcattaccaaactcggctacggcatggtgggcgacctccagaagcttggtacatcctgccccgctctcgctcacgtggaaaaacagatcttgggtggaatggatctcttgctggtgcaccgacaaatgcgggtagcatctgtcccggcacctgccgtggatcgtgctagggagttaagagggctgtcactgttggtccaacaagtgctggggaccgcattggacaagacccaacagctctcaaattgggataggaggccattgtgtgaagagcaggtgatctatgcggcagccgacgcttattgtcttctcgaggtccatcaagctttgtgtagagagcctgcgagattccacctgagcgaagacctggctggatctcgccgacccaggcaccgtgaacgacctggagcacggaagccaccaggcctgcagaaagcgagcgcaccagccgcacctcgtcaggtgcctgtcgcagtcgcggtttccgaaggggcagcaccacagatccccgcacgcgcatttcgagtcgtctgtgataacatgttgcagggactagcaaggtcactccgttgtctgggcgtcgatgctaggatgctaggcaatggcgaggaccaccgcagagctgcagaagtggcccgtcaggaaggccgaatcatactgacaagcggccaacccttccacaagctacgcgcacaggtcggggcaggtcggtgcctgtcagtcgactgctccctgaaggcacagcagcaggccaaggcagtgctgaaacatttcaatgtacgtgtgacccacgccgacatatttagtagatgtcaggcttgtaattgcgatcaatatctgaaggtgagcagggacatgatgaagcagttgatgtggctgtcatcacaccaggagggcccacggagtagcggcgatgaggctacccagagccaggcggtacaggaacctggccctgcccctgacgccgcaccagaaggttgcacctatgaccggccttgccggtggctgcagatggcagacctcagggctgagacacctgatatgctcgcggacggcacccgactccagctcgccggagtgccagtgggcgtactgagaaccccaggattaagatgtttttattgctgtaccggctgcggcaaggttttctgggatgggtcccaccttggtagagtcgccacacacttcagagatatgttggagagtgccccaagcccgtgcgaaccatcccctgccccaagccccgcttcatctcccttctag

SEQ ID NO: 195222 - DNA, 1545 bp, Artificial Sequence
  derived and/or modified sequence
atggaactacttttaccagaagagagacttcctgctgctgtggccgtggagctaaggcgtttccgcctgcaggggagggccacagaggctgattcacggctggaggttaaggatatgaaggatagatattatcagcttcccatcccaagggaaaacgtgcacctgctggccagctgggaggatctaacccgacatgaaggcgctttattgcaatgccaccaggtagtaggcgtggatgtggagtggacaccagtttttgtcgccggaggtagacctcggcctagcctgctacaggtcgccgtcgaaggccacgtatttttacttgacgtcctcgcattaagccaaccccctaccggccagggtgcacaggcgttttctcggctagtggctcagttgctgagcgacccttccattacaaagcttggatatggaatggtaggggatttgcagaagctgggcaccagttgccctgccctcgctcacgtcgagaagcagatcctgggaggaatggaccttctgctggtgcacagacaaatgcgggtggccagtgtgcctgcgcctgcagtcgacagagctcgagagctcagaggtctgtccttattagtccaacaggtcctgggaacagctctggacaaaacgcagcagctgtccaattgggatcgcaggccactatgcgaagagcaagtcatatatgccgctgcggatgcttattgtttgctcgaggtccatcaggccctgtgccgcgagccggctcgctttcatctcagcgaggaccttgccggttcacggaggcccaggcatagggagcgaccgggagccaggaagccacctggtctccagaaggcatctgcaccagcagcccctaggcagggcctggcccgttcattgcgctgcctgggggtggacgctcggatgctcggaaacggggaggatcacagacgagctgccgaggtcgctcggcaggagggcaggataatcctcacgtcaggccagccttttcataagctgcgtgcacaggtgggggctgggaggtgcctgagtgtggactgtagtttaaaagctcagcagcaggctaaagcggtgctgaagcattttaatgtcagggttactcacgctgatatcttcagccgatgtcaggcctgcaactgcgatcaatacctaaaggtgagcagagatatgatgaaacagctaatgtggctgagctctcatcaggagggacctcgctccagtgggcctgcaccggacgcagctcctgaggggtgtacttacgatcgcccatgccgctggttgcagatggccgatctccgagctgagacccctgacatgctcgcggacggaacaagactccagcttgcaggcgtcccagtgggagtgctaaggaccccaggcctgaggtgtttttactgctgtaccggctgtgggaaagtcttctgggatgggtcccacctcggaagagtggcaacacattttagagatatgttggagagtgccccaagcccctgtgaaccctctcctgcaccttctccagcttccagtcctttctag

SEQ ID NO: 195223 - protein, 150 aa, Artificial Sequence
  derived and/or modified sequence
MGVQPPNFSWVLPGRLAGLALPRLPAHYQFLLDLGVRHLVSLTERGPPHSDSCPGLTLHRLRIPDFCPPAPDQIDRFVQIVDEANARGEAVGVHCALGFGRTGTMLACYLVKERGLAAGDAIAEIRRLRPGSIETYEQEKAVFQFYQRTK

SEQ ID NO: 195224 - DNA, 453 bp, Artificial Sequence
  derived and/or modified sequence
atgggcgtgcagccccccaacttcagctgggtgctgcccggcagactggccggcctggccctgcccagactgcccgcccactaccagttcctgctggacctgggcgtgagacacctggtgagcctgaccgagagaggccccccccacagcgacagctgccccggcctgaccctgcacagactgagaatccccgacttctgcccccccgcccccgaccagatcgacagattcgtgcagatcgtggacgaggccaacgccagaggcgaggccgtgggcgtgcactgcgccctgggcttcggcagaaccggcaccatgctggcctgctacctggtgaaggagagaggcctggccgccggcgacgccatcgccgagatcagaagactgagacccggcagcatcgagacctacgagcaggagaaggccgtgttccagttctaccagagaaccaagtag

SEQ ID NO: 195225 - DNA, 453 bp, Artificial Sequence
  derived and/or modified sequence
atgggcgtgcaaccaccgaattttagctgggtgctccctggtcgcttggctggtctcgctctgcctcggctgcccgcgcactatcagttcctgctggatttaggcgtacggcatctggtgagccttaccgaacgcggccctcctcactcagactcctgccctggtttaactctgcacaggctgcgcatccctgacttttgtcctcccgcaccagatcagatcgaccggtttgtgcagatagtcgacgaggcaaacgcacgaggcgaagccgtgggagttcattgtgctctgggcttcggccgcactggcactatgctcgcctgttatttggtgaaggagagaggcctggcagcaggggatgctattgcggaaattcggcgactaagacctggctctatagaaacatacgagcaagagaaggccgtcttccagttctaccagcggacaaagtag

SEQ ID NO: 195226 - DNA, 453 bp, Artificial Sequence
  derived and/or modified sequence
atgggggtgcagccaccgaattttagttgggtcctccctgggaggctggcagggctggcattgcccagattacccgcacattaccagtttcttctggaccttggtgtaaggcacctggtctctttgacggaaagggggccaccgcactctgactcctgtcctggtctgactctccaccgcctgcgcatccccgacttttgtccaccagccccagaccagattgacagattcgttcaaattgtggatgaggcaaatgcacgcggggaagcagtgggggtgcattgcgcgcttggctttgggcgtactggaacaatgctggcatgctatctcgtcaaggagaggggcttggccgctggggatgcaatcgcagagatccgccgccttcggcctggatcaattgagacctacgaacaagagaaagcagttttccagttctatcagagaacaaagtag

SEQ ID NO: 195227 - DNA, 453 bp, Artificial Sequence
  derived and/or modified sequence
atgggggtgcagccccccaacttcagctgggtcctgcctggcagactggctgggctggcgcttccccgcttacctgcccattatcaattcctgcttgatcttggcgtacgccacctcgtatcccttacggagcgtggcccaccacactctgactcatgtcctggactgacgcttcataggctgcgcataccagatttctgcccgccggcaccggaccaaattgaccgattcgttcaaattgtggatgaggccaacgcaagaggagaagctgtgggtgtgcattgcgcgctgggcttcggacggacaggcacaatgcttgcctgctacctggtgaaggaacgcggcctggcagccggggatgctattgccgaaatcaggagactgcgccccggttcgattgagacatatgagcaagaaaaggctgtgtttcagttttatcagcgcacgaagtag

SEQ ID NO: 195228 - DNA, 756 bp, Artificial Sequence
  derived and/or modified sequence
gagttacttggctcggagcgggcgaggggacgcgtgggcggagcggggctggccagcctcggcccccatgacccgctgtcctgtgccctttcccagcgatgggcgtgcagccccccaacttctcctgggtgcttccgggccggctggcgggactggcgctgccgcggctccccgcccactaccagttcctgttggacctgggcgtgcggcacctggtgtccctgacggagcgcgggccccctcacagcgacagctgccccggcctcaccctgcaccgcctgcgcatccccgacttctgcccgccggcccccgaccagatcgaccgcttcgtgcagatcgtggacgaggccaacgcacggggagaggctgtgggagtgcactgtgctctgggctttggccgcactggcaccatgctggcctgttacctggtgaaggagcggggcttggctgcaggagatgccattgctgaaatccgacgactacgacccggctccatcgagacctatgagcaggagaaagcagtcttccagttctaccagcgaacgaaataaggggccttagtacccttctaccaggccctcactccccttccccatgttgtcgatggggccagagatgaagggaagtggactaaagtattaaaccctctagctcccattggctgaagacactgaagtagcccacccctgcaggcaggtcctgattgaaggggaggcttgtactgctttgttgaataaatgagttttacgaaccagg

SEQ ID NO: 195229 - DNA, 694 bp, Artificial Sequence
  derived and/or modified sequence
gcagaccacgtggcccgggaggcgccgaggccagcgatgggcgtgcagccccccaacttctcctgggtgcttccgggccggctggcgggactggcgctgccgcggctccccgcccactaccagttcctgttggacctgggcgtgcggcacctggtgtccctgacggagcgcgggccccctcacagcgacagctgccccggcctcaccctgcaccgcctgcgcatccccgacttctgcccgccggcccccgaccagatcgaccgcttcgtgcagatcgtggacgaggccaacgcacggggagaggctgtgggagtgcactgtgctctgggctttggccgcactggcaccatgctggcctgttacctggtgaaggagcggggcttggctgcaggagatgccattgctgaaatccgacgactacgacccggctccatcgagacctatgagcaggagaaagcagtcttccagttctaccagcgaacgaaataaggggccttagtacccttctaccaggccctcactccccttccccatgttgtcgatggggccagagatgaagggaagtggactaaagtattaaaccctctagctcccattggctgaagacactgaagtagcccacccctgcaggcaggtcctgattgaaggggaggcttgtactgctttgttgaataaatgagttttacgaaccagg

SEQ ID NO: 195230 - DNA, 729 bp, Artificial Sequence
  derived and/or modified sequence
gggcagagcgacccgagggcggcgccctgcagaccacgtggcccgggaggcgccgaggccaggtaggtgcgatgggcgtgcagccccccaacttctcctgggtgcttccgggccggctggcgggactggcgctgccgcggctccccgcccactaccagttcctgttggacctgggcgtgcggcacctggtgtccctgacggagcgcgggccccctcacagcgacagctgccccggcctcaccctgcaccgcctgcgcatccccgacttctgcccgccggcccccgaccagatcgaccgcttcgtgcagatcgtggacgaggccaacgcacggggagaggctgtgggagtgcactgtgctctgggctttggccgcactggcaccatgctggcctgttacctggtgaaggagcggggcttggctgcaggagatgccattgctgaaatccgacgactacgacccggctccatcgagacctatgagcaggagaaagcagtcttccagttctaccagcgaacgaaataaggggccttagtacccttctaccaggccctcactccccttccccatgttgtcgatggggccagagatgaagggaagtggactaaagtattaaaccctctagctcccattggctgaagacactgaagtagcccacccctgcaggcaggtcctgattgaaggggaggcttgtactgctttgttgaataaatgagttttacgaaccagg

SEQ ID NO: 195231 - DNA, 453 bp, Artificial Sequence
  derived and/or modified sequence
atgggcgtgcagccccccaacttctcctgggtgctgcccggccgcctggccggcctggccctgccccggctgcctgcccactaccagttcctgctggacctgggcgtgcgccacctggtgtccctgacagagcggggccccccccacagcgacagctgccccggcctgaccctgcaccggctgcgcatcccagacttctgccccccagccccagaccagattgacagatttgtgcagatcgtggatgaggccaatgcccggggggaggccgtgggcgtgcactgtgccctgggctttggaagaacaggcaccatgctggcctgctacctggtgaaggagcggggcctggccgctggagatgccatcgccgagatccggcggctgcggcccggcagcattgagacctatgagcaggagaaggctgtgttccagttctaccagaggaccaagtag

SEQ ID NO: 195232 - DNA, 453 bp, Artificial Sequence
  derived and/or modified sequence
atgggcgtgcagccccccaacttcagctgggtgctgcccggccggctggctgggctggcactgcctcgtctgcctgcacactaccaattcctgttggacctgggggttcgccatcttgtatccctgacagagaggggtcctcctcattcagacagttgtccaggtctcacgctccaccggctgcggatcccagatttctgtcctcccgcccctgaccaaatcgaccgattcgtgcagattgtggacgaagcaaacgcacgtggggaggcagtgggcgtccattgtgccttaggtttcgggagaactggcaccatgctggcatgctatctggtgaaggagagaggtctcgctgccggagacgctatagccgagattaggaggttaaggccaggcagcatcgagacgtacgaacaggagaaagccgtgttccagttttatcagcgcaccaagtag

SEQ ID NO: 195233 - DNA, 453 bp, Artificial Sequence
  derived and/or modified sequence
atgggcgtgcagccccccaacttcagctgggtgctgcccggccggctagccggattagctcttccccgattgcccgcccattatcagtttttgttagatctgggtgtgcgtcatctcgtgtctcttacagaacgaggaccgcctcacagcgactcctgtcctggcctgaccctgcacagactaaggattccagatttctgtcctcctgcccccgatcagatcgatcgtttcgtgcagattgtggatgaggcgaacgctcgcggagaggcagttggagtccattgtgctctaggattcgggcggaccggaactatgttagcatgctaccttgtgaaggagcgaggtctggccgcaggggatgccattgcagagatccgacggcttcgacccggctctattgagacttacgaacaggagaaagccgtctttcaattttaccagcggactaagtag

SEQ ID NO: 195234 - DNA, 453 bp, Artificial Sequence
  derived and/or modified sequence
atgggcgtgcagccccccaacttcagctgggtgctgcccggccggctcgctggactagctctgccgcggctgcctgctcattatcaattcctgctggaccttggggtgaggcacttggtgagcttgacagagcgaggtccgcctcatagtgactcatgtcccgggctgactctgcatcgactgcgcattcctgatttctgtcctcccgcccccgaccagattgataggttcgtgcagatcgtggatgaggccaacgcccgcggcgaggcggttggcgtccactgtgccctcggattcggccggaccggaaccatgctggcctgctatctagtgaaagaacgggggctcgcagctggcgacgctatagcggagatccgccggctgcgccctggttccattgaaacatatgaacaggagaaagcagttttccagttctaccagcggacaaagtag

SEQ ID NO: 195235 - DNA, 453 bp, Artificial Sequence
  derived and/or modified sequence
atgggcgtccagccccctaacttttcatgggtactgcctgggcgattggccggactggccctgcccagattgcccgcacactatcaattcctgttggatctgggggttaggcacctcgtgagtctaacagaacgcggtcctcctcacagtgattcttgtccaggcctgacactgcataggctgcggattccagatttctgtccccctgcccctgatcagatcgatagattcgttcaaatcgttgacgaggccaatgctagaggggaagcggtgggcgtccactgtgccctgggcttcgggagaacaggaactatgctggcgtgttatctggtaaaggagcggggattggccgctggagatgcaatagctgagattagacgattgcggccaggctccattgagacatacgaacaggaaaaagccgtgttccaattttaccagcggacaaagtag

SEQ ID NO: 195236 - DNA, 453 bp, Artificial Sequence
  derived and/or modified sequence
atgggtgtccagcctcccaactttagttgggtgttacccggacggctggctggcttagccctccctcggttaccggcacattaccaatttctgcttgatctgggcgtgaggcacctggtgagtctgacagaaagagggcctccacattctgacagctgcccgggactgacactgcatcggctgcgcattccagacttttgcccacctgccccagaccaaatcgaccgattcgtgcaaatcgtggatgaagccaacgctaggggcgaggccgtgggtgtccactgcgctctcggcttcgggaggaccggcacaatgctggcctgctaccttgtcaaggagaggggccttgccgcaggtgatgcgattgccgagatacggcgtctgagacccggttcaattgagacgtacgagcaggaaaaagcggtgtttcaattctaccagaggacaaaatag

SEQ ID NO: 195237 - DNA, 453 bp, Artificial Sequence
  derived and/or modified sequence
atgggggttcagccacccaattttagttgggttctacccggtcggctagctgggcttgctcttcctagactgccagcccattaccaatttctcctggacctcggagtccgccatcttgtctctcttactgagagaggacccccacacagcgattcatgccctgggttgactctccataggcttcgcattccagatttctgccctcccgctccggatcagatcgatcgattcgttcaaattgttgacgaggctaatgcaaggggtgaagccgtaggagtgcactgcgccttagggtttggcaggacagggaccatgctggcttgttacctggtgaaagagagaggattggccgctggggacgccatcgctgaaattcgtcggcttcgcccagggagcattgagacgtacgaacaggagaaggccgtgtttcagttttaccagcggacaaaatag

SEQ ID NO: 195238 - protein, 278 aa, Artificial Sequence
  derived and/or modified sequence
MPDQALQQMLDRSCWVCFATDEDDRTAEWVRPCRCRGSTKWVHQACLQRWVDEKQRGNSTARVACPQCNAEYLIVFPKLGPVVYVLDLADRLISKACPFAAAGIMVGSIYWTAVTYGAVTVMQVVGHKEGLDVMERADPLFLLIGLPTIPVMLILGKMIRWEDYVLRLWRKYSNKLQILNSIFPGIGCPVPRIPAEANPLADHVSATRILCGALVFPTIATIVGKLMFSSVNSNLQRTILGGIAFVAIKGAFKVYFKQQQYLRQAHRKILNYPEQEEA

SEQ ID NO: 195239 - DNA, 837 bp, Artificial Sequence
  derived and/or modified sequence
atgcctgaccaggcccttcaacagatgttagataggtcctgctgggtgtgttttgccaccgatgaggacgatcgcaccgctgagtgggtccggccctgccggtgccgcggatctacgaagtgggtacaccaggcctgtctccaaaggtgggttgacgagaaacagcggggtaactctacagctagagtggcatgccctcagtgcaacgccgaatacctgatagtgttcccgaaacttggtccagtggtttacgtgctggatctggccgaccgcctgatcagcaaggcctgcccatttgcggcagcaggcattatggtgggctcaatctactggactgctgtcacctacggtgcagtgactgtcatgcaagtggtggggcacaaagaggggctggatgtgatggaacgggccgatccactattcctcctcattggactccccactatcccagtgatgttaatcctgggtaaaatgatccgctgggaggactatgtgctgaggctctggagaaagtacagcaataagttgcaaatccttaactcaatttttcctgggatcggatgccccgtgcctcgcattcctgctgaggctaatccactggctgaccacgtcagtgcaacaaggatcttgtgcggggctctagtttttccgacaatcgccacaattgtcggtaagctgatgttcagctctgttaacagtaacttacagcgtacaattctgggcggtatcgcattcgttgctatcaagggcgcattcaaagtgtattttaagcagcaacagtatctcagacaggcccatcggaagatcttgaattatcccgaacaggaagaagcctag

SEQ ID NO: 195240 - DNA, 837 bp, Artificial Sequence
  derived and/or modified sequence
atgccagaccaggccctgcagcagatgctggacaggagctgctgggtgtgctttgccacagatgaagatgacagaacagctgagtgggtgcggccctgccgctgccggggcagcaccaagtgggtgcaccaggcctgcctgcagcgctgggtggatgagaagcagaggggcaacagcacagcccgggtggcctgcccccagtgcaatgctgagtacctgattgtgttccccaagctgggccctgtggtgtatgtgctggacctggccgacaggctcatcagcaaggcctgcccctttgctgctgctggcatcatggtgggcagcatctactggacagctgtgacctacggggctgtgacagtgatgcaggtggtgggccacaaggagggcctggatgtgatggagagagctgaccccctcttcctgctgattggcctgcccaccatccctgtgatgctgatcctgggcaagatgatccgctgggaggactatgtgctgcggctgtggaggaagtacagcaacaagctgcagatcctgaacagcatcttccctggcatcggctgccctgtgccccgcatcccagctgaggccaaccccctggccgaccacgtgtctgccacccgcatcctgtgtggggccctggtgttccccaccatcgccaccatcgtgggcaagctgatgttcagctctgtgaacagcaacctgcagaggaccatcctgggcggcatcgcctttgtggccatcaagggggccttcaaggtgtacttcaagcagcagcagtacctgcggcaggcccacaggaagatcctgaactacccagagcaggaggaggcctag

SEQ ID NO: 195241 - DNA, 3926 bp, Artificial Sequence
  derived and/or modified sequence
tcttacctcacaaaggtagctcctccgccggcagcaactcggcgcccgcggtccatggaccggaacctcgggccgacggacgggaacccgggccgcgatcgccgcctccccgcctcaggctcctcctcctcgctctccgccgcctccgccggactcccgcaggccctgcaccgccgccgccaggctagcggagctgccccgggaagctgggtgacgggttcgcggctgccgccggactgcggcctactccgccgcctctcagtgctattgtccctgggcctggccttgagcgggtccactggggaaggccgtgtgcgccggctccgcggaagatgccggaccaagccctacagcagatgctggacagaagttgctgggtttgttttgctactgatgaagatgatagaacagctgaatgggtgagaccatgcaggtgcagaggatctacaaaatgggttcaccaggcctgtctacaacgctgggtggatgaaaagcaaagaggaaacagtacagccagagtggcatgtcctcagtgcaatgctgaatacctaatagtttttccaaaattgggtccagtggtttacgtcttggatcttgcagatagactgatctcaaaagcctgtccatttgctgcagcaggaataatggtcggctctatctattggacagctgtgacttatggagcagtgacagtgatgcaggttgtaggtcataaagaaggtctggatgttatggagagagctgatcctttattccttttaattggacttcctactattcctgtcatgctgatattaggcaagatgattcgctgggaggactatgtgcttagactgtggcgcaaatactcgaataaactacaaattttaaatagtatatttccagggataggttgtcctgttcctcgaattccagctgaggccaatcctttagcagatcatgtctctgctactcgaatcttgtgtggagcccttgtctttcctactattgctacaatagttggtaaattgatgttcagtagtgttaactctaatttacaaaggacaatcttgggtggaattgcgtttgttgccataaaaggagcatttaaagtttacttcaaacagcagcaatatttacgacaggcacaccgcaaaattctgaattatccagaacaagaagaagcataaaactgacttctggttgttctgcagttctctcatccttatgaatctgttgtgttgttttgattccatcattaatgcacttgtggagacttgtgataagctgctgctcctatattttttaagaaatataataaagcacttagggcaggggaaatcatctcggtaatcatggaacctaaggatgtgatttgttttcattgtttgtatgtactacttttatggcagtcatatgaaccattatcttagcatggtaaacctgggttttgttcatattttctccagacagaaatgcaaagatcaaactgtgcaaatattaaaaaaatgcacatgctgttttattcaaatgcctcttttgtacatgttcatgtttagtgttttctcagaatcagcaactcaaggtactatgaggatttttctcactgacataatttgattacatactaaataagaggatatgttaatatgaggaaatgtaaattaaattagttataaataaataaccaaaaatgtatgtaaacattcaaatgattatctgaacaaatgagattttgtggtgttttctttaacccatgtgatgtcctccaaaatgtgtagggtaaaaattcacagggcttccagatcactttttcaatattaaattttatttacataatgttgacatctcatacttcatgaagtaattttgactcatgcagtcgtgtgtgtgtgtgtgtgtgtgtgtgtgtgtgtgtgtgtatttgtgtgtttcagtgtttcatcaggtccttccatctctgggagttttttcaacccatatttctagaaattacagctgccagtttatagtagtttgagcagaggatgatttgcaaaaataaaaataaagttattttactctcctcttgcattgattcagttattgagatattcgttgatcacctcctatttcccaggcactgtgcagagtgctgtaggacatagtggtgaacaagacagacttggtccaagctcttacagagttgacagtctagtttcagcacatagaaaaccagcagtgaataaaccaaggtgaggccttgagctctttgtttttatattaatgaggagaaaagtatgaaaacaagaagtcttaagtaaatattgaggtcattgtttttggcttaagtttattatagaaaatcaacactaatgtttttagattttaattgtcctattgatgaggctagcaccttaatcactgtttagttttgtattcatttttaaaagcaattattgaagccattttcaatagattggccattttaatgttcagcaacctgaatggttatttttgttaattaaaattaaatttttaagagatattttcaaaaccctatttattttcttgttcacagtaatgcatgtcaataataaatgtttccccttactgataagcggccactttaggagtgtagcaaatatagattgagctatgttagtttgcaataatatatgttaactttagtaattaaagactggtttctatagtatgaatgtcttaattttgagttatatgatgtttatttgaatgactgttgaacattcaaatttgtattatttggagatgaagatttgactaacagtgagccttattaagaacactactacagttctgaaggggaaatataacatctatggttatatattttaaaaacttagattataggctgtaattataaaatatattggcttttgttttcaatgtgaaagatacattaaatggacacatatcttgcaaaattttgttgtatagaacagtttttaggcagcctttactaaagttatgcaaacacacagttccccatttactacattaatgcccttgacagggagtagctgcttggttttataggtattagggctcatgaaggccggggaacaactctaatccttttggggcaggagggagggtttttttagggttgcggggagggaactgcaagtgcctgaggaccagagtggcctctagccccgaattgaacacttttaaacctaaagagccttattattattagctcgagaaataccacatgccagtcttcccaggaaggtgacctgcctgaccatgaagcaacaaaagagcataggcagacttaaagttggatagacctgggttcaaatcatagttcagctttcaataactgtatgtatgattttggctaaaggatttgactttctctcaactgcagttttcttaatctttgaaatgcaaataatgtttatctcagaagactatttctaggattaactgagagattaaaggaacagcagcacttaggctcaaaatcgcccctacaaagcagtagttgtttcttaattgctaagtaatctgtttgcactctaggaaaagtaaatggagaggtaaaagaaaggcattggggacaaatgaaagagatgatgtagatttttcggatgggtgggtatattttattttccagtttattttcatatttctttactgtgttatttctggaaactttaatgttttaaacctcttttataaaattcaatgacgactactagaattcttttcaaaagttaacttatctccaaagtggctgaaaatattgtttaccattacatgattatgaaatgactgtgaagaatataaaattaaacttagtgacttaattagtcactgccttgctaactttgctgtaatttttttaaacgtcttgtttttaatatagcaaactatctcaatactggctggattaggttaaataaagaatttttatgttc

SEQ ID NO: 195242 - DNA, 837 bp, Artificial Sequence
  derived and/or modified sequence
atgcccgaccaggccctgcagcagatgctggaccggagctgctgggtgtgctttgccacagacgaagacgataggaccgccgagtgggtgcgaccatgccggtgtcgcgggtccacgaaatgggtccaccaagcttgtctgcagagatgggtggatgagaaacagagagggaacagtaccgccagggtagcttgtccccagtgcaatgcagaatatctgattgtcttccctaaactggggccggtggtgtatgtattagacctggccgatagactcataagtaaagcctgtccttttgctgcagccggcattatggttggaagtatatactggacagccgtgacctatggggcggttactgtgatgcaggtagtgggccataaggagggtcttgacgtcatggagagagcagacccgctcttcctcctgattggccttcccacaattcccgttatgctgatcctcggtaagatgattcggtgggaggactacgtcttaaggttatggcgtaagtacagtaacaaattgcagatcctgaactccattttccctggaatagggtgccccgtgccgcggatccctgcagaagccaatccacttgccgatcatgtctcagccacgaggatcttgtgtggggctctcgtattccccactatcgctactatcgtcggaaagctcatgttctccagtgtcaacagtaatctgcagaggaccatcctcgggggcatcgcctttgtggctattaaaggcgcctttaaggtttacttcaagcagcagcagtaccttcgacaggcacacagaaagattctgaactatcccgagcaggaggaggcttag

SEQ ID NO: 195243 - DNA, 837 bp, Artificial Sequence
  derived and/or modified sequence
atgcctgatcaggctcttcagcagatgctggatcgatcctgttgggtgtgctttgcgacagacgaggacgataggactgctgaatgggtccgcccttgcagatgtcgagggtctaccaagtgggtccaccaggcatgcctgcagagatgggtcgacgaaaagcagagagggaattccacggcacgtgtcgcttgcccacaatgtaacgccgagtatctcattgtcttcccaaagctcggaccggtggtttacgtgctggatctagccgacaggctaatatcaaaggcgtgtcccttcgccgcagcaggtatcatggtgggcagcatttactggacagcagtgacctatggggctgtgacagtcatgcaagtagtgggccacaaagaaggcttggatgtgatggagcgcgcagatcccctgttcttactgatcgggttacctacaattcctgtgatgctcattctgggtaaaatgatacgctgggaggactatgtcctaaggctttggagaaaatattctaacaagctgcagatccttaactcaatatttcctggaatcggttgtccagtgccaagaatccccgctgaggcaaacccgctcgcagaccatgtcagcgcaaccaggattttatgtggagcactagtgttccccacgattgctaccatcgtgggaaaattaatgttttcaagtgtgaactccaatctacagcggaccatccttgggggtattgctttcgttgcaattaaaggcgctttcaaagtctactttaaacaacagcaatacctccgacaagcgcatcggaagattctaaactaccctgaacaggaggaagcatag

SEQ ID NO: 195244 - DNA, 837 bp, Artificial Sequence
  derived and/or modified sequence
atgcccgaccaggccctgcagcagatgctggacagaagctgctgggtgtgcttcgccaccgacgaggacgacagaaccgccgagtgggtgagaccctgcagatgcagaggcagcaccaagtgggtgcaccaggcctgcctgcagagatgggtggacgagaagcagagaggcaacagcaccgccagagtggcctgcccccagtgcaacgccgagtacctgatcgtgttccccaagctgggccccgtggtgtacgtgctggacctggccgacagactgatcagcaaggcctgccccttcgccgccgccggcatcatggtgggcagcatctactggaccgccgtgacctacggcgccgtgaccgtgatgcaggtggtgggccacaaggagggcctggacgtgatggagagagccgaccccctgttcctgctgatcggcctgcccaccatccccgtgatgctgatcctgggcaagatgatcagatgggaggactacgtgctgagactgtggagaaagtacagcaacaagctgcagatcctgaacagcatcttccccggcatcggctgccccgtgcccagaatccccgccgaggccaaccccctggccgaccacgtgagcgccaccagaatcctgtgcggcgccctggtgttccccaccatcgccaccatcgtgggcaagctgatgttcagcagcgtgaacagcaacctgcagagaaccatcctgggcggcatcgccttcgtggccatcaagggcgccttcaaggtgtacttcaagcagcagcagtacctgagacaggcccacagaaagatcctgaactaccccgagcaggaggaggcctag

SEQ ID NO: 195245 - protein, 425 aa, Artificial Sequence
  derived and/or modified sequence
MASSIICQEHCQISGQAKIDILLVGDVTVGYLADTVQKLFANIAEVTITISDTKEAAALLDDCIFNMVLLKVPSSLSAEELEAIKLIRFGKKKNTHSLFVFIIPENFKGCISGHGMDIALTEPLTMEKMSNVVKYWTTCPSNTVKTENATGPEELGLPLQRSYSEHLGYFPTDLFACSESLRNGNGLELNASLSEFEKNKKISLLHSSKEKLRRERIKYCCEQLRTLLPYVKGRKNDAASVLEATVDYVKYIREKISPAVMAQITEALQSNMRFCKKQQTPIELSLPGTVMAQRENSVMSTYSPERGLQFLTNTCWNGCSTPDAESSLDEAVRVPSSSASENAIGDPYKTHISSAALSLNSLHTVRYYSKVTPSYDATAVTNQNISIHLPSAMPPVSKLLPRHCTSGLGQTCTTHPNCLQQFWAY

SEQ ID NO: 195246 - DNA, 1278 bp, Artificial Sequence
  derived and/or modified sequence
atggcctccagcatcatctgccaggagcattgccaaatttctggacaggcgaagattgacatcctgttagttggtgacgtgaccgtgggctatctggcggacaccgttcaaaaactgttcgcgaacatcgccgaggttactatcacaattagtgataccaaagaggcagcggcactgttagatgattgtatcttcaacatggttttgttgaaggtgccctctagcctgagcgcagaggaattggaggcgattaagctgattagattcggaaagaaaaagaacacccactctttgtttgtctttatcattccagaaaactttaaaggctgcatttctggacatggcatggacatagccctgacagaaccgctgacaatggaaaaaatgtcgaacgttgtgaagtattggactacatgcccttctaatactgttaagacagaaaatgccacagggcctgaagaactgggcctgccgcttcaacggagctactccgaacaccttgggtactttcccacggacctttttgcgtgctccgaatctctccgaaatggaaacggtttggagcttaacgcatcattgagcgagtttgaaaagaataaaaagatctctctgctgcacagttctaaagaaaagcttcggagggaacggattaagtactgctgcgagcagctccgaaccctgctgccatatgtgaagggccggaagaatgatgcagcctccgtcctagaggctacagtggactatgtaaagtacataagagagaagatcagtcctgcagtaatggcacagatcacggaagctctccagtctaacatgaggttttgcaaaaagcagcagactcctatcgaactgagtctgcctgggaccgtcatggcgcagcgggaaaatagtgtgatgtccacatacagtccagaacgaggacttcagttcttgaccaacacctgctggaatggctgctctactcctgacgcggaatcttcactagacgaggccgtgagagtaccgagctcaagcgcatccgagaatgccataggagatccctacaagacccacatctctagtgccgccctctccctaaacagcctccacacagttaggtactactccaaggtcacaccaagctacgacgctactgctgttaccaaccaaaatatctccatccaccttccttccgcgatgcctcctgtttctaaactgctccccagacattgcacctctggtctgggccagacctgcactacacaccctaactgcctccagcagttttgggcttactag

SEQ ID NO: 195247 - DNA, 1278 bp, Artificial Sequence
  derived and/or modified sequence
atggccagcagcatcatctgccaggagcactgccagatcagcggccaggccaagattgacatcctgctggtgggagatgtgacagtgggctacctggccgacacagtgcagaagctgtttgccaacattgctgaggtgaccatcaccatcagtgacaccaaggaggccgccgccctgctggatgactgcatcttcaacatggtgctgctgaaggtgcccagcagcctgtctgctgaggagctggaggccatcaagctgatccgctttgggaagaagaagaacacccacagcctgtttgtgttcatcatccctgagaacttcaagggctgcatcagcggccacggcatggacatcgccctgacagagcccctgaccatggagaagatgagcaatgtggtgaagtactggaccacctgccccagcaacacagtgaagacagaaaatgccaccggccctgaggagctgggcctgcccctgcagaggagctacagcgagcacctgggctacttccccacagacctgtttgcctgcagcgagagcctgagaaatggaaatggcctggagctgaatgccagcctgtctgaatttgagaagaacaagaagatcagcctgctgcacagcagcaaggagaagctgcggcgggagcgcatcaagtactgctgtgagcagctgcggaccctgctgccctacgtgaagggcaggaagaatgatgctgcctctgtgctggaggccaccgtggactatgtgaagtacatccgggagaagatcagccctgctgtgatggcccagatcacagaggccctgcagagcaacatgaggttctgcaagaagcagcagacccccatcgagctgagcctgcccggcaccgtgatggcccagagagaaaattctgtgatgagcacctacagccctgagcggggcctgcagttcctgaccaacacctgctggaatggctgcagcaccccagatgctgagagcagcctggatgaagctgtgcgggtgcccagcagcagcgcctctgaaaatgccatcggggacccctacaagacccacatcagcagcgctgccctgagcctgaacagcctgcacacagtgcgctactacagcaaggtgacccccagctatgatgccacagctgtgaccaaccagaacatcagcatccacctgcccagcgccatgcctcctgtgtccaagctgctgcccaggcactgcaccagcggcctgggccagacctgcaccacccaccccaactgcctgcagcagttctgggcctactag

SEQ ID NO: 195248 - DNA, 1278 bp, Artificial Sequence
  derived and/or modified sequence
atggccagcagcatcatctgccaggagcactgccagatcagcggccaggccaaaatcgatatcctgctcgtgggcgacgtgacagtgggctacctggccgacaccgtgcagaagctattcgcaaacatcgctgaggtaacaattaccatttccgacaccaaagaggctgcagctctgctggacgactgcatattcaacatggtgctgttgaaggtgccaagtagcctatcggcggaggagctggaagctattaagcttattcgatttgggaagaaaaaaaacacccactccctcttcgtctttataatccccgagaattttaaaggctgcatttctggacatggcatggacattgccctgaccgaaccgttgactatggaaaagatgtccaatgtagtgaaatattggacaacttgccccagcaatacagtgaagactgaaaacgcgaccgggccggaggagctgggtctcccactgcagaggtcctatagtgagcatttagggtatttccctaccgatcttttcgcctgctccgagtctctgcgcaatggcaatgggctagaactcaacgcctccttgagcgaatttgaaaagaacaaaaagatctctttactgcatagctccaaggagaagctccggcgcgagaggatcaagtactgttgtgagcagctgaggacccttctgccctatgtgaaaggtcgaaagaacgatgcagccagcgtgctggaggccactgttgactacgtgaaatatataagggaaaaaattagccccgctgtgatggctcaaatcacggaagccttgcagagcaatatgaggttttgcaagaaacagcagacaccaattgaactctctctccctgggacggtgatggcacagcgagagaattcagtcatgtccacatactccccagaacgcggtttgcagttcctcaccaacacttgctggaatgggtgctccaccccagacgctgagagtagtctggatgaggccgtacgagtgcctagctcttcagcttcagagaatgccattggcgatccatacaaaactcatattagcagtgcagccctcagcctgaacagtttgcatacagtgaggtattactctaaggtgacaccgagctatgacgctacggccgtgactaaccagaatatcagtatacacctgcccagcgcaatgcccccagtgtcaaagctgctccctcggcactgtacctcaggacttgggcagacttgcaccacccatcccaactgtttgcaacagttttgggcatattag

SEQ ID NO: 195249 - DNA, 2193 bp, Artificial Sequence
  derived and/or modified sequence
ttagtgcagggggcgggcccgggacgcagcggctgtggagctcctcctgctgggaggctgccccaggacccagcacgtgcgcagcggccatggcttcctcaattatctgccaggagcactgccagatctcgggccaggcaaaaatagacatcttattagttggagatgtcactgtgggctacctggctgatactgtacagaaactatttgcaaacatagcagaagtcaccatcaccatcagtgacacgaaggaggcagcagcgcttttggatgattgcatattcaacatggttctcttgaaggtgccttcttcactaagtgccgaggagctggaagccatcaagttaattagatttggcaaaaagaaaaatacacattcactgtttgtttttataatccctgaaaattttaaaggttgtatttcagggcatggaatggatattgctttaactgaaccactgacaatggaaaaaatgagtaatgtggtaaaatactggacaacatgtccctcaaacactgttaagactgaaaacgcaactgggcctgaagaacttggattgcccctgcagaggtcctacagcgaacacctgggatattttcctactgatctatttgcctgctctgaatctttaaggaatggcaatgggcttgaattaaatgcttcgttgtcagagttcgagaaaaacaaaaagatctctcttcttcattcaagcaaggaaaaactaagaagggaaagaatcaaatattgctgtgagcagctgcgtactctcttgccgtatgtaaaagggagaaagaatgatgcggcttcagttcttgaggcaacagttgattatgtgaaatatatccgggagaaaatctctccagccgttatggcccagattacagaagcacttcagagcaacatgaggttttgtaagaaacaacaaacacccattgagctgtctctcccaggcactgtcatggcacagcgggaaaacagtgtgatgagcacttactcccctgagagagggctccaattcctgactaatacgtgctggaatgggtgctccactcctgatgcagagagctccttggatgaagctgtgagagttccatcaagctccgcctcagagaatgctattggtgatccatataaaactcacatttccagtgcagcgctgtctctgaattccttgcatactgtcagatattattctaaagtcaccccttcctacgatgcaactgctgtaacaaatcagaacatttcaattcatttaccttcagccatgcccccggtctcaaagcttctccctcggcactgcacttctgggttgggccagacgtgcactacacatcccaactgtctgcaacagttttgggcgtattaaaagcacatgtttgaaattcacactctcaaccacctactgggcgcagtttgacaatctaggaaaagtggaacaaagaatgattttgaaagctccacccaaagacctaatatcaaaagagttggcatggtttggcttctgataaatgcactcaaagcttctgcagatagaaagaccagcagcgaaaaagctggccacacactgtcactcatcttcatacacacttggatccccgccagccagagagctacaagaacaaatggcctcagtgacctacactctcttttctcaaaaaatattccacaatttatgaaaaaagcatgctataaggaagatccatgtagacacgataaaatgattagattgggaaggtgtgttgataccttgtgtcactgagtacagatattacaacttgattcttatttttagtatccctgtgaattactgtcactcatttctaggtggtcttttccttatttgacattttagagagtttccttcttcattcaccatccaaactaagatatgcagagagatgctgaaagaggggtttacctcctcacttgacaactaatgaataaattgatgtgtgcttttgcatttcacaatcccttgagtgaaacgatggctaataggtaaatatttctttctggaccttaagttacagactagcaggttttttgtttttcatctcttcctccctatgggtattagaaaggacagttgaaaataagggggaaaaaggtttgttttatatttcactgaattgttcttatatgtaagttttattattaaataaaatactcagttttcaccctgagcattgtaa

SEQ ID NO: 195250 - DNA, 1278 bp, Artificial Sequence
  derived and/or modified sequence
atggcttctagcattatttgccaggagcattgtcaaatatccggtcaggcaaaaattgatatcctcctcgtcggcgacgtgaccgtcggatacttggcagataccgttcaaaaattattcgccaatattgccgaggtgaccattacaatttctgataccaaggaggcagccgcacttctggatgactgcatttttaatatggtgctgctaaaagtgccatccagcctgtccgcagaagaattggaggccattaagctgataagattcggaaaaaagaagaacacccacagtttgttcgtctttataatcccagaaaactttaaaggctgcatatctggacacggcatggacatcgccctgaccgagcctctgaccatggagaaaatgtctaacgtcgtgaagtattggaccacatgtccatccaacaccgttaagaccgaaaatgctacaggccctgaagagctgggcttgcccctccagcgtagttactccgagcatttaggctatttcccaactgatctatttgcatgcagtgaaagcttacggaatgggaatgggctggagttgaacgcaagtctgagcgaattcgagaaaaataagaagattagtttgttgcacagtagcaaggagaaacttcggagggaacggattaaatactgctgcgagcagctccggaccttgctcccatatgtcaaaggccgaaagaacgacgcggcaagcgtgctggaggcaacagttgattacgtgaagtacatacgagagaagataagtcccgctgtgatggcacagatcacagaggcactgcaatctaacatgagattttgcaaaaagcagcagacacccattgagctctctctgcctggtacagtgatggcacagcgggaaaactctgttatgtctacatactcgcccgaaagagggctgcagtttctgactaacacctgttggaacggatgttcaacccccgacgcagaaagttctctagacgaagccgtccgcgtcccctctagtagcgcctctgaaaatgccatcggagacccatacaaaactcacatctctagcgccgctttgagccttaactccctgcacaccgtgagatactacagtaaggtcactcccagctacgatgccactgccgtaaccaaccaaaacatctccattcaccttccttctgccatgccccctgtgtcgaaattacttcctcggcactgtacttcaggactcgggcagacgtgcaccacacaccccaactgcctccagcagttttgggcatattag

SEQ ID NO: 195251 - DNA, 1278 bp, Artificial Sequence
  derived and/or modified sequence
atggccagcagcatcatctgccaggagcactgccagatcagcggccaggccaagatcgacatcctgctggtgggcgacgtgaccgtgggctacctggccgacaccgtgcagaagctgttcgccaacatcgccgaggtgaccatcaccatcagcgacaccaaggaggccgccgccctgctggacgactgcatcttcaacatggtgctgctgaaggtgcccagcagcctgagcgccgaggagctggaggccatcaagctgatcagattcggcaagaagaagaacacccacagcctgttcgtgttcatcatccccgagaacttcaagggctgcatcagcggccacggcatggacatcgccctgaccgagcccctgaccatggagaagatgagcaacgtggtgaagtactggaccacctgccccagcaacaccgtgaagaccgagaacgccaccggccccgaggagctgggcctgcccctgcagagaagctacagcgagcacctgggctacttccccaccgacctgttcgcctgcagcgagagcctgagaaacggcaacggcctggagctgaacgccagcctgagcgagttcgagaagaacaagaagatcagcctgctgcacagcagcaaggagaagctgagaagagagagaatcaagtactgctgcgagcagctgagaaccctgctgccctacgtgaagggcagaaagaacgacgccgccagcgtgctggaggccaccgtggactacgtgaagtacatcagagagaagatcagccccgccgtgatggcccagatcaccgaggccctgcagagcaacatgagattctgcaagaagcagcagacccccatcgagctgagcctgcccggcaccgtgatggcccagagagagaacagcgtgatgagcacctacagccccgagagaggcctgcagttcctgaccaacacctgctggaacggctgcagcacccccgacgccgagagcagcctggacgaggccgtgagagtgcccagcagcagcgccagcgagaacgccatcggcgacccctacaagacccacatcagcagcgccgccctgagcctgaacagcctgcacaccgtgagatactacagcaaggtgacccccagctacgacgccaccgccgtgaccaaccagaacatcagcatccacctgcccagcgccatgccccccgtgagcaagctgctgcccagacactgcaccagcggcctgggccagacctgcaccacccaccccaactgcctgcagcagttctgggcctactag

SEQ ID NO: 195252 - protein, 518 aa, Artificial Sequence
  derived and/or modified sequence
MAASMARRLWPLLTRRGFRPRGGCISNDSPRRSFTTEKRNRNLLYEYAREGYSALPQLDIERFCACPEEAAHALELRKGELRSADLPAIISTWQELRQLQEQIRSLEEEKAAVTEAVRALLANQDSGEVQQDPKYQGLRARGREIRKELVHLYPREAQLEEQFYLQALKLPNQTHPDVPVGDESQARVLHMVGDKPVFSFQPRGHLEIGEKLDIIRQKRLSHVSGHRSYYLRGAGALLQHGLVNFTFNKLLRRGFTPMTVPDLLRGAVFEGCGMTPNANPSQIYNIDPARFKDLNLAGTAEVGLAGYFMDHTVAFRDLPVRMVCSSTCYRAETNTGQEPRGLYRVHHFTKVEMFGVTGPGLEQSSQLLEEFLSLQMEILTELGLHFRVLDMPTQELGLPAYRKFDIEAWMPGRGRFGEVTSASNCTDFQSRRLHIMFQTEAGELQFAHTVNATACAVPRLLIALLESNQQKDGSVLVPPALQSYLGTDRITAPTHVPLQYIGPNQPRKPGLPGQPAVS

SEQ ID NO: 195253 - protein, 518 aa, Artificial Sequence
  derived and/or modified sequence
MEGVWQELLDSAQIEICVADWWGARENCGCVYQLRVRLLDVYEKEVVKFSASPDPVLQWTERGCRQVSHVFTNFGKGIRYVSFEQYGRDISTWQELRQLQEQIRSLEEEKAAVTEAVRALLANQDSGEVQQDPKYQGLRARGREIRKELVHLYPREAQLEEQFYLQALKLPNQTHPDVPVGDESQARVLHMVGDKPVFSFQPRGHLEIGEKLDIIRQKRLSHVSGHRSYYLRGAGALLQHGLVNFTFNKLLRRGFTPMTVPDLLRGAVFEGCGMTPNANPSQIYNIDPARFKDLNLAGTAEVGLAGYFMDHTVAFRDLPVRMVCSSTCYRAETNTGQEPRGLYRVHHFTKVEMFGVTGPGLEQSSQLLEEFLSLQMEILTELGLHFRVLDMPTQELGLPAYRKFDIEAWMPGRGRFGEVTSASNCTDFQSRRLHIMFQTEAGELQFAHTVNATACAVPRLLIALLESNQQKDGSVLVPPALQSYLGTDRITAPTHVPLQYIGPNQPRKPGLPGQPAVS

SEQ ID NO: 195254 - protein, 236 aa, Artificial Sequence
  derived and/or modified sequence
MAASMARRLWPLLTRRGFRPRGGCISNDSPRRSFTTEKRNRNLLYEYAREGYSALPQLDIERFCACPEEAAHALELRKGELRSADLPAIISTWQELRQLQEQIRSLEEEKAAVTEAVRALLANQDSGEVQQDPKYQGLRARGREIRKELVHLYPREAQLEEQFYLQALKLPNQTHPDVPVGDESQARVLHMVGDKPGACPTCLATGPITCAGLEPSCSTAWSTSHSTSFSAGASPP

SEQ ID NO: 195255 - DNA, 1557 bp, Artificial Sequence
  derived and/or modified sequence
atggccgcaagcatggcgcggaggctctggcccctccttacccggcggggcttcaggcctcggggcggatgtatctccaatgacagcccacgcaggtctttcacgacagagaaaaggaaccgcaacttgctctacgagtacgctcgcgaaggatattcggcccttccacagttggatatagagaggttctgtgcttgtccagaggaggctgcacacgctctcgaattgagaaagggcgagctgagaagtgcagacctcccggcgatcatctccacatggcaagagctgcggcaactccaggagcagatccggtccttggaggaggaaaaagcggccgtcacagaagccgtgcgggcactgctggccaatcaagacagcggcgaggtgcaacaggatccgaaatatcagggtctgagagccaggggtagggagatcagaaaggagctggtgcatctctaccctcgggaagcacaacttgaagagcagttctatctccaggctcttaagttgccaaaccagacacacccggacgtgcccgtgggcgatgagtcccaggcacgagtccttcatatggtaggcgacaaaccggttttctccttccagccgcgggggcacctcgaaattggagagaaactggatataataagacagaaaagattatctcatgtgtcaggtcacaggtcttactaccttaggggcgctggggccctgctgcagcacggcctggttaatttcacctttaataagctcctgcggagaggttttactccgatgactgtgccggacctgttgaggggcgcagtgtttgagggctgcggtatgacccctaatgccaatccatcacaaatttataatattgatcctgctcgattcaaagacttgaatctcgccggaacagcggaggtgggattggctggctactttatggaccacactgttgcattccgcgaccttcctgttagaatggtgtgtagcagtacctgctacagagccgaaaccaacactggtcaagagccaagagggctctaccgcgtgcaccattttactaaagtcgaaatgttcggcgtgactggaccgggcctcgagcagagctcacaattactggaagagtttctttcattacagatggagatcctgacggagttaggattgcattttcgggtgttggacatgccaacccaagagctgggtctgccagcttatcgaaagtttgatattgaggcatggatgcccggcaggggaaggtttggagaggttacctcagcctcaaattgcaccgacttccagtctcgcagattgcacatcatgttccagaccgaggcaggggaattgcagtttgcgcacaccgtgaacgcgacagcttgtgccgtgcccagacttctgattgctctgctggaatctaaccaacagaaggacgggagtgtgctggtacccccagcattgcagtcctacctgggtacagacagaattaccgcccccacacacgtgcccctgcagtacattgggcccaatcagccacggaagcctgggctccctggccagccagctgtctcgtag

SEQ ID NO: 195256 - DNA, 1557 bp, Artificial Sequence
  derived and/or modified sequence
atggaaggcgtctggcaggagttgctggactctgcccagatcgagatatgtgttgccgactggtggggtgctagggagaattgcggttgtgtctaccaactcagggtgcggcttctggatgtgtacgaaaaagaggtcgtcaaattcagtgcctctccagaccctgtgctccaatggactgaacgtggatgtaggcaggttagccatgtcttcacaaacttcggtaagggcatacgctacgtttccttcgaacaatatgggcgcgacatcagtacctggcaagagctgcgccagctccaggaacagattcggagcttggaggaggaaaaggcggccgtcaccgaggccgtgcgggcgttgctggcaaaccaagattctggggaagtgcagcaggaccccaagtatcagggtctgcgagcccgggggcgggagatccgcaaggagctggtgcacctctaccctagagaggcccagctcgaagagcagttctatctccaggctttgaaactccccaatcaaactcacccagacgtgcctgtgggagatgaatctcaggcgcgggtgctccatatggtcggcgacaaacccgtcttctccttccaaccgcgcggacacttggagatcggcgagaagttagacatcattcgccagaagcggctgtcccacgtgtcaggccatcgatcttattatcttcgtggggcaggcgcgctgctgcagcacggactggtgaacttcacgtttaataaattgctgcgccgcggtttcactccaatgacggtgccagacctgctaagaggagccgtatttgagggatgcggtatgacccccaacgctaatcctagccaaatttataatatcgaccctgcccgatttaaagacttaaacctagcaggcaccgcagaggtgggactcgcgggctattttatggaccacacggtggcattcagggatctcccagtgcgaatggtttgctcctccacctgttacagggcggaaactaacacggggcaggagccaaggggcctgtatcgagtacatcacttcacaaaggtggaaatgttcggagtcaccgggcccgggttagaacagagtagccagctactcgaagaattcctgtctcttcagatggagatcctcacggagctcggacttcactttagagtcctggatatgccgacccaagagctgggcctgcccgcgtacaggaaatttgacattgaggcctggatgccaggacgtggccgcttcggtgaggtgacatctgctagtaattgtaccgacttccagtcacgtcgactccacatcatgtttcagacggaggctggcgaacttcagtttgcacataccgtgaacgctactgcatgcgcagtgcccaggctcttgatcgcactactcgagagcaaccaacagaaagacgggtcagtcctcgtacccccggcgctgcagagctacttgggaacagataggatcacggccccaacacacgttccgctgcaatatattggcccaaaccaaccacggaagcccgggctacccgggcagccagccgtatcctag

SEQ ID NO: 195257 - DNA, 711 bp, Artificial Sequence
  derived and/or modified sequence
atggccgcatccatggcccggcggctgtggcccctgctgacacggcgtggatttcgccctaggggaggatgtatcagtaatgattcaccgaggaggtcattcaccaccgagaaacgaaacagaaacctgctatacgagtacgctagagaaggctatagcgcgctgccgcagttagacatcgaaagattttgcgcctgtcctgaggaggctgctcacgcacttgaactgcggaagggcgagttgagatcggctgaccttcctgctattatctcaacatggcaagagctccgtcaattgcaggagcagatccgcagccttgaagaggaaaaggctgcagttacagaagcggttagggccctcctggctaatcaggatagtggtgaggtccagcaggatccaaagtaccagggtcttagagcccggggccgggagattcgtaaggagctggtccatctttaccctcgcgaggctcagctggaagaacagttctaccttcaagccctcaagctgccaaaccagacccacccagatgtgcccgtgggagacgaatctcaagcgagagtcttgcatatggtaggtgacaagcctggggcgtgtcctacctgtctcgccaccggaccaataacctgcgccgggctggagccgagctgttctactgcctggtctacctctcactccacctcattcagtgccggggccagccctccatag

SEQ ID NO: 195258 - DNA, 1557 bp, Artificial Sequence
  derived and/or modified sequence
atggccgcctccatggcccggcggctgtggcccctgctgacccggcggggcttccggccccggggcggctgcatcagcaatgacagccccaggaggagcttcaccacagagaagaggaacagaaacctgctgtatgaatatgcccgggagggctacagcgccctgccccagctggacatcgagcgcttctgtgcctgcccagaggaggccgcccacgccctggagctgaggaagggggagctgcggtctgctgacctgcctgccatcatcagcacctggcaggagctgcggcagctgcaggagcagatccgcagcctggaggaggagaaggctgctgtgacagaggccgtgcgggccctgctggccaaccaggacagcggggaggtgcagcaggaccccaagtaccagggcctgcgggcccggggccgggagatcaggaaggagctggtgcacctgtacccccgggaggcccagctggaggagcagttctacctgcaggccctgaagctgcccaaccagacccacccagatgtgcctgtgggagatgagagccaggcccgggtgctgcacatggtgggggacaagcctgtgttctccttccagccccggggccacctggagatcggggagaagctggacatcatccggcagaagaggctgagccacgtgtctggccacaggagctactacctgcggggggccggggccctgctgcagcacggcctggtgaacttcaccttcaacaagctgctgcggcggggcttcacccccatgacagtgcctgacctgctgcggggagctgtgtttgagggctgcggcatgaccccaaatgccaaccccagccagatctacaacatcgaccctgcccgcttcaaggacctgaacctggccggcacagctgaggtgggcctggccggctacttcatggaccacacagtggccttccgggacctgcctgtgaggatggtgtgcagcagcacctgctacagagctgagaccaacacaggccaggagccccggggcctgtacagagtgcaccacttcaccaaggtggagatgtttggagtgactggacctggcctggagcagagcagccagctgctggaggagttcctgagcctgcagatggagatcctgacagagctgggcctgcacttccgggtgctggacatgcccacccaggagctgggcctgcctgcctacaggaagtttgacatcgaggcctggatgcctggccggggccgctttggagaggtgaccagcgccagcaactgcacagacttccagagccggcggctgcacatcatgttccagacagaagctggggagctgcagtttgcccacacagtgaatgccacagcctgtgctgtgccccggctgctgattgccctgctggagagcaaccagcagaaggatggctctgtgctggtgcccccagccctgcagagctacctgggcacagaccgcatcacagcccccacccacgtgcccctgcagtacatcggccccaaccagcccaggaagccaggcctgcccggccagcctgctgtgtcctag

SEQ ID NO: 195259 - DNA, 1557 bp, Artificial Sequence
  derived and/or modified sequence
atggagggcgtgtggcaggagctgctggacagcgcccagatcgagatctgtgtggccgactggtggggcgcccgggagaactgtggctgtgtgtaccagctgcgggtgcggctgctggatgtgtatgagaaggaggtggtgaagttcagcgccagcccagaccctgtgctgcagtggacagagcggggctgccggcaggtgagccacgtgttcaccaactttgggaagggcatccgctacgtgtcctttgagcagtatggccgggacatcagcacctggcaggagctgcggcagctgcaggagcagatccgcagcctggaggaggagaaggctgctgtgacagaggccgtgcgggccctgctggccaaccaggacagcggggaggtgcagcaggaccccaagtaccagggcctgcgggcccggggccgggagatcaggaaggagctggtgcacctgtacccccgggaggcccagctggaggagcagttctacctgcaggccctgaagctgcccaaccagacccacccagatgtgcctgtgggagatgagagccaggcccgggtgctgcacatggtgggggacaagcctgtgttctccttccagccccggggccacctggagatcggggagaagctggacatcatccggcagaagaggctgagccacgtgtctggccacaggagctactacctgcggggggccggggccctgctgcagcacggcctggtgaacttcaccttcaacaagctgctgcggcggggcttcacccccatgacagtgcctgacctgctgcggggagctgtgtttgagggctgcggcatgaccccaaatgccaaccccagccagatctacaacatcgaccctgcccgcttcaaggacctgaacctggccggcacagctgaggtgggcctggccggctacttcatggaccacacagtggccttccgggacctgcctgtgaggatggtgtgcagcagcacctgctacagagctgagaccaacacaggccaggagccccggggcctgtacagagtgcaccacttcaccaaggtggagatgtttggagtgactggacctggcctggagcagagcagccagctgctggaggagttcctgagcctgcagatggagatcctgacagagctgggcctgcacttccgggtgctggacatgcccacccaggagctgggcctgcctgcctacaggaagtttgacatcgaggcctggatgcctggccggggccgctttggagaggtgaccagcgccagcaactgcacagacttccagagccggcggctgcacatcatgttccagacagaagctggggagctgcagtttgcccacacagtgaatgccacagcctgtgctgtgccccggctgctgattgccctgctggagagcaaccagcagaaggatggctctgtgctggtgcccccagccctgcagagctacctgggcacagaccgcatcacagcccccacccacgtgcccctgcagtacatcggccccaaccagcccaggaagccaggcctgcccggccagcctgctgtgtcctag

SEQ ID NO: 195260 - DNA, 711 bp, Artificial Sequence
  derived and/or modified sequence
atggccgcctccatggcccggcggctgtggcccctgctgacccggcggggcttccggccccggggcggctgcatcagcaatgacagccccaggaggagcttcaccacagagaagaggaacagaaacctgctgtatgaatatgcccgggagggctacagcgccctgccccagctggacatcgagcgcttctgtgcctgcccagaggaggccgcccacgccctggagctgaggaagggggagctgcggtctgctgacctgcctgccatcatcagcacctggcaggagctgcggcagctgcaggagcagatccgcagcctggaggaggagaaggctgctgtgacagaggccgtgcgggccctgctggccaaccaggacagcggggaggtgcagcaggaccccaagtaccagggcctgcgggcccggggccgggagatcaggaaggagctggtgcacctgtacccccgggaggcccagctggaggagcagttctacctgcaggccctgaagctgcccaaccagacccacccagatgtgcctgtgggagatgagagccaggcccgggtgctgcacatggtgggggacaagccaggggcctgccccacctgcctggccaccggccccatcacctgtgccggcctggagcccagctgcagcacagcctggagcaccagccacagcaccagcttctctgctggggccagccccccatag

SEQ ID NO: 195261 - DNA, 1557 bp, Artificial Sequence
  derived and/or modified sequence
atggccgccagcatggcccggcggctgtggcccctgctgacccggagaggcttcagacctaggggcggctgcatcagtaatgatagtccccgccgctcctttacaacagaaaaaagaaataggaatctattgtacgaatatgcccgagagggctattcagcacttccccaactggatatcgaacgcttctgcgcatgccctgaagaggccgctcacgccctagaactgagaaagggggagctccgatctgctgacctgcctgcgatcatctccacctggcaggaattgaggcaactacaggaacagattaggtctctggaggaggagaaagctgcagttacagaggccgtgcgcgcactgctcgcgaaccaggattctggcgaggtgcagcaggaccccaaatatcagggcctccgcgcccgcggtcgggaaatccgcaaggaattggtgcatctttatccacgtgaagcacagcttgaggagcaattctatctgcaagcattaaagctaccgaaccagacgcaccctgacgtgcctgtcggagatgagtcccaggctcgggttctgcatatggtgggtgataagccagtcttcagttttcagccacgtgggcacctggaaataggcgaaaagcttgatatcatccggcaaaaaaggctgagtcatgtgagcgggcatcgatcatactacttgagaggcgcaggagcactgctgcagcatgggctcgtcaacttcaccttcaataagttgctgcgtcgcggcttcacaccaatgactgtgcccgacctcttacggggggcggttttcgaggggtgtgggatgacacccaacgccaacccttctcagatctacaatattgacccagccagatttaaggacttgaacctagcgggcacagctgaggtcggtctcgcaggctattttatggaccataccgttgcttttagagaccttccagtgaggatggtgtgcagctcaacttgttacagggccgaaacgaatacagggcaggaaccccgcggcctgtacagagtccaccatttcaccaaggtggaaatgttcggcgtcactggaccaggcctcgagcagtcttcacagctcctcgaggaattcctgtctcttcagatggagattctgaccgagttaggactgcacttccgagtgctcgacatgcccacccaggagctcgggctgccagcatatcggaagtttgatattgaagcctggatgccaggcagggggcggttcggcgaggttacatccgcatcaaactgtactgacttccagagcagacgcctgcacatcatgtttcagacagaagctggggaacttcagtttgcccacactgtgaacgctaccgcttgcgcagttccacgactgctcatcgccttactggaaagtaaccagcagaaagacggcagcgtgctcgtccctcctgccttgcagtcctacctcgggactgacagaattactgcaccaacccatgtgccactacaatatataggcccaaatcagccacgcaagccagggctgccaggccagccagcagtttcttag

SEQ ID NO: 195262 - DNA, 1557 bp, Artificial Sequence
  derived and/or modified sequence
atggagggcgtgtggcaggagctgctggacagcgcccagatcgagatttgcgttgcagattggtggggagctcgcgagaattgcgggtgcgtgtatcagctccgcgtgagactgttagatgtttacgaaaaggaagtcgtaaagttttcggcctctcccgatcctgtgctgcaatggacagagcggggctgtcggcaggtgagtcacgtttttaccaatttcgggaagggaattaggtacgtgtcatttgagcaatatggaagggacatctctacctggcaggaactccggcagctgcaagaacagatccggtccctagaagaggagaaggcagctgttactgaggcggtgagggcactcctggctaatcaggactcgggagaggttcagcaggaccccaagtaccaaggcctgcgcgctaggggcagagaaattcggaaggaactggtgcatctgtatcccagggaggcacagttagaagaacagttctacctccaggccctaaagctgcctaatcagacacaccccgacgtcccggtcggcgacgaatcgcaggctagggtcctgcacatggtcggggacaaaccagtattttcttttcaacccaggggccatttagagattggggagaagttggacatcattagacagaagcgtttgtcacatgtgtccggccacagatcttactatttgagaggagctggggcacttctgcagcatggtttagtgaattttacttttaacaagctgttacgccggggcttcaccccaatgacagtgccggaccttctgcgtggagcagttttcgaagggtgcgggatgacgcccaacgcgaacccatcccagatctacaatatagatccagcacgcttcaaagacctcaacctggctggaaccgccgaggtgggactggccggctactttatggaccatactgtggccttccgagatcttccagttcgaatggtatgcagcagcacatgttaccgggccgaaaccaatactggccaggaaccccgcggcctgtaccgtgtgcaccatttcaccaaagtagagatgttcggggttactggcccagggctcgaacaatcctctcagctattggaagagttcctctccctgcagatggagatattgactgagctcggattgcacttcagagtcttagacatgcccacccaggagctcggtctgcccgcgtatcgtaaattcgacatagaggcctggatgccgggacgtggaagatttggggaggttacatcagctagcaattgtaccgactttcaatcccggaggcttcacatcatgtttcagaccgaggctggcgaactgcagtttgcccatacagtgaacgctactgcgtgtgccgtgccccggctgctaattgcccttctagagtccaaccagcagaaagacggaagtgtcctcgtgcctcccgccttgcaaagctacctgggcactgaccgaattacggctcccacacacgtgccacttcagtatatcgggcctaaccagccccgtaaacccggcctgcctggccaacccgccgtgtcatag

SEQ ID NO: 195263 - DNA, 711 bp, Artificial Sequence
  derived and/or modified sequence
atggccgccagcatggcccggcggctgtggcccctgctgacccggagaggattccggcctcgaggaggatgcatctcaaacgactctccgagacgcagcttcaccactgagaaacgcaacaggaatttgctgtacgagtacgcccgagagggatactctgcgcttccccagctcgatatcgaaagattttgtgcctgccctgaggaggccgcccatgctttagagcttaggaaaggagagctaagatcagctgacctgcccgcgatcattagcacctggcaagagcttcgtcaactgcaagagcagattagatctctggaggaggagaaggccgccgtgacagaggccgtgagggccctgctggccaaccaagacagcggagaggtacagcaggatcccaagtaccaaggtctcagggcccgcggccgggagatcagaaaagaactcgtacatctataccctcgggaggcgcagcttgaggaacagttctatctccaggccctgaagttgcccaatcaaacacatccagacgtgcctgttggagacgagagtcaggcgcgagtgctgcacatggttggggataagcctggggcatgcccgacctgtctggccacaggtccaattacctgcgccggtctggaaccctcctgtagcaccgcatggtccacatcacacagcaccagcttttctgcaggagcaagccccccctag

SEQ ID NO: 195264 - DNA, 1557 bp, Artificial Sequence
  derived and/or modified sequence
atggcagcctctatggctcgcagactctggccgctcttgacaagacgcggtttccgacccaggggaggctgtatcagcaacgacagtccccgtcggtccttcaccactgagaaaaggaaccgcaacctcctgtacgaatacgcgcgtgagggctacagcgccctgccacagctggatattgagcgtttttgcgcctgccctgaagaagcagcccacgctcttgaattaagaaaaggggagctgcgcagcgcagacctccccgcaatcatctcgacttggcaggagctgcgacagctgcaggagcaaatccggtccttggaggaggaaaaagctgcggtgactgaggctgtgcgggcattactggccaaccaggacagcggagaggtgcagcaggacccgaaataccagggattgcgcgctcgcggacgggagattcgcaaggaattagtccatctctatccaagagaggcccaactggaagaacagttctatctccaggccctgaagctcccaaatcagactcatcctgatgtccccgttggcgatgagagccaggcccgagttttgcatatggtcggtgataagcccgtcttttcattccagccacgagggcacttggaaataggagagaagctggatattatccgtcaaaagcgcctgagccatgtctctggacaccgcagttattacttgcgcggtgccggtgccctgctgcaacacgggctagtgaacttcacctttaacaagctgctcagaagaggatttacaccgatgactgtcccagacctgctgcggggagctgtgttcgagggctgtgggatgaccccgaacgctaatccttcacagatctacaacatcgatcccgcaagattcaaagatcttaacctagcaggaaccgcagaagtggggctcgcagggtactttatggatcacacggtggcctttagggaccttcccgttcgaatggtgtgctcaagcacctgttaccgtgcagagaccaataccggccaagagccccgaggactatatcgcgtccatcactttactaaggttgagatgttcggagttactggcccaggcctcgaacagagttcacagttgctcgaggaatttctgagcctgcaaatggagattttgacggagttgggactccacttcagagtgctagacatgcccacccaggagctgggcttgcccgcatataggaaattcgatatcgaggcctggatgcctgggagaggtaggttcggcgaagtgacttcagcatcaaattgcaccgatttccagtccagaaggctgcatatcatgttccagacggaggcaggagagctgcagtttgcccacaccgtgaacgccaccgcatgtgccgtgcccaggctgctcatagccctgctcgaaagtaaccagcaaaaggatgggtccgtgctggtccctcccgcactccaatcctatcttggaaccgaccggattacggctccgacgcacgtgccgctccagtacatcggcccaaatcaacccaggaagccaggcctgccaggacagccggcagtgtcctag

SEQ ID NO: 195265 - DNA, 1557 bp, Artificial Sequence
  derived and/or modified sequence
atggagggtgtgtggcaagagctgctagactccgcccagattgagatctgtgtggcagactggtggggcgctcgggagaattgcgggtgcgtgtaccagctgagggttcgtctgctcgatgtttatgagaaggaggtcgtgaagttctcagcctctcccgaccctgtactgcaatggaccgaacgaggatgtaggcaggtaagccacgtattcaccaacttcgggaaaggaatccgctacgtgtccttcgagcagtacggcagagacatttccacttggcaggaactcaggcagctgcaagaacagattcgatccctcgaagaagagaaggccgctgtgacggaggctgtgcgcgcattgctggcgaatcaggattccggcgaagtccagcaggacccaaaatatcagggcctaagggccagaggcagagaaattagaaaagagcttgtccacttgtacccccgtgaggcccagctggaagagcaattctatctgcaggctctcaagctgccaaaccagactcacccggatgtccctgtaggggacgaatcccaggctagagttctccatatggttggagataagcccgtattttcatttcaacctcgcggtcacctcgaaatcggagaaaaactagacatcattaggcagaaaaggctcagtcatgtgtccggtcataggtcgtactatctgaggggtgcaggcgcactccttcagcacggtctggtgaatttcacctttaataagctgctccgtaggggatttacaccaatgacagtgcccgatctgctgcgaggcgcagtcttcgagggatgcggaatgacacccaatgctaacccctcccaaatttataacatcgaccccgcaagatttaaggatctgaatctggctgggacagcggaggtcggcctcgctggctactttatggaccacaccgtggcatttagagatctcccagtgcgcatggtatgctcctccacctgttatcgggcagagaccaataccggacaggagcctcgtggcctatacagggtccatcatttcaccaaggttgagatgtttggagtgactggccctggactcgaacagtcctcgcaactgcttgaggagttcttgagtttgcagatggagatcctgactgaacttggccttcactttcgggtccttgacatgcctactcaggaactcggactgccagcctaccgcaagttcgacatcgaggcctggatgcccggtcgagggagatttggggaggtgacatccgcgtcaaattgtactgactttcagagcaggaggctgcatattatgtttcagacagaggccggtgagctgcagtttgcccacaccgtgaatgccacagcatgtgccgttcccaggttattgatcgcactgctggagtcaaaccaacagaaagacggcagtgttttggttccccctgctctgcaatcttacttgggcaccgaccgaattacagcacccacccacgtacctttgcaatatatcgggccaaaccaacctcgcaaacctggactgcctggacagcctgctgtcagctag

SEQ ID NO: 195266 - DNA, 711 bp, Artificial Sequence
  derived and/or modified sequence
atggctgcctctatggcgagacggctttggccactcctgactcgcaggggttttagaccaaggggagggtgtataagtaatgatagcccccgtagatcattcactaccgagaagcgcaaccgcaaccttctctatgagtatgctagagagggatattcagctctgccgcagctggatattgagaggttctgtgcatgtcctgaggaggctgcgcacgccctggaactgcgcaagggagaattgaggtctgctgaccttcccgctatcatctcgacatggcaggaactgcgccagctccaggagcagattaggagcttggaggaggagaaagccgctgtgaccgaggccgttagagcactgttagccaatcaggactcaggggaagttcagcaggacccaaagtatcagggcctgcgcgcacggggtagggagatccgcaaagagctggtgcatctttatccacgcgaggcccagctggaggaacaattctatctgcaggccctgaaattgcccaaccagacccatcccgacgttccggtgggcgatgagagccaggctcgtgtgcttcatatggtaggagataagcctggagcttgcccgacttgcttggccaccggtcccatcacgtgtgcaggcctagagccttcctgttccactgcatggtctaccagccactccacatccttctccgcaggcgcttccccaccttag

SEQ ID NO: 195267 - DNA, 2059 bp, Artificial Sequence
  derived and/or modified sequence
tgaagaggcgggacacagacgacgattgggcgacgaaggactctatcgcggtcaactttcctcaggatctgattggctcgtcacggtcaggttcgctgccttgcaattggtctaaacgcggagtgggcgggacgaagtgccgccttgttcccggtccaagatggctgcgtccatggcgcggcgcttgtggcctttgctgactcgtcgggggttccggccccggggaggctgcatctccaacgatagtccaaggagaagtttcactacagagaaacgaaaccggaacctcctgtacgagtatgcgcgcgagggctacagcgcactccctcagctggacatagagcggttctgcgcatgcccagaagaggccgcacacgccctggagctccgcaagggggagctgcgctcggcggacctgcccgcgatcatctcgacatggcaggagctgaggcagctgcaggagcagatccggagcctggaggaagagaaggcagctgtgactgaggcagtgcgggccctgctggcaaaccaggacagtggtgaagtgcagcaggaccccaagtaccagggtctgcgggcacgtggccgggagatccggaaggagcttgttcacctgtaccccagggaggcccagcttgaggagcagttctacctgcaggcgctgaagctgcccaaccagacccacccagacgtgcccgtcggggatgagagccaggctcgagtgctccacatggtcggagacaagccagttttctccttccaacctcggggccacctggaaattggcgagaaactcgacatcatccgtcagaagcgcctgtcccacgtgtctggccaccggtcctattacctgcgcggggctggagccctcctgcagcacggcctggtcaacttcacattcaacaagcttctccgccggggcttcacccccatgacggtgccagaccttctccgcggagcagtgtttgaaggctgtgggatgacaccaaatgccaacccatcccaaatttacaacatcgaccctgcccgcttcaaagatctcaacctggctggaacagcggaggtggggcttgcaggctacttcatggaccacaccgtggccttcagggacctgccagtcaggatggtttgctccagcacctgctaccgggcagagacaaacacgggacaggaaccccgggggctgtatcgagtacaccacttcaccaaggtggagatgtttggggtgacaggccctgggctggagcagagctcacagctgctggaggagttcctgtcccttcagatggagatcttgacagagctgggcttgcacttccgggtcctggatatgcccacccaagaactgggcctccccgcctaccgcaagtttgacattgaggcctggatgccaggccgaggccgctttggagaggtcaccagtgcttccaactgcacagacttccagagccgccgcctccacatcatgttccagaccgaggctggggagctgcagtttgcccacacggtgaacgccaccgcctgtgctgtcccccgccttctcatcgcgctcctggagagtaaccagcagaaggacggctcagtgctcgtgccccctgccctccagtcctacctcggcactgatcggatcacagcccctacccacgtgcctctccagtacatcggccccaaccagccccggaagcctgggctgcctggccagcctgctgtaagctaagaacccacccacagcagccctcgggggtgtcactgcttcctggagttcaggagaccccggacacctgggacctgtgttgctgagcccgtcctgacatctgtgttcttcctgtcagctccacgcccgggcccctggaccacggggtccacctctcctctgtccttgctgcctcagagtcagtcactgaccctgttatcattgagggtcccagtgggaagcaggacgtctgggctttacggttctagggacaggagaagcagaggaagaggcttccatccctccttccttctttcctcctacagtgctgagcaaaaagtccccaataaatggtcaggacaaagg

SEQ ID NO: 195268 - DNA, 1967 bp, Artificial Sequence
  derived and/or modified sequence
agggggcggggctgagggacgcagtgcctgggcggtaggcccggtgggcggggctggagaagagggcttcagaggctgggaggtggagcatggcgggaacggctgggccatagaaaagaacctaacaccggtgcctggggctccttcgcagacctgcttcgtgacctctttcgaatggtgctccaagaggcagcttgtggacctggtgatggaaggggtgtggcaggagctgctggacagcgcccagattgagatctgtgtggctgactggtggggcgctcgagagaactgcggctgcgtctaccagctccgggtccgccttctggatgtgtatgaaaaggaagtggtcaagttctcagcctcacctgacccggtccttcagtggactgagaggggctgccgacaggtctcccacgtcttcaccaactttggcaagggcatccgctacgtatcttttgagcagtacgggagagacatctcgacatggcaggagctgaggcagctgcaggagcagatccggagcctggaggaagagaaggcagctgtgactgaggcagtgcgggccctgctggcaaaccaggacagtggtgaagtgcagcaggaccccaagtaccagggtctgcgggcacgtggccgggagatccggaaggagcttgttcacctgtaccccagggaggcccagcttgaggagcagttctacctgcaggcgctgaagctgcccaaccagacccacccagacgtgcccgtcggggatgagagccaggctcgagtgctccacatggtcggagacaagccagttttctccttccaacctcggggccacctggaaattggcgagaaactcgacatcatccgtcagaagcgcctgtcccacgtgtctggccaccggtcctattacctgcgcggggctggagccctcctgcagcacggcctggtcaacttcacattcaacaagcttctccgccggggcttcacccccatgacggtgccagaccttctccgcggagcagtgtttgaaggctgtgggatgacaccaaatgccaacccatcccaaatttacaacatcgaccctgcccgcttcaaagatctcaacctggctggaacagcggaggtggggcttgcaggctacttcatggaccacaccgtggccttcagggacctgccagtcaggatggtttgctccagcacctgctaccgggcagagacaaacacgggacaggaaccccgggggctgtatcgagtacaccacttcaccaaggtggagatgtttggggtgacaggccctgggctggagcagagctcacagctgctggaggagttcctgtcccttcagatggagatcttgacagagctgggcttgcacttccgggtcctggatatgcccacccaagaactgggcctccccgcctaccgcaagtttgacattgaggcctggatgccaggccgaggccgctttggagaggtcaccagtgcttccaactgcacagacttccagagccgccgcctccacatcatgttccagaccgaggctggggagctgcagtttgcccacacggtgaacgccaccgcctgtgctgtcccccgccttctcatcgcgctcctggagagtaaccagcagaaggacggctcagtgctcgtgccccctgccctccagtcctacctcggcactgatcggatcacagcccctacccacgtgcctctccagtacatcggccccaaccagccccggaagcctgggctgcctggccagcctgctgtaagctaagaacccacccacagcagccctcgggggtgtcactgcttcctggagttcaggagaccccggacacctgggacctgtgttgctgagcccgtcctgacatctgtgttcttcctgtcagctccacgcccgggcccctggaccacggggtccacctctcctctgtccttgctgcctcagagtcagtcactgaccctgttatcattga

SEQ ID NO: 195269 - DNA, 1118 bp, Artificial Sequence
  derived and/or modified sequence
gtgccgccttgttcccggtccaagatggctgcgtccatggcgcggcgcttgtggcctttgctgactcgtcgggggttccggccccggggaggctgcatctccaacgatagtccaaggagaagtttcactacagagaaacgaaaccggaacctcctgtacgagtatgcgcgcgagggctacagcgcactccctcagctggacatagagcggttctgcgcatgcccagaagaggccgcacacgccctggagctccgcaagggggagctgcgctcggcggacctgcccgcgatcatctcgacatggcaggagctgaggcagctgcaggagcagatccggagcctggaggaagagaaggcagctgtgactgaggcagtgcgggccctgctggcaaaccaggacagtggtgaagtgcagcaggaccccaagtaccagggtctgcgggcacgtggccgggagatccggaaggagcttgttcacctgtaccccagggaggcccagcttgaggagcagttctacctgcaggcgctgaagctgcccaaccagacccacccagacgtgcccgtcggggatgagagccaggctcgagtgctccacatggtcggagacaagccaggcgcctgtcccacgtgtctggccaccggtcctattacctgcgcggggctggagccctcctgcagcacggcctggtcaacttcacattcaacaagcttctccgccggggcttcacccccatgacggtgccagaccttctccgcggagcagtgtttgaaggctgtgggatgacaccaaatgccaacccatcccaaatttacaacatcgaccctgcccgcttcaaagatctcaacctggctggaacagcggaggtggggcttgcaggctacttcatggaccacaccgtggccttcagggacctgccagtcaggatggtttgctccagcacctgctaccgggcagagacaaacacgggacaggaaccccgggggctgtatcgagtacaccacttcaccaaggtggagatgtttggggtgacaggccctgggctggagcagagctcacagctgctggaggagttcctgtcccttcagatggagatcttgacagagctgggcttgcacttc

SEQ ID NO: 195270 - DNA, 1557 bp, Artificial Sequence
  derived and/or modified sequence
atggccgccagcatggccagaagactgtggcccctgctgaccagaagaggcttcagacccagaggcggctgcatcagcaacgacagccccagaagaagcttcaccaccgagaagagaaacagaaacctgctgtacgagtacgccagagagggctacagcgccctgccccagctggacatcgagagattctgcgcctgccccgaggaggccgcccacgccctggagctgagaaagggcgagctgagaagcgccgacctgcccgccatcatcagcacctggcaggagctgagacagctgcaggagcagatcagaagcctggaggaggagaaggccgccgtgaccgaggccgtgagagccctgctggccaaccaggacagcggcgaggtgcagcaggaccccaagtaccagggcctgagagccagaggcagagagatcagaaaggagctggtgcacctgtaccccagagaggcccagctggaggagcagttctacctgcaggccctgaagctgcccaaccagacccaccccgacgtgcccgtgggcgacgagagccaggccagagtgctgcacatggtgggcgacaagcccgtgttcagcttccagcccagaggccacctggagatcggcgagaagctggacatcatcagacagaagagactgagccacgtgagcggccacagaagctactacctgagaggcgccggcgccctgctgcagcacggcctggtgaacttcaccttcaacaagctgctgagaagaggcttcacccccatgaccgtgcccgacctgctgagaggcgccgtgttcgagggctgcggcatgacccccaacgccaaccccagccagatctacaacatcgaccccgccagattcaaggacctgaacctggccggcaccgccgaggtgggcctggccggctacttcatggaccacaccgtggccttcagagacctgcccgtgagaatggtgtgcagcagcacctgctacagagccgagaccaacaccggccaggagcccagaggcctgtacagagtgcaccacttcaccaaggtggagatgttcggcgtgaccggccccggcctggagcagagcagccagctgctggaggagttcctgagcctgcagatggagatcctgaccgagctgggcctgcacttcagagtgctggacatgcccacccaggagctgggcctgcccgcctacagaaagttcgacatcgaggcctggatgcccggcagaggcagattcggcgaggtgaccagcgccagcaactgcaccgacttccagagcagaagactgcacatcatgttccagaccgaggccggcgagctgcagttcgcccacaccgtgaacgccaccgcctgcgccgtgcccagactgctgatcgccctgctggagagcaaccagcagaaggacggcagcgtgctggtgccccccgccctgcagagctacctgggcaccgacagaatcaccgcccccacccacgtgcccctgcagtacatcggccccaaccagcccagaaagcccggcctgcccggccagcccgccgtgagctag

SEQ ID NO: 195271 - DNA, 1557 bp, Artificial Sequence
  derived and/or modified sequence
atggagggcgtgtggcaggagctgctggacagcgcccagatcgagatctgcgtggccgactggtggggcgccagagagaactgcggctgcgtgtaccagctgagagtgagactgctggacgtgtacgagaaggaggtggtgaagttcagcgccagccccgaccccgtgctgcagtggaccgagagaggctgcagacaggtgagccacgtgttcaccaacttcggcaagggcatcagatacgtgagcttcgagcagtacggcagagacatcagcacctggcaggagctgagacagctgcaggagcagatcagaagcctggaggaggagaaggccgccgtgaccgaggccgtgagagccctgctggccaaccaggacagcggcgaggtgcagcaggaccccaagtaccagggcctgagagccagaggcagagagatcagaaaggagctggtgcacctgtaccccagagaggcccagctggaggagcagttctacctgcaggccctgaagctgcccaaccagacccaccccgacgtgcccgtgggcgacgagagccaggccagagtgctgcacatggtgggcgacaagcccgtgttcagcttccagcccagaggccacctggagatcggcgagaagctggacatcatcagacagaagagactgagccacgtgagcggccacagaagctactacctgagaggcgccggcgccctgctgcagcacggcctggtgaacttcaccttcaacaagctgctgagaagaggcttcacccccatgaccgtgcccgacctgctgagaggcgccgtgttcgagggctgcggcatgacccccaacgccaaccccagccagatctacaacatcgaccccgccagattcaaggacctgaacctggccggcaccgccgaggtgggcctggccggctacttcatggaccacaccgtggccttcagagacctgcccgtgagaatggtgtgcagcagcacctgctacagagccgagaccaacaccggccaggagcccagaggcctgtacagagtgcaccacttcaccaaggtggagatgttcggcgtgaccggccccggcctggagcagagcagccagctgctggaggagttcctgagcctgcagatggagatcctgaccgagctgggcctgcacttcagagtgctggacatgcccacccaggagctgggcctgcccgcctacagaaagttcgacatcgaggcctggatgcccggcagaggcagattcggcgaggtgaccagcgccagcaactgcaccgacttccagagcagaagactgcacatcatgttccagaccgaggccggcgagctgcagttcgcccacaccgtgaacgccaccgcctgcgccgtgcccagactgctgatcgccctgctggagagcaaccagcagaaggacggcagcgtgctggtgccccccgccctgcagagctacctgggcaccgacagaatcaccgcccccacccacgtgcccctgcagtacatcggccccaaccagcccagaaagcccggcctgcccggccagcccgccgtgagctag

SEQ ID NO: 195272 - DNA, 711 bp, Artificial Sequence
  derived and/or modified sequence
atggccgccagcatggccagaagactgtggcccctgctgaccagaagaggcttcagacccagaggcggctgcatcagcaacgacagccccagaagaagcttcaccaccgagaagagaaacagaaacctgctgtacgagtacgccagagagggctacagcgccctgccccagctggacatcgagagattctgcgcctgccccgaggaggccgcccacgccctggagctgagaaagggcgagctgagaagcgccgacctgcccgccatcatcagcacctggcaggagctgagacagctgcaggagcagatcagaagcctggaggaggagaaggccgccgtgaccgaggccgtgagagccctgctggccaaccaggacagcggcgaggtgcagcaggaccccaagtaccagggcctgagagccagaggcagagagatcagaaaggagctggtgcacctgtaccccagagaggcccagctggaggagcagttctacctgcaggccctgaagctgcccaaccagacccaccccgacgtgcccgtgggcgacgagagccaggccagagtgctgcacatggtgggcgacaagcccggcgcctgccccacctgcctggccaccggccccatcacctgcgccggcctggagcccagctgcagcaccgcctggagcaccagccacagcaccagcttcagcgccggcgccagccccccctag

SEQ ID NO: 195273 - protein, 232 aa, Artificial Sequence
  derived and/or modified sequence
MGSVLSTDSGKSAPASATARALERRRDPELPVTSFDCAVCLEVLHQPVRTRCGHVFCRSCIATSLKNNKWTCPYCRAYLPSEGVPATDVAKRMKSEYKNCAECDTLVCLSEMRAHIRTCQKYIDKYGPLQELEETAARCVCPFCQRELYEDSLLDHCITHHRSERRPVFCPLCRLIPDENPSSFSGSLIRHLQVSHTLFYDDFIDFNIIEEALIRRVLDRSLLEYVNHSNTT

SEQ ID NO: 195274 - DNA, 6020 bp, Artificial Sequence
  derived and/or modified sequence
aggtcatttttgcagcttattgtgatgacaacagtggaggatggtcttccacttcaccttaaaagcggctgttctctgattatcattaagcatggccacgcccgcacttaacttctgacagtggggaaagcagctgtgtgtgatagcttggaaggtttactgctgcctcaagtcctcttctctgcagttgaggtttcaggtttcaatcctcccaataccacaagacagagcacggggcggctgccgcctccgcctccgcgccttaacctaggcggcttgccgaagatctcagccccgcggccgcgcgctcgccctgccctagaccagggttgggcgcagcggcggaggtggcttctgggctgcgcgagctgggagagctgggaggcggcgatcgcagctgggccgggacttccttcctccaccgcacggcaacaaaacaaccctgcggcaggcactgagtgcttcgcagctgtctgggcgagaggcacagcgatgggctccgtgctgagcaccgacagcggcaaatcggcgcccgcctctgccaccgcgcgggccctggagcgcaggagggacccggagttgcccgtcacgtccttcgactgcgccgtgtgccttgaggtgttacaccagcctgtccggacccgctgtggccacgtattctgccgttcctgtattgctaccagtctaaagaacaacaagtggacctgtccttattgccgggcatatcttccttcagaaggagttccagcaactgatgtagccaaaagaatgaaatcagagtataagaactgcgctgagtgtgacaccctggtttgcctcagtgaaatgagggcacatattcggacttgtcagaagtacatagataagtatggaccactacaagaacttgaggagacagcagcaaggtgtgtatgtcccttttgtcagagggaactgtatgaagacagcttgctggatcattgtattactcatcacagatcggaacggaggcctgtgttctgtccactttgccgtttaatacccgatgagaatccaagcagcttcagtggcagtttaataagacatctgcaagttagtcacactttgttttatgatgatttcatagattttaatataattgaggaagctcttatccgaagagtcttagaccggtcacttcttgaatatgtgaatcactcgaacaccacataattttattaaaacgaagggaaaagggaccactgaattgcaccatttaagatgctgcttgaacaaatgggagggaagttgtcaatgattgatgggcaaaaatgtacaacacagttatgtgtttgtccatgtttattgttatagtgcatttaaaaactgctttaattttaatggtttaaatctgttttacatccttgagattcttacacatctaacaacaaaaaaaattatctacatcagtcattgttacatggaaaagacaggtggtaggcaagtaggtggaggatctcggtttgcaaattagataatactctgtgtataatgctacatatcaataactaccatcatggttaggcacgataactaatctttgttctgtgtaaaaaaatatggagagtgaaacaaagtgcagacattcaaagaaataagaaatctgctccaatgctcttgttctaatctctaataggttaacgttaataatcttgtatgggagttggaaaggaaaattttggaagtcaagaaagtccatttaggccggacgcggtggcttacgcttgtaatcccagcactttgggaggctgaagcaggcggatcacaaggtcaggagttcgagaccagcctggccaacactggtctctgtgaaactccgtctctactaaaaatacaaaaattagctggacgtgttggcgggcatctgtaataccagctacttgggaggctgaggcagaagaatcacttgaacccgggaggcagaggttacagtgagctgagatcgcaccagtacactccagcctgggtaacagagctagactccatctcaaaaaaaaaaaaaaaaaaaatccatttaaccaaattgtcttacataatactgtaacaaaacaaattttgtgttagaaaagtatacttaattctttgactttttataactgcatacataagaattcaatatttttcaaatatttatagcttatttagaaatatttctataatataagcaatttcttaaaaaccatcagatgatacttacagtataagtattcacatccagactttttagtagaaaaccctaagggctttgatatcttttttgattgtaacattttaaaaattatgaaataaaagtactgaaaaccagacacaaaatttatagctgaatgccttattataaggaaatactcttttaggactcagccagtcaccccacgtgtcctttttgtgtcctgtcacaattacaaccccacaaaagtaactgctagactgatttaaatggtaatcactttgttgcatttgattactgctgccacacctaaatgcatatatctatattttaatattatcaatttaaagttgttattaaatgtatattttattttacatctcttttttaatctagaagttcctccttctttccagttccttaaaatttacctggtgaagaacctgatcctaggacctatagagtttcccatactttgtattttgctgattgcacactcatggcacggttcagcacattgccctgtcctctcgatattagcacacagtgcaggttcaggcacattgaatttgagaagacttaggttcagtcctttggcaagactgtaaatcacggtgtctttctttccttcctccttcttctctctctctctctctctctctttccttttctttctctttttttcagagttgcactctgttgcccaggctggagtacagtggcacgatctcgactcactgcaacctccatctcccgggttcaagcagttctcctgtttcagcctcccaagtagctgggactacaggtgcacgccaccatgcccggctaatttttgtatttttagtagaggggtttcaccataatggtcaggctggtcttgaactcctgaactcaagtgatccaccagccttggcctcccaaaatgctgggattacaggcatgagccaccatgcccagctaatttttgtatttttagtagagacagggtttcaccataatagccaggctggtctcaaactccttaccttgtgatccgcccacctcagccttccaaagtgctgggattataggcgtgagccactgtgcccggcctacagggtttttatctaacctttctgttacaactgtacctctccttctgtactgaaagtcctggttttcaagaacacagggcacgatagaattagaacatcccacaattactcatttcttttatttatcttacacttacagctgtctcagaataacaatagaaatacaaccacaaataatatggcaattgaaacaattaaaaagttttcatttgcttttctcattctttcccaatttttttttttttttgagatggagtctcgcgctcttgttgcccaggctggagtgcaatggcacgatctcggctcactgcaacctctgcctcctggattcaagcaattctcctgcctcagcttcccgagtagctgggattataggcatgcgccaccacgccctgctaattttgtatttttagtagagtcaggatttctccacattggtcaggctggcctcaaactctcgacctcaggtgatccgcctgcctcggcctcccaaagtgctgggattacaggtgtgagccactgcgcccgacatcccaatttttaaaatagttatactatgtcaacattttcagaacatactggtatagcatactgtactttcttccttttatcccccatttattcttagttcttcaactatatatttaacacttgcccccagttttgttttgttttgttttgaggaggaatcttgctctgttgcccaggctggagtgcagtggtgtgatcttggctcactgcaacctccgcctcccgggttcaagtgattctcctgcctcagcctctcgagtagctgggattacaagtgggcaccaccacacccggctaattgttgtatttttagtagagatgggttttgccatgttggccaggctggttttgaactcctgacctcaagtgatccacctgtgttggcctcctaaagtactgggattacaggtgtgtgccaccgcgccaggcaattgcccccagtttttatttgatggctctgactgtttctcatatctgactctttaattatgaatccagggcatagattagtatctccatcttgtaaggatgcaaagaagccatgaaaataagtaatatcaactcctgaggataaaacgttacttgactagagttagctttttaattgtaatcatttataaacttctttgttccttacatataagcatagtcataaccatggtacccaaaattttctataagttattgtaactccttaaaggtcttgctacagttcttttatccagtacaaataattgggaaaatgtaaagctgaatgaaatctagtgagcctcatatcctcccttttagatattgattttaagtttgcttttcacagctgctaaaaagtaacaactgatttttagttccacaacctctctttcttcaatttagatggatcatacaataaagcaaaatctggctggttacagtggctcacacctataatcccagcactttgggaggctgaggtggagggtctcatgagcccaggagttcaagaccaacctgggcaatatagtgagactctttctatttaaacaaaaacaaaaacaaacaaacaaacaaacaaaaagctgggcatgatgcacacctttagtttcagctactaaggaggctgaggttggaggatcacttgagcctaggaggtcaacactgcagtgagctatgatcatgctactgccctccagcctgggcaacagagcaagaccctgtctccaaaaacataaataattaaatataaataaaaataaagcaaaatctgttgggaaacgagaaaaaggagaggaatttttcaggaataatcataaaaagaaatgatcatcagactgaaagtccagagcctgagaaatgaaaacatatttttaagcattggtgttgaccatgcagacaaacttttgttaattcagagcgatacaaaaggcactttgaatctataaaacttgaaaaagttaaaaattgtatgtcggataaagctttaagtcatctgtcactattaacctcagtgcagcaattctgactcctgtgcctggattccttttatgataattttgccacctacaggacagattaggtgctggtcgcctgaattattttgtgttctgaattattttgagctctaaaatggtaaagtacaaatactcattgttttactgtgcctttggccttttataaaaaggtatttataattcgttgataaaaaccaatatttgaagctgttgattaccaacaaaaaagtttcactctctttatagtgcttcaggatacaactttttcagggccttattagagaaaaactgattcacatgttattcttctaaagctaaattattaaaatgtaggttgaaagattggattgattgtgaatctacactaaagatatggttccaggcagacctccttagagacctccaggcagacctccttactgtcttcagtgatgtttaatttcattactgttactgggtgccaagtgtctttcatttggaagtgaacttactccagttattgaatgtttatcatatcataatttgcatttttccaacattgaaggtattttaaaaagtcactaagagattcattcttttattattcaactacaaaaaaatagtgtaatgatcagaatttaaaatgtgtgattctttttcttctgtaagtatgtattgctatgataaataaaaaatggcaggaccattgtttttattaaaatatctactgtgtctattcttaaa

SEQ ID NO: 195275 - DNA, 699 bp, Artificial Sequence
  derived and/or modified sequence
atgggctccgtcctctctaccgactcaggcaaatcggccccagcgtccgctacagctcgagccctggagagacgccgtgacccggaattgcctgtcacatcattcgactgtgctgtgtgtcttgaggttctgcaccagcctgtgcgcacccgatgcggtcatgtattctgcagatcctgcattgcaacatctctgaagaataacaaatggacatgcccttactgtagggcttacctgccaagcgagggggtcccagccaccgatgtggcgaagaggatgaagtcagagtataagaattgtgctgagtgtgacacgctagtgtgtctatctgagatgcgagcccacataaggacatgccagaagtacatcgataagtatggaccacttcaggagctggaagaaaccgcagcacgatgcgtgtgtcccttctgccagcgggagctgtacgaagatagcctgctggaccactgtatcacccatcaccggagcgagcgaagaccggttttctgtcctctctgtcgcctgataccggatgaaaacccaagtagtttctcaggcagcctgatcaggcatcttcaggtctctcatacattattttacgatgactttatcgatttcaatatcatcgaagaagccttgatacgccgcgtgttagatcgctcattactggaatacgtgaaccacagtaacaccacgtag

SEQ ID NO: 195276 - DNA, 699 bp, Artificial Sequence
  derived and/or modified sequence
atgggctctgtgctgagcacagattctgggaagagcgccccagccagcgccacagcccgggccctggagaggagaagagatcctgagctgcctgtgaccagctttgactgtgctgtgtgcctggaggtgctgcaccagcctgtgaggacccgctgtggccacgtgttctgccgcagctgcatcgccaccagcctgaagaacaacaagtggacctgcccctactgccgggcctacctgcccagcgagggcgtgcctgccacagatgtggccaagaggatgaagtctgagtacaagaactgtgccgagtgtgacaccctggtgtgcctgtctgagatgagggcccacatccgcacctgccagaagtacatcgacaagtatggccccctgcaggagctggaggagacagctgcccgctgtgtgtgccccttctgccagcgggagctgtatgaggacagcctgctggaccactgcatcacccaccacagaagtgaaagaagacctgtgttctgccccctgtgccgcctcatcccagatgagaaccccagcagcttcagcggcagcctcatccgccacctgcaggtgagccacaccctcttctatgatgacttcatcgacttcaacatcatcgaggaggccctgatcagaagagtgctggacaggagcctgctggagtatgtgaaccacagcaacaccacctag

SEQ ID NO: 195277 - DNA, 699 bp, Artificial Sequence
  derived and/or modified sequence
atgggcagcgtgctgagcaccgacagcggcaagagcgcccccgccagcgccacagccagggctctggagagacgccgcgaccccgaactgccggtgaccagctttgattgtgccgtctgtttggaagtgctccaccagccggtgagaactcgctgcggacacgttttctgcaggagctgcatagccaccagcttaaagaacaataaatggacctgcccttattgtagggcctacctgccatctgagggtgtgcctgccaccgatgtggcaaaacgcatgaagagtgagtacaagaattgtgctgagtgtgacacactggtttgtctgtccgaaatgcgggctcatataaggacgtgtcagaagtacattgacaagtacggccccctgcaagaactggaagagacagccgccagatgcgtctgtccattctgccagcgtgagctatatgaagattcgctgctggatcactgtattacgcaccacagatccgaacggcggcctgtgttttgcccactgtgtcgtctcattccggacgaaaaccccagctcattctcggggtccttgataaggcacctgcaggtgtcgcacacccttttctatgacgacttcattgattttaatatcatcgaagaagccctcattcggcgcgtactggatagatccttgctggagtacgttaatcattccaacacaacctag

SEQ ID NO: 195278 - DNA, 699 bp, Artificial Sequence
  derived and/or modified sequence
atgggatcagtcttgtcaactgactccggaaaaagtgccccagcatctgccaccgcacgcgctctcgaaaggcgcagggatcctgagctcccggtgacatccttcgattgtgcagtgtgtctcgaggtactgcaccagcctgtgagaactagatgtgggcacgtgttttgtcgtagctgcatagccacaagcttgaaaaataataagtggacttgtccctattgtcgggcttacttgccttctgaaggggtgcctgctactgacgttgccaagcggatgaagagcgagtacaagaattgcgccgagtgtgatactttggtatgtctgtctgagatgcgggcacatatccgtacgtgccaaaaatacattgacaaatacggccctttgcaggagctggaggagaccgccgctcggtgtgtgtgcccattctgccagcgagagctgtatgaggactcattactagaccattgtattacccaccataggagcgagcgaaggcctgtattttgccccctctgccggctgatccccgatgaaaacccctcttctttctcggggtctctaatccgccatctgcaggtcagccacactcttttctatgatgatttcatcgattttaacatcatcgaggaggccctaataaggcgagtgctagatcgatccctcctagaatatgtgaatcatagtaacacaacatag

SEQ ID NO: 195279 - DNA, 699 bp, Artificial Sequence
  derived and/or modified sequence
atgggcagcgtgctgagcaccgacagcggcaagagcgcccccgccagcgccaccgccagagccctggagagaagaagagaccccgagctgcccgtgaccagcttcgactgcgccgtgtgcctggaggtgctgcaccagcccgtgagaaccagatgcggccacgtgttctgcagaagctgcatcgccaccagcctgaagaacaacaagtggacctgcccctactgcagagcctacctgcccagcgagggcgtgcccgccaccgacgtggccaagagaatgaagagcgagtacaagaactgcgccgagtgcgacaccctggtgtgcctgagcgagatgagagcccacatcagaacctgccagaagtacatcgacaagtacggccccctgcaggagctggaggagaccgccgccagatgcgtgtgccccttctgccagagagagctgtacgaggacagcctgctggaccactgcatcacccaccacagaagcgagagaagacccgtgttctgccccctgtgcagactgatccccgacgagaaccccagcagcttcagcggcagcctgatcagacacctgcaggtgagccacaccctgttctacgacgacttcatcgacttcaacatcatcgaggaggccctgatcagaagagtgctggacagaagcctgctggagtacgtgaaccacagcaacaccacctag

SEQ ID NO: 195280 - protein, 388 aa, Artificial Sequence
  derived and/or modified sequence
MNTMYVMMAQILRSHLIKATVIPNRVKMLPYFGIIRNRMMSTHKSKKKIREYYRLLNVEEGCSADEVRESFHKLAKQYHPDSGSNTADSATFIRIEKAYRKVLSHVIEQTNASQSKGEEEEDVEKFKYKTPQHRHYLSFEGIGFGTPTQREKHYRQFRADRAAEQVMEYQKQKLQSQYFPDSVIVKNIRQSKQQKITQAIERLVEDLIQESMAKGDFDNLSGKGKPLKKFSDCSYIDPMTHNLNRILIDNGYQPEWILKQKEISDTIEQLREAILVSRKKLGNPMTPTEKKQWNHVCEQFQENIRKLNKRINDFNLIVPILTRQKVHFDAQKEIVRAQKIYETLIKTKEVTDRNPNNLDQGEGEKTPEIKKGFLNWMNLWKFIKIRSF

SEQ ID NO: 195281 - DNA, 1167 bp, Artificial Sequence
  derived and/or modified sequence
atgaacaccatgtacgtgatgatggcccagatcctgagaagccacctgatcaaggccaccgtgatccccaacagagtgaagatgctgccctacttcggcatcatcagaaacagaatgatgagcacccacaagagcaagaagaagatcagagagtactacagactgctgaacgtggaggagggctgcagcgccgacgaggtgagagagagcttccacaagctggccaagcagtaccaccccgacagcggcagcaacaccgccgacagcgccaccttcatcagaatcgagaaggcctacagaaaggtgctgagccacgtgatcgagcagaccaacgccagccagagcaagggcgaggaggaggaggacgtggagaagttcaagtacaagaccccccagcacagacactacctgagcttcgagggcatcggcttcggcacccccacccagagagagaagcactacagacagttcagagccgacagagccgccgagcaggtgatggagtaccagaagcagaagctgcagagccagtacttccccgacagcgtgatcgtgaagaacatcagacagagcaagcagcagaagatcacccaggccatcgagagactggtggaggacctgatccaggagagcatggccaagggcgacttcgacaacctgagcggcaagggcaagcccctgaagaagttcagcgactgcagctacatcgaccccatgacccacaacctgaacagaatcctgatcgacaacggctaccagcccgagtggatcctgaagcagaaggagatcagcgacaccatcgagcagctgagagaggccatcctggtgagcagaaagaagctgggcaaccccatgacccccaccgagaagaagcagtggaaccacgtgtgcgagcagttccaggagaacatcagaaagctgaacaagagaatcaacgacttcaacctgatcgtgcccatcctgaccagacagaaggtgcacttcgacgcccagaaggagatcgtgagagcccagaagatctacgagaccctgatcaagaccaaggaggtgaccgacagaaaccccaacaacctggaccagggcgagggcgagaagacccccgagatcaagaagggcttcctgaactggatgaacctgtggaagttcatcaagatcagaagcttctag

SEQ ID NO: 195282 - DNA, 1167 bp, Artificial Sequence
  derived and/or modified sequence
atgaatacgatgtatgtgatgatggcacaaatcctgcggtcgcatcttatcaaagcaactgttatccctaaccgggtgaaaatgctgccctactttggcattatacgaaacagaatgatgtctacccataagtcaaaaaaaaagataagggagtactacaggctgctgaatgttgaggaagggtgctcggccgatgaggtgagagagagttttcacaaactggccaaacagtatcacccagacagtggcagcaatactgcagatagcgctacatttatccgcatagaaaaggcttaccgtaaggtcctgtctcatgtgattgagcaaacaaatgccagtcagagtaagggcgaagaggaagaagacgtggagaaattcaagtacaaaacccctcagcaccggcattacctctctttcgagggaattgggtttgggacccccacacagcgcgagaaacactaccgccagtttagagccgaccgagctgccgaacaggtcatggaataccagaaacagaagctgcagtctcaatactttcccgacagcgtgatcgtgaagaacatccgacagtccaagcagcaaaagatcacacaggccattgagcgcttagtggaggacctaatacaagagtctatggccaaaggggattttgacaacctgtctggcaagggaaagcccttgaaaaagttctccgattgctcttatattgacccaatgacccataacctgaaccgtattttgatcgataatggctatcagccagaatggattctgaagcagaaagagatctccgatacaatagaacaactgcgcgaggccattttagtgtcccgcaagaagctgggcaaccctatgacccctactgagaaaaaacagtggaaccacgtatgtgagcagtttcaggagaatatcagaaagttgaataagaggataaacgatttcaatcttatcgtccccattctgacccggcaaaaggtgcacttcgacgcacagaaagagattgtgcgggcacaaaaaatttatgaaacccttatcaagactaaagaggtaaccgatcggaatcctaacaacctggaccagggagaaggcgaaaagactcctgagattaagaaaggctttctgaattggatgaatctgtggaagttcattaaaatcagaagtttttag

SEQ ID NO: 195283 - DNA, 1167 bp, Artificial Sequence
  derived and/or modified sequence
atgaataccatgtacgtcatgatggcccagatcctccggagccatctgattaaagccacggtgatcccaaaccgagttaagatgctcccttacttcgggataatccgaaaccgtatgatgagtacccataagtccaagaagaagattcgggaatactatcgactgcttaatgttgaggagggctgttcagcggacgaggtacgggagagctttcacaaactcgctaagcaataccatcctgatagcggctcaaacaccgcagacagcgctacattcatccgaatagagaaggcctaccggaaggtcctgtctcacgttattgaacagacaaacgcttcccagagcaagggtgaagaagaggaagatgtggaaaagttcaaatataaaacgccccaacatcggcactacctgagctttgagggaattggattcggtacgccaacacagcgcgagaagcattacaggcaattccgggctgaccgggccgccgagcaggttatggagtatcagaaacagaagcttcaatctcagtacttcccagactctgtgattgttaagaacattagacagagcaagcagcaaaagataacccaggccatcgagcgcctcgtggaggacctgatccaggagtccatggccaaaggggattttgacaatctgtctggcaaggggaaaccacttaagaagttctctgattgttcgtatatcgacccaatgacacataaccttaacagaattctcatcgacaatggataccagcccgagtggatcctgaagcaaaaggaaattagtgatacaatcgagcagcttagggaggctatcttggtttccaggaagaagctcgggaaccccatgactcctactgagaagaaacagtggaaccatgtgtgtgagcagttccaagagaacatcaggaaactgaataaacgcattaatgattttaacctgatcgtgccaattcttactagacagaaagtgcatttcgatgctcagaaagaaattgtcagagcacagaaaatctacgaaactttaatcaagactaaggaagtcaccgatcgcaatccaaataacctcgatcagggcgagggggagaagacccctgaaattaagaaagggttcctgaactggatgaatctgtggaagttcattaaaattagaagtttttag

SEQ ID NO: 195284 - DNA, 1167 bp, Artificial Sequence
  derived and/or modified sequence
atgaacaccatgtatgtgatgatggcccagattcttaggtcccacctcatcaaggctacggtcataccaaacagagtaaaaatgctgccctactttggcattatcagaaacaggatgatgtcaacacacaagtcaaagaaaaagatccgagaatattaccgcctcctgaacgtggaagagggatgcagcgctgacgaggtaagggaaagcttccataaattagccaaacagtaccatcctgactcaggcagtaacaccgcggactcggcaacgttcatccggatagaaaaggcctaccgaaaggtgctgagtcatgtgatagaacagaccaacgctagccagtctaagggcgaagaggaggaagacgtagagaaattcaagtacaagaccccccaacacaggcactacctgtcctttgaagggatcggcttcggaacaccaacacagagggaaaagcactatcgtcaatttcgggccgaccgcgccgcggaacaggttatggaataccagaaacaaaaattgcagtcccagtactttccggacagcgtcatcgtgaagaatatacgccagtcaaaacagcagaagatcacccaggccatcgaaagactcgtcgaggatctaattcaggagtcgatggctaaaggagacttcgacaacttaagcggaaaggggaaaccactgaagaagttcagtgattgtagctacatcgacccaatgactcataaccttaatcgaattctgatagacaacggctaccagccagagtggatcctcaaacagaaggagatatcagacaccatcgaacagcttcgggaggccattctcgtgtctagaaaaaagttgggaaatccaatgactccgactgagaagaagcaatggaatcacgtgtgcgagcagtttcaggagaatattcgaaagcttaacaaacgcatcaacgattttaaccttatcgtgcccatcctgactcggcagaaggtgcacttcgatgcgcagaaagagatagtccgtgcacaaaaaatttacgagacgctaataaagacgaaggaggtgacagatcgcaatccaaataaccttgatcagggcgaaggggagaagactccggaaattaagaagggcttcctcaactggatgaatctgtggaagtttatcaaaatacggagtttctag

SEQ ID NO: 195285 - DNA, 1167 bp, Artificial Sequence
  derived and/or modified sequence
atgaacactatgtacgtgatgatggcccaaattttacggtcccatctcattaaagccactgtgattcctaacagggtcaagatgctgccttactttggtattattaggaacagaatgatgtcaacccacaaatctaaaaaaaagatacgggaatattacagactgctgaatgtggaagagggatgttccgccgatgaagtgagagaatcgttccacaagctggctaaacagtatcaccctgactctggatctaatacggcagactcagcaacattcatacggattgaaaaagcctatagaaaggttctgtcgcatgttatcgaacagaccaatgccagccagagcaaaggtgaggaggaagaggacgttgagaagttcaaatacaagacaccacagcatagacactacttatcttttgaggggattggattcggaacaccaactcagagggagaaacattatcgccagtttcgcgctgatcgcgcagcagagcaggtgatggaatatcagaaacagaaactccagagccaatactttcccgacagcgtaatcgttaaaaatatccgccagtcaaagcaacaaaagatcacgcaagccattgagagattagtcgaagatcttattcaggaaagcatggctaaaggagatttcgataacctgagcggcaaaggtaaacctctgaagaagtttagcgactgctcatacatcgacccgatgacccacaaccttaacaggatcttgatagataacggctaccagccagagtggatcctgaagcagaaagagatatctgatacgattgagcagctacgcgaggctatcttggtttcacggaaaaaattaggtaacccaatgacacccaccgagaaaaaacaatggaatcacgtatgcgagcaatttcaagagaatattcgcaagctcaacaagcgcatcaacgactttaacctcattgtgccgatccttacccgccagaaggtgcacttcgacgcccagaaagaaattgtgagggctcaaaaaatttacgagacactcattaagacgaaggaagtgaccgatagaaatccaaataacctcgaccaaggtgagggggaaaagaccccagagatcaagaaggggttcttgaactggatgaacttgtggaagttcattaagatcagatctttttag

SEQ ID NO: 195286 - DNA, 1167 bp, Artificial Sequence
  derived and/or modified sequence
atgaacactatgtacgtcatgatggcccagatacttaggtcccacctgatcaaagcaactgtgatacccaaccgtgtgaaaatgctgccctattttggaatcatcaggaaccgaatgatgtcaacacacaaatccaagaaaaaaatccgtgagtattatcgactccttaatgtggaggaaggatgctcagccgatgaggttagagaaagcttccacaaactagccaagcagtatcatcctgatagcggcagcaacaccgcagattccgcaaccttcattcgcatagagaaggcctaccgcaaagtattatcccacgtgatagagcaaactaacgccagccagtctaaaggcgaggaggaggaagatgtggagaagttcaagtacaaaactccgcagcataggcactatctgtccttcgaaggaataggatttgggacccctacccagagggagaaacattaccggcagttcagagcagatcgcgcggcggagcaggtgatggaataccaaaagcagaagttacagtcccagtatttccccgactcagtgattgtgaaaaacattcggcagtctaagcagcagaaaatcactcaggctatcgagcgcttggtcgaggatttgatccaggagagcatggccaaaggagacttcgacaacctgtccggcaagggtaaacccttgaaaaagtttagcgattgctcatatatcgacccaatgactcataacctaaaccggatcctcatagacaatggataccagcccgagtggatactcaagcagaaagagatatctgataccatcgagcagcttagagaagctattctcgtgtcaagaaagaagctgggtaaccccatgaccccaaccgagaagaaacaatggaatcatgtgtgtgagcagttccaagaaaacattcgtaaattaaataagcggatcaacgacttcaacttgattgtgccgattcttacccggcaaaaggtacattttgacgcccagaaggagatcgttcgagcccagaagatctatgaaacgctgattaaaaccaaggaggtgactgataggaatccaaacaacttggaccagggcgaaggtgaaaaaactccagagataaagaaaggattcctgaattggatgaacttatggaagtttataaaaattaggtccttctag

SEQ ID NO: 195287 - DNA, 1625 bp, Artificial Sequence
  derived and/or modified sequence
gcagaggcgcggcaggggggcgggagccgcggaacccctaccccaggtctgcgcaggtgaggagggggcggggcaggaccgacctcccttgccatgataaccaccttcgcagccggctcccagaccgttggcaccgattgcctagaaaatagggggtctcaggagctccgttttagcgtttatatatcccaattccaattaagccacttccagtattttttggccattgtcagtgtacaagtcttcctcctcttcgagaccatgttattgcaatagcagcaaacgtgttgggaggcctcacaattcatcatggtttttctggcctctggcagatagctccttcctagcgagctgtggagcttaaagtcttttggacacttgattctattcaatccagtatcagaccaggtcattgctaggaagaactctgggtacaataatgaatacaatgtatgtgatgatggctcagatcttaagatctcacctgataaaggctacagtgattcctaatcgagtgaaaatgcttccatattttggtatcattagaaatagaatgatgtcaacccataaatccaaaaagaagatcagagaatattatagactgctgaacgtggaggaaggatgctctgcagatgaagtcagggaatcttttcataagcttgccaagcaatatcatcctgacagtggctctaatactgctgattctgcaacatttataaggattgaaaaagcttatagaaaggtgctctcccatgtgatagaacaaacaaatgccagtcagagtaaaggtgaagaagaagaagatgtagaaaaattcaaatataaaacaccccaacaccgacattatttaagttttgaaggtattggttttgggactccaactcaacgagagaagcattataggcaatttagggcagaccgtgctgctgaacaagtgatggaatatcaaaagcagaaactacaaagccagtattttcctgatagtgtaattgttaaaaatataagacagagcaaacagcaaaagataacgcaagctatagaacgtttagtggaggacctcattcaagaatccatggcaaaaggagactttgacaatctcagtgggaaaggaaaacctctgaaaaagttttctgactgttcttacattgatcccatgactcacaacctgaaccgaatactgatcgataatggataccaaccagaatggatccttaagcaaaaggaaataagcgatactattgagcaactcagagaggcaattttagtgtctaggaaaaaacttgggaatccaatgacaccaactgaaaagaaacagtggaaccatgtttgtgagcagtttcaagaaaacatcagaaaattaaacaagcgaattaatgattttaatttaattgttcccatcctgaccaggcaaaaagtccattttgatgctcagaaagaaattgtcagagcccagaaaatatacgagacccttataaaaacaaaagaagtcacagatagaaacccaaataaccttgatcaaggagaaggagagaaaacacctgaaatcaagaaaggttttttaaactggatgaatctgtggaaatttattaaaatacgatcattttgatgtttactatcataaatca

SEQ ID NO: 195288 - DNA, 1354 bp, Artificial Sequence
  derived and/or modified sequence
agctggtggtccccggtcgggacgaaggctcccgaggtgccctgcctgggtcctccggggtaaagttcgtttggcggaagattgtccgttttcctggtaaggtcacctgtcccaatcaggtcattgctaggaagaactctgggtacaataatgaatacaatgtatgtgatgatggctcagatcttaagatctcacctgataaaggctacagtgattcctaatcgagtgaaaatgcttccatattttggtatcattagaaatagaatgatgtcaacccataaatccaaaaagaagatcagagaatattatagactgctgaacgtggaggaaggatgctctgcagatgaagtcagggaatcttttcataagcttgccaagcaatatcatcctgacagtggctctaatactgctgattctgcaacatttataaggattgaaaaagcttatagaaaggtgctctcccatgtgatagaacaaacaaatgccagtcagagtaaaggtgaagaagaagaagatgtagaaaaattcaaatataaaacaccccaacaccgacattatttaagttttgaaggtattggttttgggactccaactcaacgagagaagcattataggcaatttagggcagaccgtgctgctgaacaagtgatggaatatcaaaagcagaaactacaaagccagtattttcctgatagtgtaattgttaaaaatataagacagagcaaacagcaaaagataacgcaagctatagaacgtttagtggaggacctcattcaagaatccatggcaaaaggagactttgacaatctcagtgggaaaggaaaacctctgaaaaagttttctgactgttcttacattgatcccatgactcacaacctgaaccgaatactgatcgataatggataccaaccagaatggatccttaagcaaaaggaaataagcgatactattgagcaactcagagaggcaattttagtgtctaggaaaaaacttgggaatccaatgacaccaactgaaaagaaacagtggaaccatgtttgtgagcagtttcaagaaaacatcagaaaattaaacaagcgaattaatgattttaatttaattgttcccatcctgaccaggcaaaaagtccattttgatgctcagaaagaaattgtcagagcccagaaaatatacgagacccttataaaaacaaaagaagtcacagatagaaacccaaataaccttgatcaaggagaaggagagaaaacacctgaaatcaagaaaggttttttaaactggatgaatctgtggaaatttattaaaatacgatcattttgatgtttactatcataaatcattcttagttccactgaca

SEQ ID NO: 195289 - DNA, 1480 bp, Artificial Sequence
  derived and/or modified sequence
tcccgaggtgccctgcctgggtcctccggggtaaagttcgtttggcggaagattgtccgttttcctggtaaggtcacctgtcccaatcaggtacgattctgccttccgtacccccgagcccctcagtgtaaagtggcaaatggtctagcccggcggaggcaccagctggaggcggtgggagggacacccgcagtgaagggcggaccgcgcacgcatgcgcagaggcgcggcaggggggcgggagccgcggaacccctaccccaggtctgcgcaggtcattgctaggaagaactctgggtacaataatgaatacaatgtatgtgatgatggctcagatcttaagatctcacctgataaaggctacagtgattcctaatcgagtgaaaatgcttccatattttggtatcattagaaatagaatgatgtcaacccataaatccaaaaagaagatcagagaatattatagactgctgaacgtggaggaaggatgctctgcagatgaagtcagggaatcttttcataagcttgccaagcaatatcatcctgacagtggctctaatactgctgattctgcaacatttataaggattgaaaaagcttatagaaaggtgctctcccatgtgatagaacaaacaaatgccagtcagagtaaaggtgaagaagaagaagatgtagaaaaattcaaatataaaacaccccaacaccgacattatttaagttttgaaggtattggttttgggactccaactcaacgagagaagcattataggcaatttagggcagaccgtgctgctgaacaagtgatggaatatcaaaagcagaaactacaaagccagtattttcctgatagtgtaattgttaaaaatataagacagagcaaacagcaaaagataacgcaagctatagaacgtttagtggaggacctcattcaagaatccatggcaaaaggagactttgacaatctcagtgggaaaggaaaacctctgaaaaagttttctgactgttcttacattgatcccatgactcacaacctgaaccgaatactgatcgataatggataccaaccagaatggatccttaagcaaaaggaaataagcgatactattgagcaactcagagaggcaattttagtgtctaggaaaaaacttgggaatccaatgacaccaactgaaaagaaacagtggaaccatgtttgtgagcagtttcaagaaaacatcagaaaattaaacaagcgaattaatgattttaatttaattgttcccatcctgaccaggcaaaaagtccattttgatgctcagaaagaaattgtcagagcccagaaaatatacgagacccttataaaaacaaaagaagtcacagatagaaacccaaataaccttgatcaaggagaaggagagaaaacacctgaaatcaagaaaggttttttaaactggatgaatctgtggaaatttattaaaatacgatcattttgatgtttact

SEQ ID NO: 195290 - DNA, 1167 bp, Artificial Sequence
  derived and/or modified sequence
atgaacaccatgtatgtgatgatggcccagatcctgcggagccacctgatcaaggccaccgtcatccccaacagagtgaagatgctgccctacttcggcatcatccggaacaggatgatgagcacccacaagagcaagaagaagatccgggagtactaccgcctgctgaatgtggaggagggctgcagcgcagatgaggtgcgggagagcttccacaagctggccaagcagtaccacccagacagcggcagcaacacagctgacagcgccaccttcatcagaattgagaaggcctacaggaaggtgctgagccacgtgattgagcagaccaatgccagccagagcaagggggaggaggaggaggatgtggagaagttcaagtacaagaccccccagcaccgccactacctgagctttgagggcatcggcttcggcacccccacccagcgggagaagcactaccggcagttccgggctgacagagctgctgagcaggtgatggagtaccagaagcagaagctgcagagccagtacttcccagacagcgtcatcgtgaagaacatccggcagagcaagcagcagaagatcacccaggccatcgagcggctggtggaggacctgatccaggagagcatggccaagggggactttgacaacctgagcggcaagggcaagcccctgaagaagttcagtgactgcagctacatcgaccccatgacccacaacctgaaccgcatcctgattgacaatggctaccagcctgagtggatcctgaagcagaaggagatcagtgacaccatcgagcagctgcgggaggccatcctggtgtccaggaagaagctgggcaaccccatgacccccacagagaagaagcagtggaaccacgtgtgtgagcagttccaggagaacatcaggaagctgaacaagaggatcaatgacttcaacctgattgtgcccatcctgacccggcagaaggtgcactttgatgcccagaaggagatcgtgcgggcccagaagatctatgagaccctcatcaagaccaaggaggtgacagacaggaaccccaacaacctggaccagggcgagggggagaagaccccagagatcaagaagggcttcctgaactggatgaacctgtggaagttcatcaagatccgctccttctag

SEQ ID NO: 195291 - DNA, 1167 bp, Artificial Sequence
  derived and/or modified sequence
atgaacaccatgtacgtgatgatggcccagatcctgcggagccacctgatcaaggccaccgttattcccaatcgggtaaagatgctcccctatttcggaatcataaggaaccggatgatgagcactcacaagtccaaaaagaagattcgggagtattacaggcttcttaatgttgaggagggatgttccgcagatgaagttcgcgagagctttcataaactagcgaaacagtatcatcctgatagtggttcaaacacagccgacagcgctacttttattagaatcgaaaaggcgtaccggaaagtactgagtcatgtgatcgagcaaacaaatgcctcacagtctaagggtgaagaagaagaagacgtggaaaaatttaagtataagactccacaacatagacactatttatctttcgaaggcatcgggtttggcactcctactcagagagaaaagcattatcgacagtttagagcagaccgagcagccgaacaggtcatggaataccaaaagcagaagctccagtcccagtactttcctgattcagtgattgtgaagaatatccggcaatcaaaacagcagaaaatcactcaggctattgaaaggctggtggaggatttgattcaggaatctatggcaaaaggcgactttgacaatctgtctggtaaggggaaaccactcaaaaaatttagcgactgctcttacatcgaccccatgactcacaatcttaatcggatcctcatcgataatggatatcagccggaatggatacttaagcagaaagaaatttctgacaccatcgagcagctcagagaagcaattcttgtctctcgtaagaagctggggaatccaatgacccctactgagaagaagcagtggaaccacgtgtgcgagcagttccaggagaatattagaaaactgaacaagcggattaatgattttaatctgatcgttcccatactgacgcggcagaaagtacactttgatgcccagaaggagatcgtgagagcccagaagatatacgagaccctgattaagacaaaggaggtgaccgataggaatcctaacaacctagaccaaggggagggggagaagacgcccgagattaagaaggggtttctgaattggatgaacttgtggaaatttattaaaataagaagcttttag

SEQ ID NO: 195292 - DNA, 1167 bp, Artificial Sequence
  derived and/or modified sequence
atgaacaccatgtacgtgatgatggcccagatcctgcggagccacctgatcaaggctaccgtaataccgaaccgtgtcaagatgctgccttacttcgggatcatccgaaacagaatgatgtcaactcataagtcaaaaaagaagatccgcgagtattacagactgctgaatgtcgaggagggctgctccgccgatgaggtgcgtgagagctttcacaagcttgctaagcagtaccaccccgattccggtagtaataccgcggactctgccacattcattcgtatcgagaaggcttaccgcaaagttctttcccatgtcattgagcagaccaatgcatctcagtctaaaggcgaagaagaagaggacgtggagaagtttaaatataaaacccctcagcacagacactatctgtcgttcgagggaataggatttggcactcccacccagagggaaaagcactaccgacagtttcgcgcagatcgggccgccgagcaggtgatggaataccaaaagcagaagctgcaatcgcaatactttcccgacagcgtgattgtcaaaaacatccggcaaagcaaacaacagaagatcactcaggccatcgaacgcttggtcgaagacctgattcaggaatccatggctaagggagactttgacaatctcagcggtaagggcaagccattgaaaaaattctcagattgttcctatatcgaccctatgactcataaccttaacaggatcctgatagacaacggctaccaaccagagtggattctcaagcaaaaagaaatcagcgacacaatcgaacaactccgtgaagctattctcgtgagtcgcaagaagctgggtaatcccatgactccaaccgagaaaaagcagtggaaccacgtgtgcgaacaattccaggaaaacatccggaagctaaataaaaggattaatgacttcaatttaatagtgcctatcctgacaaggcagaaagtccactttgacgcgcagaaggagattgtacgggcccagaaaatctacgagaccctcatcaaaacaaaggaagtgactgaccggaaccctaataatctggaccagggcgagggcgagaaaacccccgagattaagaagggatttttgaactggatgaacctgtggaagttcatcaagatcagatcattctag

SEQ ID NO: 195293 - DNA, 1167 bp, Artificial Sequence
  derived and/or modified sequence
atgaacaccatgtacgtgatgatggcccagatcctgcggagccacctcattaaagcgacagtgatccctaacagagttaaaatgttgccttactttgggataatccgcaatcgcatgatgtctacccacaagtccaaaaagaaaatccgagagtactacagattgttaaacgtggaggaggggtgttcagctgatgaggtgcgcgagagtttccataaactcgctaaacagtaccatcctgacagcggcagcaatactgcggattccgctacatttatccgcatagaaaaggcttaccgcaaagtgctgtcgcacgtcattgaacagacaaatgcctctcagagtaaaggggaagaagaggaagatgtagagaagttcaaatataagaccccccaacaccgacactatctgagcttcgagggaattgggtttggtacgccgactcagcgggagaagcactaccgacagtttcgtgccgaccgggcagctgagcaggtgatggaatatcagaagcaaaaacttcagagtcagtattttcctgacagcgtgatcgtcaagaatataagacagtccaaacaacagaagatcacccaggctatcgaacggctggtagaggacctgatacaagagagcatggccaagggggattttgataacctttcgggcaaaggcaaaccactgaaaaagttctctgactgttcctatattgacccgatgactcacaatttgaataggatactgattgataatggctaccagccagaatggatcctcaaacagaaggaaatttccgatacgattgagcagctacgggaggcgatactggttagtagaaagaagctaggcaaccccatgacaccaacagagaaaaagcagtggaaccatgtgtgcgagcagtttcaggagaatattcgcaagctgaataaaagaatcaacgacttcaacctgatcgtgccaatcctcacacgtcagaaagttcactttgacgcccaaaaggagatcgtccgggcccagaagatctacgagaccctgattaaaaccaaggaagtcacagatagaaacccaaacaacctggatcagggcgaaggcgaaaaaactcccgagataaagaaaggttttcttaattggatgaacctgtggaaatttataaagatacgctccttttag

SEQ ID NO: 195294 - DNA, 1167 bp, Artificial Sequence
  derived and/or modified sequence
atgaacaccatgtacgtgatgatggcccagatcctgcggagccacctaattaaagcaactgtcatccctaatagagtgaaaatgcttccttacttcggaatcatccggaatcgcatgatgtctactcataagtcaaagaaaaaaatccgagagtattaccgtctgctgaatgtggaggagggctgtagcgctgacgaggtgcgtgagtcattccacaaattggcaaaacagtaccaccccgactccggaagtaacacagccgattccgccacatttatccggatcgagaaggcgtatagaaaggtgctcagccacgtcatcgaacagactaatgcctcacaatccaaaggcgaagaagaggaggacgtggaaaaatttaagtataaaactccacagcatcgacattatctgtcttttgaaggcattggattcggcacacctacgcagcgtgagaagcattatcggcagttccgggctgatcgggccgcggagcaagtgatggagtaccagaagcaaaaactccagtctcaatatttccccgatagcgtcattgtaaagaacatacgtcaatctaaacagcagaagatcacccaagcaatcgaacgcctggtcgaagacctcattcaggagagtatggctaagggggattttgataacttgagtgggaaagggaaacctctgaaaaagttttcagactgtagctatatcgacccaatgactcacaatttgaacaggatcctgattgataacggctaccagccggaatggatcctgaagcagaaagagatttcagacacaatagaacagctgagagaggctatcctcgtctctaggaaaaaactggggaacccaatgacgcctaccgaaaaaaagcaatggaatcacgtatgtgagcagtttcaggaaaacatacggaagttgaataaaaggattaatgatttcaacctgattgtgcctatactcacccgccagaaggtccacttcgacgcccagaaggaaattgtcagagctcaaaagatctatgaaacactgataaagacgaaggaggtgacagacaggaacccaaacaacttggaccagggtgagggcgagaaaactccagagataaagaaaggcttcctgaattggatgaatctgtggaagttcatcaagatcagatctttctag

SEQ ID NO: 195295 - DNA, 1167 bp, Artificial Sequence
  derived and/or modified sequence
atgaacaccatgtacgtgatgatggcccagatcctgcggagccacctgataaaggccacagtaattcctaacagggtgaaaatgttaccatatttcggaattatccgaaacagaatgatgagtacccacaaaagcaaaaaaaagattcgggagtattacaggttattgaacgtggaggagggatgctctgcagacgaagtccgggaaagctttcataagttggcgaaacaataccatcccgattcaggctctaacaccgctgatagcgccacctttatccggattgagaaggcttatcgaaaggtgttgtcacatgtcatcgagcagaccaatgccagccaatccaaaggcgaagaagaggaagatgttgaaaagttcaagtataagaccccccagcataggcattatctgtcatttgaagggattgggttcgggaccccaacacagagggaaaaacactatagacaattccgcgcggaccgagcggccgaacaggtgatggaataccagaagcagaaactgcagtcccagtattttccggactccgtaattgttaaaaacatccggcagtctaaacagcaaaagatcacacaagccatagagagactggttgaagatctgattcaagaatccatggctaaaggcgactttgataacctctcaggcaaggggaagcctctcaagaagttttccgattgctcttacattgatcccatgacacacaaccttaacaggatcctcatcgacaatggatatcagccagagtggatcctgaaacaaaaggagattagcgacactatcgaacagcttcgggaggccatcctcgtttctcgtaaaaagctcggcaatcctatgacgcctacggagaagaagcagtggaaccatgtgtgcgaacagttccaggaaaatattagaaagttaaacaaaagaattaatgacttcaacctcattgtccccattctgacaagacagaaagtgcacttcgacgcccagaaagagatcgttcgggctcaaaaaatctacgagacattgattaaaaccaaggaggtaacagatcggaacccaaataaccttgatcaaggagaaggtgagaaaactcccgaaatcaaaaaggggttcctcaattggatgaacctgtggaagttcatcaagatccgatctttctag

SEQ ID NO: 195296 - DNA, 1167 bp, Artificial Sequence
  derived and/or modified sequence
atgaatactatgtatgtgatgatggcacagattttgcgaagtcacctcataaaagccaccgtcatcccaaatagagtcaagatgctcccatattttgggatcattcggaacagaatgatgtctacccataaaagtaagaaaaagatccgtgagtactaccgactgcttaatgtcgaagagggttgctcggccgatgaggtgagggaatcctttcacaagctggctaaacaatatcaccctgatagtggctccaacaccgccgactccgccacgtttatacggatcgagaaagcctacagaaaggtgctgtcccatgtcatagagcagacaaatgcctctcaaagtaagggagaggaagaagaagatgtggagaagttcaaatataaaactccccaacaccgccattaccttagtttcgaagggatcggattcggcacccctacccaacgcgagaagcattacaggcagtttagagccgatagagcggctgagcaggtcatggagtaccaaaagcagaaactgcagagtcagtacttccctgacagtgtgatcgtgaaaaacatcaggcagagcaaacagcagaaaatcacacaagctattgaacgcctggtagaagatctcattcaggaaagcatggctaagggcgatttcgataacctctctggcaagggcaagccactgaaaaaatttagtgattgcagctacatagatcctatgacgcacaatctcaatagaattctcattgacaacggttaccaacctgagtggattctcaaacagaaagaaatcagtgatactatcgagcaactcagagaggccatcctagtgagccgcaagaagctgggtaaccccatgactcctaccgagaagaaacagtggaatcatgtgtgcgaacagtttcaggaaaatatcagaaagctgaacaagcggatcaatgactttaacttgatcgtccccattctaacccgccagaaggtgcatttcgatgcccagaaggagatcgtcagagcccaaaaaatctacgagacgttaattaaaaccaaggaggtcacagacagaaacccaaacaatctggatcagggggagggagagaagacccctgagattaaaaaaggattcctgaattggatgaacttgtggaaatttatcaagattaggtctttttag

SEQ ID NO: 195297 - DNA, 1167 bp, Artificial Sequence
  derived and/or modified sequence
atgaataccatgtatgtgatgatggcacagatcctgcgatcacacctcattaaggccaccgtcatccctaacagggtgaagatgcttccttattttggaattattcgtaaccgaatgatgtctactcacaaatccaaaaagaagatccgagagtattatagactcctaaatgtggaggagggctgcagcgccgacgaagtccgggagtcctttcacaaacttgccaagcagtaccacccagattcagggtccaataccgctgattctgcgacctttattcggattgaaaaggcttataggaaggtgctgagtcatgtgatcgagcagactaatgcctcccagtccaagggtgaagaagaagaggacgttgagaagtttaagtataagaccccgcagcataggcattatctctcgttcgaggggataggttttggtactcctactcagagggagaagcactaccggcagtttcgcgctgaccgggcagccgaacaggtcatggaatatcaaaagcagaagctgcagtcgcagtatttccccgatagcgtaatagttaaaaacatacggcagtctaaacagcagaagattacccaggccatcgaaaggttggtggaagatttgatccaggagagcatggcaaagggcgacttcgataatctctcaggtaaaggcaagccgctgaaaaaattcagtgattgctcctacatagatcccatgacacacaacctcaaccgaatacttattgacaatgggtaccagcctgaatggatcctgaaacagaaggagatctctgataccatcgagcaactacgcgaggccatcctggtgtcccgcaagaagctcgggaatcctatgactcctaccgagaaaaagcagtggaatcacgtgtgcgagcagtttcaggaaaatatacggaagctcaataaacgcattaacgacttcaacctgatagtcccaattttaacacggcagaaagttcacttcgacgctcagaaagagatagtccgggctcagaagatctacgaaaccctgatcaaaaccaaagaggtcaccgaccggaaccccaataatttagaccagggtgagggcgagaagacccctgagatcaagaaggggtttcttaactggatgaacctctggaagtttattaaaattagaagtttttag

SEQ ID NO: 195298 - DNA, 1167 bp, Artificial Sequence
  derived and/or modified sequence
atgaacacaatgtacgtgatgatggcccagatcctacgctcacatttgatcaaggctacagtgatccccaatcgcgtaaaaatgttgccttacttcggcatcattagaaaccgaatgatgtctacacataagtctaaaaagaaaatccgcgaatactacaggctacttaacgtggaagaaggatgttctgcagacgaagtgagggaatccttccataagctcgccaagcagtatcaccctgatagcggctctaataccgccgactcagctacattcattaggatcgaaaaggcttataggaaggtgctctcccacgttatcgagcagaccaatgcgtctcagtcgaagggcgaggaagaagaagacgtagagaagttcaaatataaaacacctcagcataggcactacctatcattcgaaggtattggattcggtacccctacgcagagggagaaacattatagacagttccgcgctgatagagccgctgagcaggtgatggagtatcaaaagcaaaagctgcaaagccagtattttcccgactcagtgattgtgaagaacatccggcagtccaaacaacagaagatcactcaagccattgaaaggctcgtggaagacctcattcaggagtctatggcaaagggagattttgataatctgagtggcaagggaaagcccctgaagaagttttcagattgcagttatatagaccctatgactcataacctgaatagaatcttaatagataacgggtatcagcctgagtggatcctaaaacagaaggaaatctctgatactattgaacagctgcgggaggccatcctggtatcccgcaaaaaattggggaatcctatgaccccaacagagaagaaacagtggaatcacgtttgcgaacagtttcaagaaaatatccgcaagcttaataaacgaatcaatgacttcaatttgattgtcccaattttgacacggcagaaggtgcactttgatgcacagaaggagattgtccgcgctcaaaagatctatgagacattgatcaaaacaaaggaggtgactgaccggaatccgaataatttggaccagggcgaaggtgagaaaactcccgaaatcaagaaggggttcttaaactggatgaacctatggaaattcattaagatccgcagcttttag

SEQ ID NO: 195299 - DNA, 1167 bp, Artificial Sequence
  derived and/or modified sequence
atgaataccatgtacgtgatgatggcccagatcctaaggtcacatctgatcaaggctaccgtcatccctaaccgggtgaagatgcttccttactttggtattatccggaacaggatgatgtctacacacaagtcgaagaagaagatcagagagtactaccggctgctgaatgtagaggaagggtgttctgctgacgaggtgcgggagtcgttccacaaattagccaaacagtaccaccctgattcaggaagcaataccgcagattcagccacattcataagaatcgaaaaggcataccgaaaggttctcagccatgtgatcgagcagaccaacgcctcgcaaagtaaaggtgaagaagaagaagacgttgaaaagttcaaatataaaaccccgcaacacaggcactatttgagctttgagggaattgggttcggcactcccacacagcgcgaaaagcactaccgccagttccgagctgaccgagcggcagaacaggttatggagtaccaaaagcaaaagctgcaaagccagtactttccagattctgtgatcgtgaaaaatatccgccagagcaaacaacagaagatcacccaggctatagaacggctggttgaagacctgatacaggagtcaatggctaaaggcgattttgacaacctgtccggaaaaggaaagcctctgaagaagttctcagactgtagctacatagatccaatgactcataatttaaatagaatattgatcgacaacggctatcagccagagtggattctgaaacagaaagaaatttccgatactattgagcaactgagggaagctatactggtgtcccgaaaaaaactcggcaatccaatgaccccaacagagaagaagcagtggaatcatgtgtgtgaacagttccaggagaacataaggaagctgaataaacggataaacgatttcaatcttatagtgcctatcttgacccggcagaaggtgcatttcgacgctcaaaaggaaatcgtcagggctcagaagatttacgagactcttattaagactaaagaggtgaccgacagaaatccaaacaacctggatcaaggtgagggtgagaagacgccagaaattaaaaagggctttcttaactggatgaacctgtggaagtttattaagatcagatctttctag

SEQ ID NO: 195300 - DNA, 1167 bp, Artificial Sequence
  derived and/or modified sequence
atgaacacaatgtatgtgatgatggctcaaattctgaggagtcacctaattaaagccacggtgattcctaacagagttaaaatgctgccgtatttcgggatcataaggaaccgcatgatgtccacccataaatccaagaaaaaaattcgggaatactaccggttgctgaatgttgaagaaggttgcagcgcagacgaggtgcgagagtcttttcacaagctggcaaagcagtaccacccagattcgggcagcaataccgccgactccgcaacatttatccgcatcgaaaaggcctatagaaaggtgctgtcacacgtcattgaacaaacgaacgcatctcagtccaaaggcgaagaagaagaggacgtcgagaagttcaagtataaaaccccacagcatagacactatctgtccttcgaaggcattggattcggcacccctactcagagggaaaaacactacaggcagtttcgcgctgatagagccgctgaacaggtcatggagtatcagaagcaaaaactgcaatcccagtactttcccgatagcgtgattgtcaaaaatattcgtcagagcaaacagcagaaaatcacgcaggcaattgagcggctggtggaagatttgatccaggagtctatggcaaagggcgactttgacaatctctctgggaaggggaagcctctgaagaaattcagtgactgttcatacatcgatccaatgacgcataatctgaaccgtatccttattgataatggatatcaaccagagtggatcttaaagcagaaggagattagtgataccatcgagcaactccgggaggcgattctcgtgagcagaaagaagttaggcaaccccatgacaccgacagaaaagaagcagtggaatcacgtttgcgagcagtttcaggaaaatatccgtaagcttaataagcgcattaatgatttcaatctgatagtacctattctgactagacagaaggtgcactttgatgctcagaaggaaattgttagggctcaaaagatctacgaaaccctgattaaaacgaaggaggtcacagataggaatccgaacaacctggaccagggagagggggagaaaacaccagagatcaaaaaaggattcttgaattggatgaatctgtggaagttcatcaagatccggtctttctag

SEQ ID NO: 195301 - protein, 153 aa, Artificial Sequence
  derived and/or modified sequence
MTKIKADPDGPEAQAEACSGERTYQELLVNQNPIAQPLASRRLTRKLYKCIKKAVKQKQIRRGVKEVQKFVNKGEKGIMVLAGDTLPIEVYCHLPVMCEDRNLPYVYIPSKTDLGAAAGSKRPTCVIMVKPHEEYQEAYDECLEEVQSLPLPL

SEQ ID NO: 195302 - DNA, 462 bp, Artificial Sequence
  derived and/or modified sequence
atgaccaagatcaaggccgaccccgacggccccgaggcccaggccgaggcctgcagcggcgagagaacctaccaggagctgctggtgaaccagaaccccatcgcccagcccctggccagcagaagactgaccagaaagctgtacaagtgcatcaagaaggccgtgaagcagaagcagatcagaagaggcgtgaaggaggtgcagaagttcgtgaacaagggcgagaagggcatcatggtgctggccggcgacaccctgcccatcgaggtgtactgccacctgcccgtgatgtgcgaggacagaaacctgccctacgtgtacatccccagcaagaccgacctgggcgccgccgccggcagcaagagacccacctgcgtgatcatggtgaagccccacgaggagtaccaggaggcctacgacgagtgcctggaggaggtgcagagcctgcccctgcccctgtag

SEQ ID NO: 195303 - DNA, 462 bp, Artificial Sequence
  derived and/or modified sequence
atgaccaagattaaagccgatccagacggacctgaggcccaagccgaagcctgctctggtgagcgtacatatcaggagctgttggtgaatcagaaccctattgcccagccattggctagccggcgcctgaccagaaagctctataaatgtattaagaaggccgttaaacagaagcagatccgtcgcggggtgaaagaagtacagaaattcgtcaacaagggagagaaaggcataatggtcttggccggcgatactctccccatagaagtgtactgtcatctcccagttatgtgcgaggaccgcaacttgccttacgtgtacataccctctaagaccgatctaggggcagcagccgggtcaaaacgccctacctgcgtgattatggttaagcctcacgaagaataccaggaggcctatgatgagtgcctggaagaagtgcagagccttcccctaccactttag

SEQ ID NO: 195304 - DNA, 462 bp, Artificial Sequence
  derived and/or modified sequence
atgaccaagatcaaggctgaccctgatggccctgaggcccaggccgaggcctgcagcggggagaggacctaccaggagctgctggtgaaccagaaccccatcgcccagcccctggccagccggcggctgaccaggaagctgtacaagtgcatcaagaaggctgtgaagcagaagcagatcagaagaggagtgaaggaggtgcagaagtttgtgaacaagggggagaagggcatcatggtgctggccggggacaccctgcccatcgaggtgtactgccacctgcctgtgatgtgtgaagatagaaacctgccctacgtgtacatccccagcaagacagacctgggcgctgctgctggcagcaagaggcccacctgtgtgatcatggtgaagccccatgaggagtaccaggaggcctatgatgaatgtctggaggaggtgcagagcctgcccctgcccctgtag

SEQ ID NO: 195305 - DNA, 462 bp, Artificial Sequence
  derived and/or modified sequence
atgaccaagatcaaggccgaccccgacggccccgaggcccaggccgaagcctgctccggggaaaggacgtatcaagagctgttagttaatcagaaccccatcgctcagcccctggcttcgcgcagactgacccggaagctgtacaagtgcattaaaaaggctgtaaaacagaagcagatcaggcgaggcgtcaaagaggtgcagaagtttgttaataaaggcgagaagggcatcatggtgctggcaggagacacacttcccatcgaggtgtactgtcacctgcctgtcatgtgcgaggatcgtaatttaccctatgtatatatcccatcgaaaacggatcttggggccgcggctgggtctaaaaggccaacctgtgtgattatggtaaagcctcacgaggagtaccaggaggcctatgacgagtgcctggaagaggttcagtcccttcccctccccttatag

SEQ ID NO: 195306 - DNA, 865 bp, Artificial Sequence
  derived and/or modified sequence
gtcaacgattgggctgagtcggagacttcctttcctgattggccgtgttgtacggcggcttctcgcgcagctgatgacctggaagtgatgcctaaagctgtggaccgcgtgggctcgcctccctgggactaggtttcagcggccgctgcgatgaccaaaataaaggcagatcccgacgggcccgaggctcaggcggaggcgtgttccggggagcgcacctaccaggagctgctggtcaaccagaaccccatcgcgcagcccctggcttctcgccgcctcacgcggaagctctacaaatgcatcaagaaagcggtgaagcagaagcagattcggcgcggggtgaaagaggttcagaaatttgtcaacaaaggagaaaaagggatcatggttttggcaggagacacactgcccattgaggtatactgccatctcccagtcatgtgtgaggaccgaaatttgccctatgtctatatcccctctaagacggacctgggtgcagccgcaggctccaagcgccccacctgtgtgataatggtcaagccccatgaggagtaccaggaggcttacgatgagtgcctggaggaggtgcagtccctgcccctacccctatgaggggctccggtagcacctgggcacctgccgctggaagctattgggctggcagcaggacgactggctgtcctcctgcccacccacactgacggcatcttcccagttccccaaggcacgccttcttcccaggcagctctaacagccctttcatgaaggtaatgctagtcttctgtccatcagtgccatttcctgtagaactaaaggctgttccaagaatgtggggtggggaaagtaaatgctaagactaaaatgt

SEQ ID NO: 195307 - DNA, 599 bp, Artificial Sequence
  derived and/or modified sequence
gcggccgctgcgatgaccaaaataaaggcagatcccgacgggcccgaggctcaggcggaggcgtgttccggggagcgcacctaccaggagctgctggtcaaccagaaccccatcgcgcagcccctggcttctcgccgcctcacgcggaagctctacaaatgcatcaagaaagcggtgaagcagaagcagattcggcgcggggtgaaagaggttcagaaatttgtcaacaaaggagaaaaagggacctgggtgcagccgcaggctccaagcgccccacctgtgtgataatggtcaagccccatgaggagtaccaggaggcttacgatgagtgcctggaggaggtgcagtccctgcccctacccctatgaggggctccggtagcacctgggcacctgccgctggaagctattgggctggcagcaggacgactggctgtcctcctgcccacccacactgacggcatcttcccagttccccaaggcacgccttcttcccaggcagctctaacagccctttcatgaaggtaatgctagtcttctgtccatcagtgccatttcctgtagaactaaaggctgttccaagaatgtggggtggggaaa

SEQ ID NO: 195308 - DNA, 462 bp, Artificial Sequence
  derived and/or modified sequence
atgaccaaaatcaaggctgatcctgacggcccagaggcccaggctgaggcatgctccggcgaacggacataccaggagttgttggtcaatcagaatccaattgctcagcctttggcttcacggaggttgactagaaagctgtataagtgtatcaaaaaggccgtgaaacagaaacagatacgacgtggcgtgaaggaagtacagaaattcgtgaacaagggagagaaaggaatcatggtgttggcgggagataccttgccaattgaggtgtactgtcaccttccagtaatgtgcgaggaccggaacttaccctatgtatacataccttctaaaactgatctcggggcagccgcaggttctaagcggccaacttgcgtcatcatggtgaagccgcacgaagagtatcaagaagcctacgatgagtgtctggaggaggtccagtcgctgcctctgccgctctag

SEQ ID NO: 195309 - protein, 544 aa, Artificial Sequence
  derived and/or modified sequence
MSRCAQAAEVAATVPGAGVGNVGLRPPMVPRQASFFPPPVPNPFVQQTQIGSARRVQIVLLGIILLPIRVLLVALILLLAWPFAAISTVCCPEKLTHPITGWRRKITQTALKFLGRAMFFSMGFIVAVKGKIASPLEAPVFVAAPHSTFFDGIACVVAGLPSMVSRNENAQVPLIGRLLRAVQPVLVSRVDPDSRKNTINEIIKRTTSGGEWPQILVFPEGTCTNRSCLITFKPGAFIPGVPVQPVLLRYPNKLDTVTWTWQGYTFIQLCMLTFCQLFTKVEVEFMPVQVPNDEEKNDPVLFANKVRNLMAEALGIPVTDHTYEDCRLMISAGQLTLPMEAGLVEFTKISRKLKLDWDGVRKHLDEYASIASSSKGGRIGIEEFAKYLKLPVSDVLRQLFALFDRNHDGSIDFREYVIGLAVLCNPSNTEEIIQVAFKLFDVDEDGYITEEEFSTILQASLGVPDLDVSGLFKEIAQGDSISYEEFKSFALKHPEYAKIFTTYLDLQTCHVFSLPKEVQTTPSTASNKVSPEKHEESTSDKKDD

SEQ ID NO: 195310 - DNA, 1635 bp, Artificial Sequence
  derived and/or modified sequence
atgagcagatgcgcccaggccgccgaggtggccgccaccgtgcccggcgccggcgtgggcaacgtgggcctgagaccccccatggtgcccagacaggccagcttcttccccccccccgtgcccaaccccttcgtgcagcagacccagatcggcagcgccagaagagtgcagatcgtgctgctgggcatcatcctgctgcccatcagagtgctgctggtggccctgatcctgctgctggcctggcccttcgccgccatcagcaccgtgtgctgccccgagaagctgacccaccccatcaccggctggagaagaaagatcacccagaccgccctgaagttcctgggcagagccatgttcttcagcatgggcttcatcgtggccgtgaagggcaagatcgccagccccctggaggcccccgtgttcgtggccgccccccacagcaccttcttcgacggcatcgcctgcgtggtggccggcctgcccagcatggtgagcagaaacgagaacgcccaggtgcccctgatcggcagactgctgagagccgtgcagcccgtgctggtgagcagagtggaccccgacagcagaaagaacaccatcaacgagatcatcaagagaaccaccagcggcggcgagtggccccagatcctggtgttccccgagggcacctgcaccaacagaagctgcctgatcaccttcaagcccggcgccttcatccccggcgtgcccgtgcagcccgtgctgctgagataccccaacaagctggacaccgtgacctggacctggcagggctacaccttcatccagctgtgcatgctgaccttctgccagctgttcaccaaggtggaggtggagttcatgcccgtgcaggtgcccaacgacgaggagaagaacgaccccgtgctgttcgccaacaaggtgagaaacctgatggccgaggccctgggcatccccgtgaccgaccacacctacgaggactgcagactgatgatcagcgccggccagctgaccctgcccatggaggccggcctggtggagttcaccaagatcagcagaaagctgaagctggactgggacggcgtgagaaagcacctggacgagtacgccagcatcgccagcagcagcaagggcggcagaatcggcatcgaggagttcgccaagtacctgaagctgcccgtgagcgacgtgctgagacagctgttcgccctgttcgacagaaaccacgacggcagcatcgacttcagagagtacgtgatcggcctggccgtgctgtgcaaccccagcaacaccgaggagatcatccaggtggccttcaagctgttcgacgtggacgaggacggctacatcaccgaggaggagttcagcaccatcctgcaggccagcctgggcgtgcccgacctggacgtgagcggcctgttcaaggagatcgcccagggcgacagcatcagctacgaggagttcaagagcttcgccctgaagcaccccgagtacgccaagatcttcaccacctacctggacctgcagacctgccacgtgttcagcctgcccaaggaggtgcagaccacccccagcaccgccagcaacaaggtgagccccgagaagcacgaggagagcaccagcgacaagaaggacgactag

SEQ ID NO: 195311 - DNA, 1635 bp, Artificial Sequence
  derived and/or modified sequence
atgtcccgatgtgcccaggccgctgaagtcgctgcgaccgtgcctggcgcaggcgttgggaacgttggtcttaggccaccaatggtcccccgtcaagcctccttctttcctccacccgtgcccaacccgtttgttcagcagacccaaattggctcggcccggagggtccagatcgttttactggggattatcctgctgccaataagggtacttttggttgcattgattttgctactcgcttggccgtttgcagctatttcaacagtgtgctgtcccgagaaactcactcaccccattactggttggaggcggaaaattacccaaacagcactgaagttcctcgggagggcaatgttttttagcatgggctttattgtcgctgtcaagggcaagattgcgagtccactggaagctcccgtgttcgtggctgcacctcattcgaccttctttgacgggatcgcgtgcgtggttgccggcctcccaagcatggtatcaagaaatgagaacgcgcaggttcctctcattggacgcttgctgagggcggtgcagcccgtgctagttagtcgcgtcgaccccgactccagaaaaaacactatcaacgagattattaagaggactaccagtggaggcgaatggcctcagattctggtgttccccgaggggacatgcaccaaccgcagctgtctgataacctttaagcccggcgcttttattcctggagtgccggtgcagcctgtgctgctgcggtatccaaataaactcgacaccgtcacctggacttggcagggttacacattcatccagctgtgcatgctcaccttctgtcagctgtttacgaaagtggaggtcgaatttatgccagttcaggtgcctaacgatgaagagaaaaacgacccagtcctgtttgcgaataaagtgaggaatctcatggccgaggcactaggaatccctgtaacagaccatacatatgaagattgtcgtttgatgatctccgctggtcaactaacactccccatggaagccgggctggtggaattcaccaagatttcacgaaaactgaaactggattgggatggcgtgcgaaagcacctagatgagtacgcatcaatcgcgtccagcagtaaagggggtagaatcggaatagaagaattcgccaagtacttaaaactgcccgtgagcgacgtgcttcgacagctatttgcactgttcgaccggaaccatgacggcagtattgacttcagagagtatgtcatcgggttagcggtgctttgcaacccaagcaataccgaggagataatccaagtggcttttaagttgttcgacgtggacgaggatggatatattacagaagaagaattttctacaatactacaagcatcactgggagtacccgacttagatgtgagtggattattcaaggaaattgcccagggggactccatttcctatgaagagttcaaatcctttgcactgaaacacccagagtacgccaagatattcactacatatctggacctacaaacgtgccatgtgtttagcctgcccaaggaagttcagaccacaccgtccactgcctcaaacaaagttagccctgagaaacacgaagaatcgacttcagacaaaaaggatgactag

SEQ ID NO: 195312 - DNA, 5387 bp, Artificial Sequence
  derived and/or modified sequence
agagcctggggcgtgtcacagccgaaggggcagggcggcagcagcaggcgtctaagtaacttcagcgcctgcgcagaggctccccagcgtcgccctaggctgggactctagtaggtcttcggctcagttttggctgcagcgcccgcgtagatcgcttcggccgggttctacgcccggctcaactatgagccggtgcgcccaggcggcggaagtggcggccacagtgccaggtgccggcgtcgggaacgtggggctgcggccgcccatggtgccccgtcaggcgtccttcttcccgccgccggtgccgaaccccttcgtgcagcagacgcagatcggctccgcgaggcgggtccagattgtccttcttgggattatcttgcttccaattcgtgtcttattggttgcgttaattttattacttgcatggccatttgctgcaatttcaacagtatgctgtcctgaaaagctgacccacccaataactggttggaggaggaaaattactcaaacagctttgaaatttctgggtcgtgctatgttcttttcaatgggatttatagttgctgtaaaaggaaagattgcaagtcctttggaagcaccagtttttgttgctgcccctcattcaacattctttgatggaattgcctgtgttgtagctgggttaccttctatggtatctcgaaatgagaatgcacaagtccctctgattggcagactgttacgggctgtgcaaccagttttggtgtcccgtgtagatccggattcccgaaaaaacacaataaatgaaataataaagcgaacaacatcaggaggagaatggccccagatactagttttcccagaaggtacttgtactaatcgttcctgtttgattacttttaaaccaggagccttcattccaggagttccagtgcagccagtcctcctcagatacccaaacaagctggatactgtgacctggacatggcaaggatatacattcattcagctttgtatgcttactttctgccagctcttcacaaaggtagaagttgagtttatgccagttcaagtaccaaatgatgaagaaaaaaatgatcctgtcctttttgccaataaagtccggaatttaatggcagaagctctgggaataccagtaacagatcatacctatgaagactgcagattgatgatttcagcaggacagctaacattgcctatggaagctgggctggtggaatttactaaaattagccgaaaattgaaattagattgggatggtgttcgtaagcatttggatgaatatgcatctattgcgagttcctcaaaaggaggaagaattggaattgaagaattcgccaagtatttaaagttgcctgtttcagatgtcttgagacaactttttgcactctttgacaggaaccatgatggcagcattgacttccgagagtatgtgattggcctggctgtcttgtgcaacccttccaacacagaggagatcatccaggtggcatttaagctgtttgacgttgatgaggatggctacataacggaggaagagttctccaccattctacaggcttcccttggagtgcctgaccttgatgtttctggtctcttcaaggaaatagcccaaggggactcaatttcctatgaggaatttaaaagttttgccttaaagcatccagaatatgctaagatatttacaacatacctagacctccagacgtgccatgtgttttcattaccaaaagaagtccagacaaccccctccaccgccagtaataaagtcagccctgaaaagcatgaagagagtacctcagacaaaaaagatgactgaaagcagtatttccaataaggaaaacacagtagcttttgcttgaaattgtaaaggcacttattgataatacttttaatgtgttggtaatgatgtttaaaattgaaagatttttaaaacaaaaatgatagattttcttactaaaaatgtttttattaaccttgcttttattggaaaaaatcaagcaatatttcgttttcttttgtgttatattgtactttactgattcatttactggtgatacatatgtttttatggattttccagtttaatttgcatatacaaatgaatgcaatggtctattggtgagcattgagcaacactgtataaagttttaaaaatgtaaacactttttaatctactttcctctaaaaatcaataatattctattatttctaatccttttccacttgggaaataacaatgaagaatctgagaatttgacatctataactttacagattcatttttccatttaaatttcagtttcttggatcactgaatatgggaagggagagcttcactaattagacgcagcttcttaagaacttatattctctttgacatacatctctattgtagttttttgttttgttttgttttttgagatggagtcttgctctgtcacccaggctggagtgcagtggtgcaatctcagctcactgcaacctctgcctcctgggttcaagtgattctcgtacctcagactcccgagtagttgggattacaggtgcccaccaccacacccgactaatttttgtatttttagtagccatgtggttttgccatgttggccaggctggtttcgaactcctgacctcaggtgatccacccacctcagcctcccaaagtgctgggattacaggtgtgagccaccgttcccggcctattgtagattttcttaactacttgctaaggaaatcatatccttttacatgaactacaggtttagaacttggttttaagacaactgctatggccagaaggtaaatgggaattgccttattgaaggtaacattgattgcctaataagaaaatgaattgtttgccacagagttgaatttaatttgagttagatagttcagaatgtagcacttgccctataaatgaatcagatttgttctatttatataatattagaattaatatattatcatgtaagtgggaattttattttgttaagtggactctcaaattttagaacttgtgtgaaatatctcccagaaaacacaaaaggtttcaaggtatcacccaaagctagggaatcaacaaacgtactttattaatgcaagaccacaatttaagccccaggcaggaatccaacagtaacatttttcctttaggttaagcagtaatttttttgaattgtcatttttaatgggtctcacacatgcatattgctaatatcattcatgtttgaggttttcaacaaagaaccaatttattaatataatgtacaaaaatagttggttcattttctgaattcagtctttgaaataaaactccttgttttggccgtgtttctgaatgtattggtgattcacccccaagctaattttttaaagtcatttttgaagttgggaagtctcatgagagatgttgaagtatgtatttaatcaagagtcatgatttcaaactagttttacatattaagcagttagtgttctaatttaatgggtaaatgtgtgtttggataaatatctgaaaattttatccttaagtatatataattatttgcctcttatatgtcttaaagctatttaaacaaggtgttaaatgagccaaaacaattaagtaattagaacagtacatttttatcagagtgtctgtcatatgcaatgaatgtatgtaatactaaaaaatcatgactacttttatcaaagaaaaaccacacattaatcctattaatcatgaaagcgtagcattgtaaattaaaggttttctttgaggctcttgaaagtgatcccattgctttcctgttttaaaaatattttatgctctttatttccacttctgtgaatgtgatatttctattttgtgattatgttactgaataaacaaacttgctacataaaattcttagcaattaaaaaaattctgattctgccattttgtctcaaatgtaatatacccttttaatatcatatgtttacatatttatgaatgattaatcatttttgtttgcattaaactttatgaaatgtcagaaatgattttactctaatgaaactcaaattttgcccaaagtagcaatattcttaaagatgttgaattttgactggttgaattttatatagtaacacacaagtcgtgatcatcaatattattgcagaccaggactctgcttatatgccttgctaacaaagatttctttcacagaggcttttctcctctcaagacttaaagtaagaattacattttattaagtcagttaaatgcaccatggcttcatatagtaatataaaaaaactctttgaagtgagaaatattatatcctaaaacctctaaaccacaaacattcaattgaaagagttctgttgaaggataatgacatactgactgcttacagaccaagttgcttgcattttgtatgtttagccctcctttgccactgcttttagagccttggaaggctaagtgtgatagtaatgctagctctaatgcatatttaaaggagactgcctcgcttttagaagacatctggtctgctctctgcatgaggcacagcagtaaagctctttgattcccagaatcaagaactctccccttcagactattaccgaatgcaaggtggttaattgaaggccactaattgatgctcaaatagaaggatattgactatattggaacagatggagtctctactacaaaagtctttgggtatttgtttcttacatagaaaatgctaacatgaatagaaagatactggtgcaagaccattcccgggaaagtagacatacttacatttttttccttttctgctcatttgaatgaactcaattttatgttaaattgttatatcagagtgacaaataagtgctatggcttgatagaagtgaagctcttcacatatattcaaaatacatatcacaaactttggtaaataggatagtaatctgaagaacttttgccctttttaccccatttactgtaactcttgtttctaggtaatcgttctctctcaacaaacttctcaagcgtctgtgtaacaagccacatgttctaacaaattgtctccatcgcacttcaacagccaggtccctattttttataacgtattaaccttattattttcttattattttaaaagaatctatgcacattagcaaaatttaaaagatagagaaaaatataaacagaaaaaattatgtttacttctaccaccctaaatcaactattatcaattttatacatattttactccatcttttttcaaagtttcttacattttccaatgtcattaaaattctctgtgaatgtaaattttaaaaactgtacctactgttttttggaaatctgtaacaagctatgtgtaatcattcttctaatattaaacatattgtgtccagaa

SEQ ID NO: 195313 - DNA, 1635 bp, Artificial Sequence
  derived and/or modified sequence
atgagccgctgtgcccaggccgctgaggtggccgccaccgtgcctggagctggggtgggcaatgtgggcctgcggccccccatggtgccccggcaggccagcttcttccccccacctgtgcccaacccctttgtgcagcagacccagatcggcagcgcccggcgggtgcagatcgtgctgctgggcatcatcctgctgcccatccgggtgctgctggtggccctgatcctgctgctggcctggccctttgctgccatcagcacagtgtgctgcccagagaagctgacccaccccatcaccggctggaggaggaagatcacccagacagccctgaagttcctgggccgggccatgttcttctccatgggcttcatcgtggccgtgaagggcaagatcgccagccccctggaggcccctgtgtttgtggccgccccccacagcaccttctttgatggcatcgcctgtgtggtggccggcctgcccagcatggtgtccagaaatgaaaatgcccaggtgcccctgattggccgcctgctgcgggctgtgcagcctgtgctggtgtcccgggtggaccctgacagcaggaagaacaccatcaatgagatcatcaagaggaccaccagcggcggggagtggccccagatcctggtgtttcctgagggcacctgcaccaacagaagctgcctgatcaccttcaagccaggggccttcatccctggggtgcctgtgcagcctgtgctgctgcgctaccccaacaagctggacacagtgacctggacctggcagggctacaccttcatccagctgtgcatgctgaccttctgccagctgttcaccaaggtggaggtggagttcatgcctgtgcaggtgcccaatgatgaggagaagaatgaccctgtgctgtttgccaacaaggtgaggaacctgatggccgaggccctgggcatccctgtgacagaccacacctatgaggactgccgcctgatgatctctgctggccagctgaccctgcccatggaggccggcctggtggagttcaccaagatcagcaggaagctgaagctggactgggatggagtgaggaagcacctggatgaatatgccagcatcgccagcagcagcaaaggaggaagaattggaattgaggagtttgccaagtacctgaagctgcctgtgtctgatgtgctgcggcagctgtttgccctgtttgacagaaatcatgatggcagcattgacttccgggagtatgtgattggcctggccgtgctgtgcaaccccagcaacacagaggagatcatccaggtggccttcaagctgtttgatgtggatgaagatggctacatcacagaggaggagttcagcaccatcctgcaggccagcctgggcgtgcctgacctggatgtgtctggcctcttcaaggagatcgcccagggcgacagcatctcctatgaggagttcaagagctttgccctgaagcacccagaatatgccaagatcttcaccacctacctggacctgcagacctgccacgtgttcagcctgcccaaggaggtgcagaccacccccagcacagccagcaacaaggtgtccccagagaagcatgaggagagcaccagtgacaagaaggatgactag

SEQ ID NO: 195314 - DNA, 1635 bp, Artificial Sequence
  derived and/or modified sequence
atgagccggtgcgcccaggccgccgaggtggccgccaccgtgcccggcgctggtgtggggaacgttggcttgcggccccccatggtcccgcgccaggcctctttcttcccccccccggtgccgaatccgtttgtccagcaaacccagatcggcagcgccaggagggtgcagatcgtcctgctggggattatactgctgcccatccgggtgctgctggtggctctgatactgcttctggcgtggccattcgccgcgatttctactgtgtgctgccccgagaaattgactcatccaatcacgggttggaggaggaaaattacccagaccgctctcaagtttctgggtcgcgccatgtttttcagcatgggcttcatcgtagccgtaaagggcaagattgcttctcctttggaggccccagtctttgtagccgccccccacagtacctttttcgatggtatagcatgcgttgtcgccgggctgccctcaatggtgagtcgaaatgagaatgcccaagttccccttatcggacgcctcctgagagctgttcagcctgtactcgtcagtcgtgtcgatcccgactcccgaaagaatactatcaatgagattataaagagaacaacctcaggaggggagtggcctcaaatccttgtctttcccgagggcacctgcacgaatagatcttgtctcattacattcaagcctggcgcctttattccaggggtccccgtccagcccgtgctgctccgttatcctaataagttagacaccgtcacttggacgtggcagggatacacctttattcaactttgtatgctaacattctgccaattattcaccaaagtcgaagtcgagttcatgccagtccaagtccccaatgacgaggagaaaaatgacccggttctctttgccaataaggtgaggaacctaatggctgaggctctcggaataccagttactgatcatacctatgaggattgccgcctcatgattagcgctggacagctgaccctccccatggaggcaggtctagtcgagtttacaaaaatttcgcgcaaactgaaactggattgggacggtgtccgtaagcacctggacgagtacgcgtctatcgcgtcaagctccaagggagggaggatcggtattgaagaattcgctaaatacctgaaattgccagtatctgatgttctgagacagcttttcgcacttttcgaccgaaatcatgacggaagcatcgacttccgcgaatacgtcatcggacttgctgtgctgtgcaatccctccaataccgaagaaattattcaagtggcattcaagcttttcgatgtggacgaggacggatacatcacagaggaggagttttctaccatccttcaagcctcactgggcgtacctgatctagacgtgtctggactcttcaaggagatcgctcagggcgattcaatttcatatgaggagttcaaaagctttgcactgaagcacccagagtatgccaagatcttcacgacatatctggacttgcagacctgccacgtgttctcgctgcccaaagaggttcaaacgacaccttccactgcgtccaacaaggttagcccggagaagcacgaggagtcaacgtctgataaaaaggatgattag

SEQ ID NO: 195315 - DNA, 1635 bp, Artificial Sequence
  derived and/or modified sequence
atgtctcgctgtgcccaagcagccgaggtagccgctaccgtgccaggcgctggcgtggggaatgtggggttgaggcccccaatggttcctaggcaggcgtcttttttcccaccaccagtgccgaatccatttgtacagcagacccagatcggttccgcccgtcgagttcagattgtacttttggggattatccttctccccataagagttctgctcgtagcgttaatcctcttactcgcctggccttttgcagctatctctaccgtgtgttgtcctgagaaactaacgcatcccatcacagggtggcgcaggaagataacacagacagccctcaaatttctgggacgcgctatgtttttttccatggggtttatcgttgccgtgaaggggaagatcgccagtcctctggaggcgccagtcttcgtcgcggctcctcattctacctttttcgatggcatcgcttgcgttgtcgctggactacccagcatggtgtccagaaatgagaatgcacaggtgccactgatcggtcgccttctgagggctgtgcaacccgtacttgtttctcgcgtcgatccggatagcaggaagaacactattaacgagatcattaagcgcacaacctctggaggagagtggcctcagatactggtctttccagagggtacctgcaccaacagaagctgtctcatcacattcaagcccggtgctttcatcccaggtgttccagtccaaccagtcttgttgcgctaccccaacaaactcgacacggtcacctggacttggcagggctatactttcattcagctgtgcatgcttacattctgccagcttttcactaaagtggaggtcgagtttatgccagtacaggttcccaacgatgaagagaaaaatgaccccgtgttatttgccaacaaggtgagaaacctgatggcagaggccctgggcatccccgttacagatcatacttacgaagactgccgcctgatgatctcagcgggacaactcacactgcctatggaagctggtctggtggagtttaccaaaatttctcggaagttgaaactcgactgggacggcgtgaggaaacacctagacgagtatgcctctatagcatcctcatccaagggcggtaggatcggaatcgaggagttcgccaagtacttgaagctgccagtgtcggacgtgctaaggcaattgttcgctttgtttgataggaaccatgacggaagcattgattttagagagtatgtcattggactagcagtgctgtgtaatcctagcaacaccgaggagattatccaggtcgctttcaaactgtttgatgtggacgaggacgggtacattacggaggaggagttttctaccattctgcaggcttcccttggcgtgcctgatcttgacgtgagcggcctctttaaagaaatcgcccagggcgacagcatcagttacgaagagttcaagtcgtttgctctcaaacaccccgagtacgcaaaaatcttcacaacctacctggacctgcagacatgtcacgtgtttagccttccgaaagaagtgcagacaaccccgtccacagcatcgaataaagtttccccagaaaagcacgaggaatcaaccagcgataagaaagatgattag

SEQ ID NO: 195316 - protein, 166 aa, Artificial Sequence
  derived and/or modified sequence
MAVSTVFSTSSLMLALSRHSLLSPLLSVTSFRRFYRGDSPTDSQKDMIEIPLPPWQERTDESIETKRARLLYESRKRGMLENCILLSLFAKEHLQHMTEKQLNLYDRLINEPSNDWDIYYWATEAKPAPEIFENEVMALLRDFAKNKNKEQRLRAPDLEYLFEKPR

SEQ ID NO: 195317 - DNA, 501 bp, Artificial Sequence
  derived and/or modified sequence
atggccgtgagcaccgtgttcagcaccagcagcctgatgctggccctgagcagacacagcctgctgagccccctgctgagcgtgaccagcttcagaagattctacagaggcgacagccccaccgacagccagaaggacatgatcgagatccccctgcccccctggcaggagagaaccgacgagagcatcgagaccaagagagccagactgctgtacgagagcagaaagagaggcatgctggagaactgcatcctgctgagcctgttcgccaaggagcacctgcagcacatgaccgagaagcagctgaacctgtacgacagactgatcaacgagcccagcaacgactgggacatctactactgggccaccgaggccaagcccgcccccgagatcttcgagaacgaggtgatggccctgctgagagacttcgccaagaacaagaacaaggagcagagactgagagcccccgacctggagtacctgttcgagaagcccagatag

SEQ ID NO: 195318 - DNA, 501 bp, Artificial Sequence
  derived and/or modified sequence
atggccgtgtctactgtgttctccacctcttcactgatgctggcccttagccgacactctttgttgagcccactcctcagtgtcacttcgtttcggcgattttacaggggtgattctcctaccgactcacagaaggatatgattgaaatacctctgcccccctggcaggagaggacagatgagagtattgagacaaagcgagccaggctcttgtacgagagccgcaaaagaggaatgcttgaaaattgtatcctattgagcctgtttgcaaaagagcatctccagcacatgactgaaaagcaacttaatctgtacgatcggttaatcaatgaacccagcaacgattgggacatttactattgggccaccgaggccaaaccagcgcctgaaatcttcgaaaatgaggtgatggcccttctgagggacttcgcaaaaaacaagaataaagagcagaggcttcgtgctcctgacctcgagtatctctttgaaaagccacgatag

SEQ ID NO: 195319 - DNA, 501 bp, Artificial Sequence
  derived and/or modified sequence
atggctgtgtccacagtgttcagcaccagcagcctgatgctggccctgagccgccacagcctgctgagccccctgctgtctgtgaccagcttccgccgcttctacagaggagacagccccacagacagccagaaggacatgattgagatccccctgcccccctggcaggagaggacagatgagagcattgagaccaagagggcccggctgctgtatgagagcaggaagaggggcatgctggagaactgcatcctgctgagcctgtttgccaaggagcacctgcagcacatgacagagaagcagctgaacctgtatgacaggctcatcaatgagcccagcaatgactgggacatctactactgggccacagaggccaagccagcccctgagatctttgaaaatgaggtgatggccctgctgcgggactttgccaagaacaagaacaaggagcagaggctgcgggccccagacctggagtacctgtttgagaagcccaggtag

SEQ ID NO: 195320 - DNA, 501 bp, Artificial Sequence
  derived and/or modified sequence
atggccgtgagcaccgtgttcagcaccagcagcctgatgctggccctgtcacgccactcattattgtcaccattactctccgttacgtcattccggcggttctacaggggtgatagtcccacagatagtcaaaaggacatgattgagattccactgcctccatggcaggagagaaccgatgaaagcatagagactaagcgggccaggttgctgtacgagagtagaaagcgcggaatgctggagaactgcatccttttatctcttttcgccaaggagcatttgcagcatatgaccgagaagcagttgaacctgtatgatcgactgataaacgaaccaagtaacgattgggatatttattactgggccaccgaagccaagcccgctccagagatttttgagaatgaggtgatggcactcctgcgagactttgctaagaacaagaacaaggaacaacgccttcgcgccccggacctggaatacctcttcgaaaaaccccggtag

SEQ ID NO: 195321 - DNA, 501 bp, Artificial Sequence
  derived and/or modified sequence
atggcagtgtccactgtttttagcacctcaagtctgatgctcgccttgagcaggcattctctgctgagcccactgcttagcgtgacgtcttttaggaggttctacagaggcgactcacctaccgatagccagaaggatatgatcgagattccactgccaccatggcaagaacggacagacgagtctattgagacaaagcgcgctcggttgctatacgaatcacgaaagcgtggcatgctggaaaactgtatactgttgtcccttttcgctaaagagcatctccaacacatgaccgagaagcagctgaacttatatgatcggctgataaatgaaccttcaaacgattgggatatctactattgggccacagaagctaaaccggcaccagagatttttgaaaatgaagtcatggctctgttgcgtgattttgccaaaaacaagaataaggagcagagactgcgtgcccctgacctggaatatctgttcgagaagccaaggtag

SEQ ID NO: 195322 - DNA, 2033 bp, Artificial Sequence
  derived and/or modified sequence
cgtggtcggctggccgggcggctaggagttcccggaagtgcccgcgcagccggtttccggtgcaggtggggaaaatggcggtgtctacagtgttctcgacttcgtcgctgatgcttgctctgtcaaggcacagcctattgtctcctttgctcagtgtgacatcattcagacgcttctacagaggtgacagcccaacagattcccaaaaggacatgattgaaatccctttgcctccatggcaggagagaactgatgaatccatagaaaccaaaagagcccgcctgctctatgagagcagaaagaggggaatgttggaaaactgcattcttcttagtctttttgctaaagaacatctgcagcacatgacagaaaagcagctgaacctctatgaccgcctgattaacgagcctagtaatgactgggatatttactactgggccacagaagctaaaccagccccagaaatatttgaaaatgaagtcatggccctgctgagagactttgctaaaaacaaaaacaaagagcagagactgcgtgccccagatcttgagtacctctttgaaaagccacgttgagctgtgctccacggcctggcatgggggttcagtctgtggatggtaactacttatgatggacgttagccttgcttccggcttcttagatgcccagctgccctaccccagaccactggtcctgcctcaagtgatggacataaccctctcctaggacatacatgtaaatgcacaatgtgactcattctcatacttttttgttcagctctgagcctcaaaagtgatttgtcagcagcgctggcatgcaggctttgcctggctgctatctctagaggcaagtctgccacgagagggcactgcaggcgaagcagttgtgcttgctcattgcctcagcccaagtgtactcaaagaaaagaggcagccagctgtgcgtgctgtatggaaagcctcccgccctccctgcagctccccgccctcagtggcccagggctttgttgaagtggaactccccacttccaacctggtatggctccttctgcgaagggaagctgatcccagcctcctgagctgaatccttcaaaggcacagcaggcagaatgagggccacaggcaggagtggtgtgggcacactgcttaggagtcaacatcttcatcattgggctttctttaaaacgtgcactttgtaatttgaaagagaattattaaagcatactgaaaaaaggaaatttacaatttcccagccctcacaattaattttaattttgtctattttcatataacccatagtcatgtttatagagttttacaagttcacaattacaggttttattttcatgtagcactatagaaaactttccccctcattcctacagtcttcacaattagttgactaaataataatacataagaaataatatattagaatgaattagttagaagtgtttttaaaagctctagggctgtgtgacttctgtgttgctagtggtgccctccctggaggggttttgccctcagagctgtaatctaggcagtagaatcagtcacccagactggaccaggtgcatctaaaggtgttgactagaagaaggtcggccagatttgatgagcaggtggttggtgattataggagccgcacacagggactacacacgcacatgtttccagcattgttgagctccagggttcctacagagccacctcatggttcctgcctgctcttcagtatccctggtggctcaggagggaagggaagagatctagcctttacgtaatcacagttaagcctcacagcactctagactagtggtgttacctgtattttatacataagaaagtgggctcagagagaggaagtaatttgtccaaggtcaggtagctattgagtcgaaaaagcagaatttagtatagctcagtctgcctccaaagctcttgaactttctactagaacacactgccttactgctggaaatttaatagaagtctctgtttgggaaagctgtggcaaatagatgtgacagttct

SEQ ID NO: 195323 - protein, 150 aa, Artificial Sequence
  derived and/or modified sequence
MAPSRLQLGLRAAYSGISSVAGFSIFLVWTVVYRQPGTAAMGGLAGVLALWVLVTHVMYMQDYWRTWLKGLRGFFFVGVLFSAVSIAAFCTFLVLAITRHQSLTDPTSYYLSSVWSFISFKWAFLLSLPKCWDYRCEPPCPAWICFLSTQ

SEQ ID NO: 195324 - protein, 146 aa, Artificial Sequence
  derived and/or modified sequence
MAPSRLQLGLRAAYSGISSVAGFSIFLVWTVVYRQPGTAAMGGLAGVLALWVLVTHVMYMQDYWRTWLKGLRGFFFVGVLFSAVSIAAFCTFLVLAITRHQSLTDPTSYYLSSVWSFISFKWAFLLSLYAHRYRADFADISILSDF

SEQ ID NO: 195325 - DNA, 453 bp, Artificial Sequence
  derived and/or modified sequence
atggcccccagcagactgcagctgggcctgagagccgcctacagcggcatcagcagcgtggccggcttcagcatcttcctggtgtggaccgtggtgtacagacagcccggcaccgccgccatgggcggcctggccggcgtgctggccctgtgggtgctggtgacccacgtgatgtacatgcaggactactggagaacctggctgaagggcctgagaggcttcttcttcgtgggcgtgctgttcagcgccgtgagcatcgccgccttctgcaccttcctggtgctggccatcaccagacaccagagcctgaccgaccccaccagctactacctgagcagcgtgtggagcttcatcagcttcaagtgggccttcctgctgagcctgcccaagtgctgggactacagatgcgagcccccctgccccgcctggatctgcttcctgagcacccagtag

SEQ ID NO: 195326 - DNA, 441 bp, Artificial Sequence
  derived and/or modified sequence
atggcccccagcagactgcagctgggcctgagagccgcctacagcggcatcagcagcgtggccggcttcagcatcttcctggtgtggaccgtggtgtacagacagcccggcaccgccgccatgggcggcctggccggcgtgctggccctgtgggtgctggtgacccacgtgatgtacatgcaggactactggagaacctggctgaagggcctgagaggcttcttcttcgtgggcgtgctgttcagcgccgtgagcatcgccgccttctgcaccttcctggtgctggccatcaccagacaccagagcctgaccgaccccaccagctactacctgagcagcgtgtggagcttcatcagcttcaagtgggccttcctgctgagcctgtacgcccacagatacagagccgacttcgccgacatcagcatcctgagcgacttctag

SEQ ID NO: 195327 - DNA, 270 bp, Artificial Sequence
  derived and/or modified sequence
atgtacatgcaggactactggagaacctggctgaagggcctgagaggcttcttcttcgtgggcgtgctgttcagcgccgtgagcatcgccgccttctgcaccttcctggtgctggccatcaccagacaccagagcctgaccgaccccaccagctactacctgagcagcgtgtggagcttcatcagcttcaagtgggccttcctgctgagcctgtacgcccacagatacagagccgacttcgccgacatcagcatcctgagcgacttctag

SEQ ID NO: 195328 - DNA, 111 bp, Artificial Sequence
  derived and/or modified sequence
atgtacatgcaggactactggagaacctggctgaagggcctgagaggcttcttcttcgtgggcgtgctgttcagcgccgtgagcatcgccgccttctgcaccttcctgtag

SEQ ID NO: 195329 - DNA, 51 bp, Artificial Sequence
  derived and/or modified sequence
atgtacatgcaggactactggagaacctggctgaagggcctgagaggctag

SEQ ID NO: 195330 - DNA, 453 bp, Artificial Sequence
  derived and/or modified sequence
atggccccatcacggctgcagcttggactgcgtgcagcctacagtggtatctcttccgttgctggtttctctattttcctggtgtggacagtggtgtataggcagccgggtaccgctgctatggggggcctggcaggggtactggccctctgggtgctggtaacccacgtgatgtatatgcaggattactggcgcacatggctcaagggactgcgaggatttttctttgtgggcgtgttgttctcagccgtgagcatagccgctttctgtacattcttggtgcttgctattacccgacaccagagcctaactgaccctacctcctattacctgagtagcgtgtggtcctttatctccttcaaatgggctttcctgctaagccttccaaagtgctgggactaccggtgtgaacctccctgtccggcgtggatttgtttcttgtccactcagtag

SEQ ID NO: 195331 - DNA, 441 bp, Artificial Sequence
  derived and/or modified sequence
atggcaccatcacggctccaactaggcctgcgagctgcttacagcggaatatcttctgtggccggattctctatctttctcgtgtggactgtcgtgtacaggcagcccggaacagctgcaatgggcggcttagcgggggtgttagcgttatgggtcctcgtcacacatgttatgtacatgcaagactactggcgaacgtggctcaagggcctcagaggattcttcttcgttggagtactgtttagcgctgtctccatagccgcgttttgtacatttctggtcctggccattacgcgtcaccagtcacttaccgatcccacctcttactacctcagttctgtttggagcttcataagcttcaagtgggcttttctgttgagcttatatgcccatagatatagagcagacttcgcagatatcagcattttgagcgatttttag

SEQ ID NO: 195332 - DNA, 270 bp, Artificial Sequence
  derived and/or modified sequence
atgtacatgcaagactactggagaacctggctgaagggactaagaggcttcttctttgttggcgttctatttagtgctgtctccatagcagctttctgtaccttcctggtcctggcaattactagacaccagagcctgaccgacccaacatcgtattaccttagctccgtctggagcttcataagttttaaatgggctttccttctgtcgctttacgcccatcgatacagagccgattttgcagacataagcatcctctctgacttctag

SEQ ID NO: 195333 - DNA, 270 bp, Artificial Sequence
  derived and/or modified sequence
atgtacatgcaggactactggcggacgtggctgaagggactcaggggctttttctttgtgggagtgctgttctcagccgtctctattgcagcgttctgcacatttctggtgctcgccatcactagacaccagtccttgactgaccccactagctattatctttccagtgtctggtcattcatttctttcaaatgggcgtttctgttatcactctacgcacacaggtatagagctgacttcgccgatatatccatcctcagtgatttttag

SEQ ID NO: 195334 - DNA, 111 bp, Artificial Sequence
  derived and/or modified sequence
atgtatatgcaggattattggagaacttggttgaaaggccttcggggatttttcttcgtgggcgtgctcttctcggcagtctccattgccgcattttgtactttcctgtag

SEQ ID NO: 195335 - DNA, 51 bp, Artificial Sequence
  derived and/or modified sequence
atgtacatgcaggactattggagaacctggctaaagggactcagggggtag

SEQ ID NO: 195336 - DNA, 453 bp, Artificial Sequence
  derived and/or modified sequence
atggcccccagccggctgcagctgggcctgcgggccgcctacagcggcatcagctctgtggccggcttcagcatcttcctggtgtggacagtggtgtaccggcagcccggcacagctgccatgggcggcctggccggcgtgctggccctgtgggtgctggtgacccacgtgatgtacatgcaggactactggaggacctggctgaagggcctgcggggcttcttctttgtgggcgtgctcttctctgctgtgtccattgctgccttctgcaccttcctggtgctggccatcaccaggcaccagagcctgacagaccccaccagctactacctgagctctgtgtggagcttcatctccttcaagtgggccttcctgctgagcctgcccaagtgctgggactaccgctgtgagcccccctgcccagcctggatctgcttcctgagcacccagtag

SEQ ID NO: 195337 - DNA, 441 bp, Artificial Sequence
  derived and/or modified sequence
atggcccccagccggctgcagctgggcctgcgggccgcctacagcggcatcagctctgtggccggcttcagcatcttcctggtgtggacagtggtgtaccggcagcccggcacagctgccatgggcggcctggccggcgtgctggccctgtgggtgctggtgacccacgtgatgtacatgcaggactactggaggacctggctgaagggcctgcggggcttcttctttgtgggcgtgctcttctctgctgtgtccattgctgccttctgcaccttcctggtgctggccatcaccaggcaccagagcctgacagaccccaccagctactacctgagctctgtgtggagcttcatctccttcaagtgggccttcctgctgagcctgtatgcccaccgctacagagctgactttgctgacatcagcatcctgagtgacttctag

SEQ ID NO: 195338 - DNA, 270 bp, Artificial Sequence
  derived and/or modified sequence
atgtacatgcaggactactggaggacctggctgaagggcctgcggggcttcttctttgtgggcgtgctcttctctgctgtgtccattgctgccttctgcaccttcctggtgctggccatcaccaggcaccagagcctgacagaccccaccagctactacctgagctctgtgtggagcttcatctccttcaagtgggccttcctgctgagcctgtatgcccaccgctacagagctgactttgctgacatcagcatcctgagtgacttctag

SEQ ID NO: 195339 - DNA, 111 bp, Artificial Sequence
  derived and/or modified sequence
atgtacatgcaggactactggaggacctggctgaagggcctgcggggcttcttctttgtgggcgtgctcttctctgctgtgtccattgctgccttctgcaccttcctgtag

SEQ ID NO: 195340 - DNA, 51 bp, Artificial Sequence
  derived and/or modified sequence
atgtacatgcaggactactggaggacctggctgaagggcctgcggggctag

SEQ ID NO: 195341 - DNA, 453 bp, Artificial Sequence
  derived and/or modified sequence
atggcccccagccggctgcagctgggcctgcgggccgcctacagcggcatatcttccgttgctggcttcagcatcttcttagtatggacggtggtatacagacaaccagggaccgcagccatgggaggccttgcaggagtgttggctctgtgggtgctggtcactcatgtgatgtacatgcaagattattggcggacatggttaaaagggcttaggggattcttttttgtgggcgtgttgtttagcgcagtgagtatagcagccttctgcacgtttctcgtgctcgccatcacacgccatcagagcctcacagatcccacctcctactacctctctagtgtctggtcatttattagtttcaaatgggcatttctcttgagcttgccaaagtgctgggactacagatgcgagccaccctgtcccgcgtggatttgtttcctgtctacgcagtag

SEQ ID NO: 195342 - DNA, 441 bp, Artificial Sequence
  derived and/or modified sequence
atggcccccagccggctgcagctgggcctgcgggccgcctacagcggaatctcttccgtggctggcttctctatctttttggtgtggactgtcgtataccggcaaccggggaccgcagccatgggaggcctcgctggtgtcctcgctttatgggttctcgtgacccatgtgatgtacatgcaggattactggaggacatggctgaaaggactgaggggcttcttctttgtgggcgtgctgtttagtgcggtaagtatcgccgccttctgcacattcctggtgctcgcaataactcgccaccagagtcttacagatcccacctcctactatttgagcagtgtgtggtcattcattagctttaagtgggccttcttgcttagcctctacgcccacaggtatagggccgactttgctgatattagcatcttgtccgatttttag

SEQ ID NO: 195343 - DNA, 270 bp, Artificial Sequence
  derived and/or modified sequence
atgtacatgcaggactactggcggacctggctgaagggcctgcggggcttcttcttcgtcggcgtgttattttccgccgtgagtatagccgccttctgtacctttctggtgctggcaattacccgccaccagagcttaactgatccgacatcttactatctttcttccgtgtggagtttcatctcgttcaaatgggcattcctgttgtccttatacgcccaccgttaccgcgcggactttgcagacatcagtattctgagcgacttttag

SEQ ID NO: 195344 - DNA, 270 bp, Artificial Sequence
  derived and/or modified sequence
atgtacatgcaggactactggcggacctggctgaagggcctgcggggctttttcttcgtgggagtcctgttctctgcagtttcaattgcagccttttgcacttttttagtcttagccatcacgcggcatcaaagtctgactgacccgacctcctattatttgagcagtgtgtggagctttataagctttaagtgggcttttcttctgagtctctacgctcaccgatacagggcggacttcgccgacattagcatactttccgacttttag

SEQ ID NO: 195345 - DNA, 111 bp, Artificial Sequence
  derived and/or modified sequence
atgtacatgcaggactactggcggacctggctgaagggcctgcgggggttcttcttcgtgggagttctgttctcagcagtctccatcgccgccttctgtaccttcttgtag

SEQ ID NO: 195346 - DNA, 51 bp, Artificial Sequence
  derived and/or modified sequence
atgtacatgcaggactactggcggacctggctgaagggcctgcgggggtag

SEQ ID NO: 195347 - DNA, 453 bp, Artificial Sequence
  derived and/or modified sequence
atggctccatctagactgcagctgggcctccgggcagcttacagcggcatcagctcagtcgcaggcttctctatatttctcgtgtggaccgtggtttataggcaaccgggtaccgccgcaatgggagggttagcaggcgtactggctctgtgggtcctggtgacccatgtcatgtacatgcaggactattggcggacttggctgaagggcttgagaggcttcttctttgtaggggtcctgttctctgctgtgtccattgcggctttttgtacttttctcgtgctcgctatcactcgccatcagtctctgactgaccctacaagctactatctcagctcggtatggtccttcatttctttcaagtgggcctttttgctgtctctacccaagtgctgggactataggtgcgagccgccttgcccggcttggatctgtttcctttcaacgcagtag

SEQ ID NO: 195348 - DNA, 441 bp, Artificial Sequence
  derived and/or modified sequence
atggccccttccagattacagctcggattacgggcagcatacagcggcatcagcagtgtcgccggattctcaatcttcctggtgtggacggtcgtgtatcggcagccgggtaccgccgctatgggcggacttgcaggagtgctggccctgtgggtgctggtgacacacgtcatgtacatgcaagattactggcggacttggctcaagggattgaggggttttttctttgtgggtgtcctgttctctgccgtctcgatcgccgcattttgcacattccttgtgctggccataacccgacaccagtccctcacagaccctacatcctactacttgagctctgtctggtcttttataagttttaaatgggctttcctactcagcctctacgctcatagataccgcgcagactttgcagatatctcaattctttccgacttctag

SEQ ID NO: 195349 - DNA, 270 bp, Artificial Sequence
  derived and/or modified sequence
atgtatatgcaggactactggcggacttggctgaaaggcctgcgcggattcttcttcgtgggggtgttgttctcggcagtgagtatcgccgcattttgcacattcctggtgctggccatcactagacaccaaagcttaacagatcccacctcctactatctgtccagcgtgtggagtttcatctcttttaagtgggcctttctcctctcgttgtacgctcacagatacagagccgatttcgctgacatctcaattctgagcgacttttag

SEQ ID NO: 195350 - DNA, 270 bp, Artificial Sequence
  derived and/or modified sequence
atgtatatgcaagattattggcggacctggttgaaaggcctgcgcggtttcttttttgttggggtactgttttctgccgttagtatcgccgcattttgcactttccttgtgctcgctatcacacgtcatcagtccttaaccgacccaacttcatattacttgtcgtcagtctggtcttttattagcttcaaatgggcctttcttctgagcttatacgctcataggtatagggccgattttgctgacatatccatcctgtccgacttctag

SEQ ID NO: 195351 - DNA, 111 bp, Artificial Sequence
  derived and/or modified sequence
atgtatatgcaagactattggcgaacgtggctgaaggggctgagaggcttcttttttgttggcgtcttatttagcgccgtttccatagccgctttctgcacatttctctag

SEQ ID NO: 195352 - DNA, 51 bp, Artificial Sequence
  derived and/or modified sequence
atgtatatgcaggactactggcggacttggctcaaagggctgcggggatag

SEQ ID NO: 195353 - DNA, 951 bp, Artificial Sequence
  derived and/or modified sequence
gcgctcgccctcggcccgcccggcgccgcagccccatggccccgtccaggctgcagctcggcctccgcgccgcctactccggcatcagctccgtggccggcttctccatcttcctcgtctggacggtggtctaccgacagccggggaccgcggccatgggagggctcgcaggggtgctggcactgtgggtcctggtgacgcacgtgatgtacatgcaagattattggaggacctggctcaaggggctgcgcggcttcttcttcgtgggcgtcctcttctcggccgtctccatcgctgccttctgcaccttcctcgtgctggccatcacccggcatcagagcctcacagaccccaccagctactacctctccagcgtctggagcttcatttccttcaagtgggccttcctgctcagccttccaaagtgctgggattataggtgtgagccaccgtgcccggcctggatctgttttcttagcacgcagtgaggaatctttgtacttaaggccagggcaacaaagtcaagaggtcaaggtgtagggccatgaggcctggacctatgctgcaggcaagggtttccatccccgctgccctaggcactctcttcccaaggccaggttgggcacctggggaggtcagttcagaaatatctagcagagacctcttaaacccccatcccagcaccccatcctgttgttcccagagctggtctcccatgagtgtgctagagccagatagccgtggccccccacccatctcactcacacacacaggcatccatacaccccagaagacttcccaaatgaggccagactcagggtcacggggaatgtgcttctgcccctgtaagggctttggggaagggggcaacatagtagaggctggaaagagcccccaaacctgtacccatgcccctccagccctgcgtttccattctgccttctcagagtg

SEQ ID NO: 195354 - DNA, 3010 bp, Artificial Sequence
  derived and/or modified sequence
gctctggcggctcccgcggctccggctggcggcttcgggccctgcacctgtgactctcggccgcgctcgccctcggcccgcccggcgccgcagccccatggccccgtccaggctgcagctcggcctccgcgccgcctactccggcatcagctccgtggccggcttctccatcttcctcgtctggacggtggtctaccgacagccggggaccgcggccatgggagggctcgcaggggtgctggcactgtgggtcctggtgacgcacgtgatgtacatgcaagattattggaggacctggctcaaggggctgcgcggcttcttcttcgtgggcgtcctcttctcggccgtctccatcgctgccttctgcaccttcctcgtgctggccatcacccggcatcagagcctcacagaccccaccagctactacctctccagcgtctggagcttcatttccttcaagtgggccttcctgctcagcctctatgcccaccgctaccgggctgactttgctgacatcagcatcctcagcgatttctgacccagggggtgaggtctctgcaccctgggggggccttaggacctggactcagcctctgagatgttgggagaggctactcccaccccctggtgaccccagaactgtggcagaaaatacacagcaggacgagtgtggtctcccaggaagctgtcctgcccgtcccctttcgaggaaacctgagtgtggtagagaggggatcctgccatgttgctcctcatcagcctggccagagggcagctttagaccttttcaaatgaatctgttttcttttctttcttttttttttcttttttttttttttttgagatggagtcttactctgtcacccaggctggagtgcagtagtgcgatctcagctcactgcaacctccgcctcccaggttcaagcaattctcctgccttggcctctcaagtagctgggattacaggcatctgccaccatgcccggcaaatttttgtgtttttagtagagacagggttttgccatgttggccaggctggtctcgaactcctgatctcaggtgattcacccgcctcagccttccaaagtgctgggattataggtgtgagccaccgtgcccggcctggatctgttttcttagcacgcagtgaggaatctttgtacttaaggccagggcaacaaagtcaagaggtcaaggtgtagggccatgaggcctggacctatgctgcaggcaagggtttccatccccgctgccctaggcactctcttcccaaggccaggttgggcacctggggaggtcagttcagaaatatctagcagagacctcttaaacccccatcccagcaccccatcctgttgttcccagagctggtctcccatgagtgtgctagagccagatagccgtggccccccacccatctcactcacacacacaggcatccatacaccccagaagacttcccaaatgaggccagactcagggtcacggggaatgtgcttctgcccctgtaagggctttggggaagggggcaacatagtagaggctggaaagagcccccaaacctgtacccatgcccctccagccctgcgtttccattctgccttctcagagtgcccttgctgcacccagaccaccggccaggagagaccttctctcccactccagcccctctcactgcccttcaactagagctttcacctttttacatttcccttctgaaggacacaaatctgcttttctgcccatacactggcccaagggctcacctaacttgggagggaaggggctgttggtacaaggatgattttctgttagactgccattttgcacggtctcccccttcccatctgatgtgtcctgcccctcagctctttgccttatctgtgtcactgtcactttagcaaaaatacagcggccatttgtatcagcctctggtggttgcttgtgaggtgggactcttgcgggaacaggtggactttgggaggagtgggcagggagggagtggtagtggcagttctcgagctatctgattaagccattccgctagttcagttgtgccctggagggcaggggacagagtcagtatctctggggctgcaggccctcttgccttggccctcctggcatggggtaaccaccagctcagctctcctcctccagctttcctctctctagcacaccccagccagggcaaggatgcccacgggcatagctacagcaacccctgcgggatttggtgtccacacccgagaggccaggccagatgggaaagggattagcgcctcttccctcacactctgccaggctgccaggagcttgggccaggtctaaggtaatgaggtgctcctcttcctgctggaaaaaccggacagactcagaaccacaaaggcaggtgctgccagcctggcgccttcctctctgcttaggctgggtgagcttgtccaggcctgtgcctcaccccttctctcttctaggctcagtgtatgcttaatcaggcatggtgcatcagagcgggaaggagccatcaacagtgtatacttctggagccttctactgataaacagaggccccagaagacgatttgacttacctgagctcccagctgggacttaaacccaggtgtgtctgagtcacaactcttcggggatgccgtggtgagctggggctgagctcctgtattcccactcccccaccccacccccactcctgccatatcagggctggtctctgtggactcagcccagggctgcctcctctttgtcaccccaaagtggggcagccagggacagccagggtgtgttcagaatgggttcttcctgcagggcaggaagggcagattgttaaaggggctgcggcccagaccaccctggtccctcctccggcagtgactcagacccacactgtgccgtgcagctgtgtgccctgcacacccgcttgacggcgcactgctcacttctggggggccctttcagaggcacttttaaagcaaataaaacatttattgttcaga

SEQ ID NO: 195355 - DNA, 1024 bp, Artificial Sequence
  derived and/or modified sequence
gggaaaaggaggaagagggagttaaggtatatgatgggcctccccatgtggatccttagtgctgtggcagagcccttgttattgtgctgggattttccctccagctcccggccggaagctgggctcacgtgggagctcagtgccctcctgctacagatctgtctcttccttacaatggggtgctggcactgtgggtcctggtgacgcacgtgatgtacatgcaagattattggaggacctggctcaaggggctgcgcggcttcttcttcgtgggcgtcctcttctcggccgtctccatcgctgccttctgcaccttcctcgtgctggccatcacccggcatcagagcctcacagaccccaccagctactacctctccagcgtctggagcttcatttccttcaagtgggccttcctgctcagcctctatgcccaccgctaccgggctgactttgctgacatcagcatcctcagcgatttctgacccagggggctcagtgtatgcttaatcaggcatggtgcatcagagcgggaaggagccatcaacagtgtatacttctggagccttctactgataaacagaggccccagaagacgatttgacttacctgagctcccagctgggacttaaacccaggtgtgtctgagtcacaactcttcggggatgccgtggtgagctggggctgagctcctgtattcccactcccccaccccacccccactcctgccatatcagggctggtctctgtggactcagcccagggctgcctcctctttgtcaccccaaagtggggcagccagggacagccagggtgtgttcagaatgggttcttcctgcagggcaggaagggcagattgttaaaggggctgcggcccagaccaccctggtccctcctccggcagtgactcagacccacactgtgccgtgcagctgtgtgccctgcacacccgcttgacggcgcactgctcacttctggggggccctttcagaggcacttttaaagcaaataaaacatttattgttca

SEQ ID NO: 195356 - DNA, 751 bp, Artificial Sequence
  derived and/or modified sequence
gccgtgcaggctctagcaaaaggctggggggtccccagcgacccccatcagctttgataaggggatccggagggtgccagtgggtcatctgctgtgtccacacattaagaaacgctggtggagttttaaatgcctctccggggaaggaggaaagcctgagaatgaatctgacctcagacccaaatccattcaacggagttctggtaatttggaagaaggaagagcaacctggaaactgacaggaaaggatgacaagttgggagtcacaggtatatgatgggcctccccatgtggatccttagtgctgtggcagagcccttgttattgtgctgggattttccctccagctcccggccggaagctgggctcacgtgggagctcagtgccctcctgctacagatctgtctcttccttacaatggggtgctggcactgtgggtcctggtgacgcacgtgatgtacatgcaagattattggaggacctggctcaaggggctgcgcggcttcttcttcgtgggcgtcctcttctcggccgtctccatcgctgccttctgcaccttcctcgtgctggccatcacccggcatcagagcctcacagaccccaccagctactacctctccagcgtctggagcttcatttccttcaagtgggccttcctgctcagcctctatgcccaccgctaccgggctgactttgctgacatcagcatcctcagcgatttctgacccagggggtgaggtctctgcaccct

SEQ ID NO: 195357 - DNA, 618 bp, Artificial Sequence
  derived and/or modified sequence
aggtcagagaatggccctagtccatgagcactgaggaagggactttaaggaatccctctcattttgacaaggaaagcaaaagcccagagagatcacacaactatttagaaaggtaggaacagaaagagctgtcttcagacttcttctctgggaggttgatgggttttccccttggctttcgaagagggaggtctggcctcaataactggcagtgctgtcttcctgggactcgggctccaccccttcaccatgggcgtgcatgctcacagctggcactcattccctcacggaagccttccctgggctaaaggcatcatcaagaggtatatgatgggcctccccatgtggatccttagtgctgtggcagagcccttgttattgtgctgggattttccctccagctcccggccggaagctgggctcacgtgggagctcagtgccctcctgctacagatctgtctcttccttacaatggggtgctggcactgtgggtcctggtgacgcacgtgatgtacatgcaagattattggaggacctggctcaaggggctgcgcggcttcttcttcgtgggcgtcctcttctcggccgtctccatcgctgccttctgcaccttcctcg

SEQ ID NO: 195358 - protein, 189 aa, Artificial Sequence
  derived and/or modified sequence
MQRTGGGAPRPGRNHGLPGSLRQPDPVALLMLLVDADQPEPMRSGARELALFLTPEPGAEAKEVEETIEGMLLRLEEFCSLADLIRSDTSQILEENIPVLKAKLTEMRGIYAKVDRLEAFVKMVGHHVAFLEADVLQAERDHGAFPQALRRWLGSAGLPSFRNLECSGAILAHCNLRLSGSSDSPASAS

SEQ ID NO: 195359 - protein, 211 aa, Artificial Sequence
  derived and/or modified sequence
MQRTGGGAPRPGRNHGLPGSLRQPDPVALLMLLVDADQPEPMRSGARELALFLTPEPGAEAKEVEETIEGMLLRLEEFCSLADLIRSDTSQILEENIPVLKAKLTEMRGIYAKVDRLEAFVKMVGHHVAFLEADVLQAERDHGAFPQALRRWLGSAGLPSFRNVECSGTIPARCNLRLPGSSDSPASASQVAGITEVTCTGARDVRAAHTV

SEQ ID NO: 195360 - DNA, 570 bp, Artificial Sequence
  derived and/or modified sequence
atgcagcgtactggaggaggagcgccgaggcctggacggaatcatggcttaccagggtcattacgtcagcccgatcccgttgcgctactcatgctgctggtcgatgccgaccagcccgagccaatgcggagtggtgcccgggaactcgccctgtttcttacccctgagccaggtgcagaagcgaaggaggtcgaagagacgatcgagggtatgctcctccgcttggaagaattctgttctctagcagatcttatcagatccgacacctcccaaatactggaggagaatataccagtgcttaaagctaaactcaccgaaatgaggggaatttatgccaaggttgaccgactggaggccttcgtcaaaatggttggccaccacgtggctttcttggaagcagacgtgctacaagccgaacgggatcatggggctttcccacaggctctgagaagatggctgggatccgctggcttaccctcgttccgcaatttggagtgctctggagccatacttgcccactgcaaccttagattgtccggctcctcagatagccccgcaagcgcctcttag

SEQ ID NO: 195361 - DNA, 636 bp, Artificial Sequence
  derived and/or modified sequence
atgcaaaggacaggcgggggagctcccagacccgggagaaatcacgggctgcccggatccttaaggcagccagatccagtggccttactcatgcttctggtggatgccgaccaacccgagccgatgcgcagcggagccagagagttagctctgttcttgacccctgagccaggcgcagaagctaaggaagttgaagagacaatcgaaggcatgctgctgaggttagaagagttctgtagccttgccgacctcattcggtctgatactagtcagattttagaagagaacatccccgtccttaaggcgaaactaacggagatgcgagggatctacgccaaagtggataggcttgaggcttttgtaaagatggtggggcaccacgtggcattcctggaggccgatgttcttcaggcagaacgagaccacggagccttcccccaagcgctccgaagatggctcggctctgcaggcttgccgtcctttcgaaacgtcgagtgctcaggcacgatacccgctcggtgcaacctgagacttcctggcagctcagactcacccgcaagcgctagccaggtcgccggcattaccgaggtcacatgtaccggagctagagacgttagggcggcccacactgtctag

SEQ ID NO: 195362 - DNA, 570 bp, Artificial Sequence
  derived and/or modified sequence
atgcagaggactggaggaggagcccccaggcctggaagaaatcatggcctgcccggcagcctgcggcagcctgaccctgtggccctgctgatgctgctggtggatgctgaccagcctgagcccatgaggtctggggcccgggagctggccctcttcctgaccccagagcctggagctgaggccaaggaggtggaggagaccatcgagggcatgctgctgcggctggaggagttctgcagcctggccgacctgatccgcagtgacaccagccagatcctggaggagaacatccctgtgctgaaggccaagctgacagagatgaggggcatctatgccaaggtggaccggctggaggcctttgtgaagatggtgggccaccacgtggccttcctggaggctgatgtgctgcaggccgagcgggaccacggggccttcccccaggccctgcggcgctggctgggcagcgctggcctgcccagcttcaggaacctggagtgcagcggggccatcctggcccactgcaacctgcggctgagcggcagcagtgacagccctgccagcgccagctag

SEQ ID NO: 195363 - DNA, 636 bp, Artificial Sequence
  derived and/or modified sequence
atgcagaggactggaggaggagcccccaggcctggaagaaatcatggcctgcccggcagcctgcggcagcctgaccctgtggccctgctgatgctgctggtggatgctgaccagcctgagcccatgaggtctggggcccgggagctggccctcttcctgaccccagagcctggagctgaggccaaggaggtggaggagaccatcgagggcatgctgctgcggctggaggagttctgcagcctggccgacctgatccgcagtgacaccagccagatcctggaggagaacatccctgtgctgaaggccaagctgacagagatgaggggcatctatgccaaggtggaccggctggaggcctttgtgaagatggtgggccaccacgtggccttcctggaggctgatgtgctgcaggccgagcgggaccacggggccttcccccaggccctgcggcgctggctgggcagcgctggcctgcccagcttcagaaatgtggagtgcagcggcaccatcccagcccgctgcaacctgcggctgcccggcagcagtgacagccctgccagcgccagccaggtggccggcatcacagaggtgacctgcaccggggccagagatgtgcgggccgcccacacagtgtag

SEQ ID NO: 195364 - DNA, 570 bp, Artificial Sequence
  derived and/or modified sequence
atgcagcggaccggcggcggcgccccccggcccggccggaaccacgggttgcccggcagtctgcgacaaccagacccagttgccctgcttatgctgttggtcgacgccgaccaacccgagcccatgagatcaggggccagagagcttgccctgttcctaactccagaaccaggtgccgaagccaaggaagtagaggagactatcgagggaatgctgcttcgtcttgaggagttttgctcactggctgacctgatccgctcggacacttcccaaattctggaggaaaacatacctgtcctgaaagcaaaactgactgaaatgagggggatttacgcgaaagttgataggttggaagccttcgtcaagatggtggggcaccacgttgcctttttagaagccgacgtgctacaggccgaaagggatcacggagcttttccacaggctctgcggcgctggctcggatctgcaggactgccctcgttcaggaacctcgagtgtagcggtgccatcttagcacactgcaacctgaggctctccggctcttcagactctcctgctagcgctagctag

SEQ ID NO: 195365 - DNA, 636 bp, Artificial Sequence
  derived and/or modified sequence
atgcagcggaccggcggcggcgccccccggcccggccggaaccacggcttgcccgggtccctgcggcagcccgatccggttgcgctgttgatgttgttagtcgatgccgatcagcccgagcctatgaggagcggcgctcgcgagcttgccctattcctcacccctgaacccggcgctgaagccaaagaggtcgaagagacaattgaggggatgttactgcggctggaggagttctgctccctggccgatcttatacgatctgataccagtcagatcctggaagagaatattccagtattgaaggccaaattgacggaaatgaggggtatatatgctaaagttgatcgcctggaggcgttcgtcaagatggtggggcaccacgtggcgttcctcgaagctgacgtgctacaagccgagagggaccatggagccttcccacaggccttacggcggtggctgggtagcgcaggacttccaagctttcggaatgtggagtgttcagggactatcccggcaagatgcaacctcaggctgccggggtcctcggactctccggctagtgcatcgcaggtcgctggaattaccgaagtaacctgtaccggtgcaagagatgtgcgcgcagctcataccgtatag

SEQ ID NO: 195366 - DNA, 570 bp, Artificial Sequence
  derived and/or modified sequence
atgcagcgcacagggggaggagccccaaggcccggacggaatcatggcctccctggatctctgcggcagccggaccccgtggcactgttgatgctgctggtagacgcagaccaaccagaacccatgagaagtggtgcgagggagctcgcactcttcctcacacccgagcccggtgctgaggcgaaggaagtggaagagaccatagaagggatgctcctgcgccttgaagagttctgcagcctggctgacctaattagaagcgacacatcccagattttggaagaaaacatcccagtgctgaaagctaagcttaccgagatgaggggcatctacgctaaggttgatagacttgaggccttcgttaagatggtgggtcatcatgtggctttccttgaagcagacgtattgcaggccgaaagagaccatggagcatttccccaggccctgcggagatggttgggttcagcagggttaccttctttccgcaatctagagtgtagtggagccattctggcccattgcaatttgagactgagtgggtctagtgattctcccgcaagcgcctcttag

SEQ ID NO: 195367 - DNA, 636 bp, Artificial Sequence
  derived and/or modified sequence
atgcagcggacgggcggtggagcacctcggccaggcaggaaccatggtttgcctggatcgctccgccagcctgaccccgtcgccttgctcatgttgctggtggatgcagaccagccagaaccaatgcgaagcggtgctagagagcttgcattattcctgacgcctgagcctggggcagaggccaaggaggtggaggagacaatcgagggcatgctactgcggttagaagagttttgtagtctcgcggatctgattaggtccgacacttctcagatccttgaggagaatatcccagttctgaaggctaagctaaccgagatgagagggatctatgcgaaggtggatcggcttgaagctttcgttaagatggtcggtcatcacgtggcattcttagaagctgacgtgcttcaggcggaaagggatcacggggcatttcctcaggccctgcggcgttggctcggatctgcagggctgccctccttcaggaatgttgagtgctccggcacaattcccgcaaggtgcaacctccggctaccaggtagttccgacagccccgcaagtgcatcacaggtagccggtataactgaagtgacatgcacaggcgctcgggacgtgagagctgctcacacagtttag

SEQ ID NO: 195368 - DNA, 634 bp, Artificial Sequence
  derived and/or modified sequence
ggagctgcgagccgcgaccgccgggagcgcacctgccccgcctccgccaggcggtccgcggggcatgcagcggaccgggggcggggctccgaggcccgggcgcaaccacgggctcccaggcagcctccgccagccggaccccgtcgccctcctgatgctgctcgtggacgctgatcagccggagcccatgcgcagcggggcgcgcgagctcgcgctcttcctgacccccgagcctggggccgaggcgaaggaggtggaggagaccatcgagggcatgctcctcaggctggaagagttttgcagcctggctgacctgatcaggagtgatacttcacagatcctggaggaaaacatcccagtccttaaggccaaactgacagaaatgcgtggcatctatgccaaagtggaccggctagaggccttcgtcaagatggttggacaccacgtcgccttcctggaagcagacgtgcttcaggctgagcgggaccatggggccttccctcaggccctgcggaggtggctgggatccgcagggctcccctccttcaggaacctggagtgcagtggtgcaatcttggctcactgcaacctccgcctctcgggttcaagcgattctcctgcctcagcctcctga

SEQ ID NO: 195369 - DNA, 1378 bp, Artificial Sequence
  derived and/or modified sequence
cactgggtggcgctgcccgctcggcccggcgctcctggagctgcgagccgcgaccgccgggagcgcacctgccccgcctccgccaggcggtccgcggggcatgcagcggaccgggggcggggctccgaggcccgggcgcaaccacgggctcccaggcagcctccgccagccggaccccgtcgccctcctgatgctgctcgtggacgctgatcagccggagcccatgcgcagcggggcgcgcgagctcgcgctcttcctgacccccgagcctggggccgaggcgaaggaggtggaggagaccatcgagggcatgctcctcaggctggaagagttttgcagcctggctgacctgatcaggagtgatacttcacagatcctggaggaaaacatcccagtccttaaggccaaactgacagaaatgcgtggcatctatgccaaagtggaccggctagaggccttcgtcaagatggttggacaccacgtcgccttcctggaagcagacgtgcttcaggctgagcgggaccatggggccttccctcaggccctgcggaggtggctgggatccgcagggctcccctccttcaggaacgtggagtgcagtggcacaatcccagctcgctgcaacctccgcctcccgggttcaagtgattctcctgcctccgcctcccaagtagctgggattacagaagtcacctgcaccggtgcccgtgacgtacgagctgcccacactgtataggacggaggactattttcctgtggacgccggggaagcacagcaccacccccgcacctgccctcggcctttgtgagctttgtggtcttcccatcaggaacgctggaaagtgacattgtgtacacactgcagcttgggggttttttctttgtattgctgtttattttatattttaaaaatatttaaaaaaatgtcgagatggggtctcactatgttgtccagactgatctcaaactcctgggctcaagtgatccacccaccttggccttccaaagtggtgggattatgggcaggagcctccgtgcccaggctgctgccattttcaaatttcctccctgcctcatgtgagaccacagggtttggagaagcagttggaacccacgtgtggtgatgcctcccacatcggcctgcttggggttctacaggggttgagggaccaggcctggccggggctgatggacagtggggactttccttctctccatgatggctttgcaggggctccatggtccttctctctgtgatgggtttttgcacggggtgtgctctgccactgtggtgggtgggtggatgctgcttctgttgcctccagacctcggtgcccacagccttgaggatccttccaataaaggtgtcaagagctca

SEQ ID NO: 195370 - DNA, 570 bp, Artificial Sequence
  derived and/or modified sequence
atgcagagaaccggcggcggcgcccccagacccggcagaaaccacggcctgcccggcagcctgagacagcccgaccccgtggccctgctgatgctgctggtggacgccgaccagcccgagcccatgagaagcggcgccagagagctggccctgttcctgacccccgagcccggcgccgaggccaaggaggtggaggagaccatcgagggcatgctgctgagactggaggagttctgcagcctggccgacctgatcagaagcgacaccagccagatcctggaggagaacatccccgtgctgaaggccaagctgaccgagatgagaggcatctacgccaaggtggacagactggaggccttcgtgaagatggtgggccaccacgtggccttcctggaggccgacgtgctgcaggccgagagagaccacggcgccttcccccaggccctgagaagatggctgggcagcgccggcctgcccagcttcagaaacctggagtgcagcggcgccatcctggcccactgcaacctgagactgagcggcagcagcgacagccccgccagcgccagctag

SEQ ID NO: 195371 - DNA, 636 bp, Artificial Sequence
  derived and/or modified sequence
atgcagagaaccggcggcggcgcccccagacccggcagaaaccacggcctgcccggcagcctgagacagcccgaccccgtggccctgctgatgctgctggtggacgccgaccagcccgagcccatgagaagcggcgccagagagctggccctgttcctgacccccgagcccggcgccgaggccaaggaggtggaggagaccatcgagggcatgctgctgagactggaggagttctgcagcctggccgacctgatcagaagcgacaccagccagatcctggaggagaacatccccgtgctgaaggccaagctgaccgagatgagaggcatctacgccaaggtggacagactggaggccttcgtgaagatggtgggccaccacgtggccttcctggaggccgacgtgctgcaggccgagagagaccacggcgccttcccccaggccctgagaagatggctgggcagcgccggcctgcccagcttcagaaacgtggagtgcagcggcaccatccccgccagatgcaacctgagactgcccggcagcagcgacagccccgccagcgccagccaggtggccggcatcaccgaggtgacctgcaccggcgccagagacgtgagagccgcccacaccgtgtag

SEQ ID NO: 195372 - DNA, 2154 bp, Artificial Sequence
  derived and/or modified sequence
atggagggcgcccacgccagcctgagcctggaggacgaggtgagcggcgccggcagcagacagagacccctggagggcaagggcggcgagacccccgccgccgaggagcccggcagcctgaagaactacgccgtgttcgccaccagagacgtgagcgccgcccccgagaaggaggaggaggaggccgagggccccctgagagcccaggacctgagagagagctacatccagctggtgcagggcgtgcaggagtggcaggacggctgcatgtaccagggcgagttcggcctgaacatgaagctgggctacggcaagttcagctggcccaccggcgagagctaccacggccagttctacagagaccactgccacggcctgggcacctacatgtggcccgacggcagcagcttcaccggcaccttctacctgagccacagagagggctacggcaccatgtacatgaagaccagactgttccagacccactgccacaacgacatcgtgaacctgctgctggactgcggcgccgacgtgaacaagtgcagcgacgagggcctgaccgccctgagcatgtgcttcctgctgcactaccccgcccagagcttcaagcccaacgtggccgagagaaccatccccgagccccaggagccccccaagttccccgtggtgcccatcctgagcagcagcttcatggacaccaacctggagagcctgtactacgaggtgaacgtgcccagccagggcagctacgagctgagacccccccccgcccccctgctgctgcccagagtgagcggcagccacgagggcggccacttccaggacaccggccagtgcggcggcagcatcgaccacagaagcagcagcctgaagggcgacagccccctggtgaagggcagcctgggccacgtggagagcggcctggaggacgtgctgggcaacaccgacagaggcagcctgtgcagcgccgagaccaagttcgagagcaacgtgtgcgtgtgcgacttcagcatcgagctgagccaggccatgctggagagaagcgcccagagccacagcctgctgaagatggccagccccagcccctgcaccagcagcttcgacaagggcaccatgagaagaatggccctgagcatgatcgagagaagaaagagatggagaaccatcaagctgctgctgagaagaggcgccgaccccaacctgtgctgcgtgcccatgcaggtgctgttcctggccgtgaaggccggcgacgtggacggcgtgagactgctgctggagcacggcgccagaaccgacatctgcttccccccccagctgagcaccctgacccccctgcacatcgccgccgccctgcccggcgaggagggcgtgcagatcgtggagctgctgctgcacgccatcaccgacgtggacgccaaggccagcgacgaggacgacacctacaagcccggcaaggtggtgaaggagctgctgacccagggcgccgaccccaacctgcccctgaccaagggcctgggcagcgccctgtgcgtggcctgcgacctgacctacgagcaccagagaaacatggacagcaagctggccctgatcgacagactgatcagccacggcgccgacatcctgaagcccgtgatgctgagacagggcgagaaggaggccgtgggcaccgccgtggactacggctacttcagattcttccaggacagaagaatcgccagatgccccttccacaccctgatgcccgccgagagagagaccttcctggccagaaagagactgctggagtacatgggcctgcagctgagacaggccgtgttcgccaaggagagccagtgggaccccacctggctgtacctgtgcaagagagccgagctgatccccagccacagaatgaagaagaagggccccagcctgcccagaggcctggacgtgaaggagcagggccagatccccttcttcaagttctgctaccagtgcggcagaagcatcggcgtgagactgctgccctgccccagatgctacggcatcctgacctgcagcaagtactgcaagaccaaggcctggaccgagttccacaagaaggactgcggcgacctggtggccatcgtgacccagctggagcaggtgagcagaagaagagaggagttccagtag

SEQ ID NO: 195373 - DNA, 1320 bp, Artificial Sequence
  derived and/or modified sequence
atggagggcgcccacgccagcctgagcctggaggacgaggtgagcggcgccggcagcagacagagacccctggagggcaagggcggcgagacccccgccgccgaggagcccggcagcctgaagaactacgccgtgttcgccaccagagacgtgagcgccgcccccgagaaggaggaggaggaggccgagggccccctgagagcccaggacctgagagagagctacatccagctggtgcagggcgtgcaggagtggcaggacggctgcatgtaccagggcgagttcggcctgaacatgaagctgggctacggcaagttcagctggcccaccggcgagagctaccacggccagttctacagagaccactgccacggcctgggcacctacatgtggcccgacggcagcagcttcaccggcaccttctacctgagccacagagagggctacggcaccatgtacatgaagaccagactgttccagacccactgccacaacgacatcgtgaacctgctgctggactgcggcgccgacgtgaacaagtgcagcgacgagggcctgaccgccctgagcatgtgcttcctgctgcactaccccgcccagagcttcaagcccaacgtggccgagagaaccatccccgagccccaggagccccccaagttccccgtggtgcccatcctgagcagcagcttcatggacaccaacctggagagcctgtactacgaggtgaacgtgcccagccagggcagctacgagctgagacccccccccgcccccctgctgctgcccagagtgagcggcagccacgagggcggccacttccaggacaccggccagtgcggcggcagcatcgaccacagaagcagcagcctgaagggcgacagccccctggtgaagggcagcctgggccacgtggagagcggcctggaggacgtgctgggcaacaccgacagaggcagcctgtgcagcgccgagaccaagttcgagagcaacgtgtgcgtgtgcgacttcagcatcgagctgagccaggccatgctggagagaagcgcccagagccacagcctgctgaagatggccagccccagcccctgcaccagcagcttcgacaagggcaccatgagaagaatggccctgagcatgatcgagagaagaaagagatggagaaccatcaagctgctgctgagaagaggcgccgaccccaacctgtgctgcgtgcccatgcaggtgctgttcctggccgtgaaggccggcgacgtggacggcgtgagactgctgctggagcacggcgccagaaccgacatctgcttccccccccagtgctag

SEQ ID NO: 195374 - DNA, 1020 bp, Artificial Sequence
  derived and/or modified sequence
atgagagacgtgagcgccgcccccgagaaggaggaggaggaggccgagggccccctgagagcccaggacctgagagagagctacatccagctggtgcagggcgtgcaggagtggcaggacggctgcatgtaccagggcgagttcggcctgaacatgaagctgggctacggcaagttcagctggcccaccggcgagagctaccacggccagttctacagagaccactgccacggcctgggcacctacatgtggcccgacggcagcagcttcaccggcaccttctacctgagccacagagagggctacggcaccatgtacatgaagaccagactgttccagacccactgccacaacgacatcgtgaacctgctgctggactgcggcgccgacgtgaacaagtgcagcgacgagggcctgaccgccctgagcatgtgcttcctgctgcactaccccgcccagagcttcaagcccaacgtggccgagagaaccatccccgagccccaggagccccccaagttccccgtggtgcccatcctgagcagcagcttcatggacaccaacctggagagcctgtactacgaggtgaacgtgcccagccagggcagctacgagctgagacccccccccgcccccctgctgctgcccagagtgagcggcagccacgagggcggccacttccaggacaccggccagtgcggcggcagcatcgaccacagaagcagcagcctgaagggcgacagccccctggtgaagggcagcctgggccacgtggagagcggcctggaggacgtgctgggcaacaccgacagaggcagcctgtgcagcgccgagaccaagttcgagagcaacgtgtgcgtgtgcgacttcagcatcgagctgagccaggccatgctggagagaagcgcccagagccacagcctgctgaagatggccagccccagcccctgcaccagcagcttcgacaagggcaccatgagaagaatggccctgagcatgatcgagagctgcagcctgctgtag

SEQ ID NO: 195375 - DNA, 2154 bp, Artificial Sequence
  derived and/or modified sequence
atggagggcgcccatgcatccctgagcctggaggatgaagtgagtggcgctggctcccggcagcggccactggaagggaaaggcggtgagacccccgccgccgaagaacctggcagtctgaagaactatgccgtatttgctacacgcgatgtgagcgctgccccagaaaaagaagaggaagaggctgaggggccactgcgcgcccaggacctgcgggaaagctacatccagttagtgcagggagtgcaggagtggcaagatggttgcatgtaccagggagagttcggattaaatatgaaactgggctatggcaaattctcatggccaactggcgagagttaccacggccagttctaccgagatcactgccatggattggggacatatatgtggcccgacggatcgtcattcacaggaaccttctatctgtcccacagagagggatacggcactatgtatatgaaaaccaggctttttcagactcattgccataatgatattgtgaatctgttgctcgactgcggagccgacgtgaacaagtgctctgacgaaggcctgacagctctgtccatgtgcttccttctccattatcctgcgcaatcatttaaaccaaacgtggctgagcggacaataccagaaccacaggagcctcctaagtttccagtcgtcccaattctgtcgagcagctttatggataccaatcttgagtctttgtactatgaggtgaacgtgccctctcagggcagctatgaactgcgcccccctccagcccctttgttgctcccacgcgtttccggttctcacgaaggggggcacttccaggatactggccaatgtggagggagtatcgaccaccgctcatccagcctcaagggagattcacccctagtgaagggaagtctaggtcacgtcgaatcaggccttgaggatgtgctggggaacaccgataggggaagtctatgttccgccgagaccaaatttgagagtaatgtgtgtgtctgtgattttagtattgagctgtcccaggcaatgctggaacggagcgctcaatctcattctctgttaaaaatggcttccccttcaccctgtacaagcagcttcgacaagggcacaatgaggcgcatggcactgagcatgatcgagaggcgcaagcggtggaggactattaagttgttgctccgaagaggggcagaccccaacctgtgctgcgtccccatgcaggtgctctttctcgcagtgaaggcgggcgacgttgacggcgtccgccttctgttggaacatggtgccagaactgacatatgttttccaccccagctgagtacactcacacctttacatattgccgccgccctgcccggggaggaaggtgtgcagattgtggagctgctattgcacgccatcactgacgtggatgccaaggcatccgacgaggacgatacgtacaagcctgggaaggttgtaaaagagcttttaacccagggcgctgatcctaatctgcccctgactaaaggacttggtagcgccctgtgcgttgcctgtgatttaacttatgaacaccagagaaatatggattctaagctggctcttatcgaccggctcatttcccatggcgccgacatactgaagccagtcatgttacgacagggcgaaaaagaagctgtgggcactgctgtcgattacggctactttcgtttcttccaggacagacggatcgcacggtgccccttccacacacttatgccagccgagcgtgaaacgtttctcgctcggaaacgcctgctagaatatatgggactgcagctgagacaggcggtgttcgcaaaagagagtcagtgggaccctacctggctctacctctgcaaacgagccgagttaatccctagtcacaggatgaaaaaaaagggaccgtcattgcctcggggactcgatgtgaaggaacagggtcagatccctttcttcaagttctgctatcagtgcgggaggtccatcggcgtgagacttcttccctgccctcggtgttatgggatcctaacttgctctaagtactgcaagacgaaagcatggacagagtttcataagaaagactgcggggatctggttgccattgtcacgcagctcgagcaggtctcacgccgcagagaagagttccagtag

SEQ ID NO: 195376 - DNA, 1320 bp, Artificial Sequence
  derived and/or modified sequence
atggaaggggctcacgccagtctgagcttagaagacgaagtgagcggggcggggtcaaggcaaagacccctggaaggaaaaggcggggagacccctgctgctgaagagccaggctccctgaagaactacgcagtgttcgctacccgagacgtctcggccgcacccgagaaagaagaggaggaggcagaggggccgcttcgggcacaggacttgcgagagtcctatattcagctggtccagggggtgcaggagtggcaggacgggtgcatgtaccagggggagttcggccttaacatgaagcttggctatggaaaattttcatggcccacaggagaatcttaccacgggcagttctatcgcgatcattgtcacggactgggtacgtacatgtggccagacggatcttcctttacaggcacattctatctgtctcatcgggagggttacggaactatgtacatgaaaactcggctttttcaaacccactgccacaacgatattgtgaatctcctgttagactgtggggctgacgttaacaagtgttctgatgaaggactgactgccctgtccatgtgcttcctcttgcactatccagctcagtccttcaagcctaacgtggctgaacgtacaatcccagagccccaggagccacccaaattccccgtcgttcccatcctcagttcttcattcatggatacaaatcttgagtcactgtattacgaagtgaatgttccctcacagggatcatatgagcttcgcccgccgcccgccccgcttctactgccaagggtttccggttcacacgaaggtgggcattttcaggacaccggccaatgcggagggagcatcgatcaccgcagttccagcctgaaaggagattcgcctctggtcaagggctcacttggccacgtggaaagcggcctggaggacgtgttaggcaatacagataggggctcactgtgcagcgcggaaaccaagtttgaatccaacgtctgtgtctgcgatttttccattgagctgagccaggctatgcttgagcggtcagcgcaaagtcactctcttctgaagatggcgagcccatctccttgcacttcatccttcgacaaaggcacgatgcgcagaatggccctgagtatgatcgagcgccggaaacgctggcggaccataaaactgctgttacgacgcggtgcagacccaaatctttgttgcgtccccatgcaggtgctattcctggccgtcaaggctggcgacgtggacggggtccggctcttgctggaacacggcgctaggactgacatttgcttccccccacagtgttag

SEQ ID NO: 195377 - DNA, 1020 bp, Artificial Sequence
  derived and/or modified sequence
atgagggatgtaagcgccgcccccgagaaggaagaggaggaggccgaggggccattgagggcacaggatctaagggagtcctacatacagcttgtgcaaggtgtgcaagagtggcaggacgggtgcatgtatcagggcgaattcggcctcaatatgaaactcgggtatggcaaatttagttggcccactggtgagtcgtaccatgggcagttttaccgagatcactgtcacggcctggggacctacatgtggcccgatggaagttccttcacaggcacgttttacctgagccaccgagagggttatggcactatgtacatgaagacccgcctatttcaaacacactgtcataacgatatagttaatcttttgctggattgcggtgctgacgtcaataagtgctctgacgaaggcctgactgcccttagtatgtgcttccttctgcattatcctgcccaaagctttaaacctaacgtcgccgagaggacaattccagaaccacaggagcccccaaagttcccagtggtgcccattctatcaagctcatttatggataccaacctggagtccctgtattacgaggtcaacgttccctctcagggctcctacgagcttcgaccgccacccgccccccttctcctaccacgagtgtccggaagccacgaagggggccacttccaggacactggacagtgtggaggatccatagaccacaggtcaagcagtctcaaaggcgactcacctctggtgaaaggttctcttggacatgtggaatccggcttagaggatgttctgggcaatactgaccgtggcagcctatgctctgccgaaacaaaattcgaatccaacgtctgcgtctgcgatttcagcatcgaactgagccaagcgatgttggagcgctcggctcaatcccactcactcctgaaaatggcgtccccgtcgccatgcacgtcttcattcgacaagggaaccatgcgccgcatggccctgtcaatgatcgagagttgttccctactgtag

SEQ ID NO: 195378 - DNA, 1268 bp, Artificial Sequence
  derived and/or modified sequence
aaaggcccgcccacctggaaggccttcgccaggctgaggccgcggtgccgcatgagggatgtttcagcagcccctgagaaggaagaggaggaagctgagggcccgctgagggcgcaggacctgagggagtcctacatccagctcgtccagggtgtgcaggagtggcaggatggttgcatgtaccagggggagtttgggttgaacatgaagcttggatatggcaaattctcttggcccacaggcgagtcataccatgggcagttttaccgggaccactgccatggcctgggtacctacatgtggccagatggctccagtttcacgggcacattttacctcagccaccgagaaggctacggcaccatgtacatgaagacacggcttttccagactcactgccacaacgacattgtcaaccttctcctggactgtggggccgacgtgaacaagtgctcagatgagggtctcacggcactcagcatgtgtttcctcctccactaccccgcccagtccttcaagcccaatgttgctgaacggaccatacctgagccccaggaacctccaaaattcccagttgttccaatcctttcatcatcatttatggacacaaacctggagtctctgtactatgaggtgaacgtgccttcccagggtagctatgagctgaggccaccgccagcaccactgctcctgccacgcgtctcaggcagccacgagggcggccacttccaggacaccgggcagtgtggggggtccatagaccacaggagcagctctctgaagggggactccccgttggtgaagggcagccttggccatgtggaaagcgggcttgaggacgtgttgggaaacacagaccggggcagtctgtgcagtgctgagacgaaatttgagtccaacgtgtgtgtgtgcgacttctccatcgagctctcgcaggccatgctggagagaagcgcccagtcccacagcttgctgaagatggcctcgccctcaccgtgcaccagcagcttcgacaaagggaccatgcggaggatggcgctgtccatgatcgagtcctgttccttgctgtgaaggccggggacgtggatggggtgaggctgctgctggagcacggggcgaggaccgacatctgctttccgccgcagctgagcaccctgacaccactccacatcgctgccgcccttcctggggaggagggggtacagattgtggagctgctgttgcatgccatcaccgatgtggacgccaaggcatccgacgaggacgac

SEQ ID NO: 195379 - DNA, 2154 bp, Artificial Sequence
  derived and/or modified sequence
atggagggcgcccacgccagcctgagcctggaggatgaggtgtctggagctggcagccggcagaggcccctggagggcaaaggaggagagaccccagctgctgaggagcccggcagcctgaagaactatgctgtgtttgccaccagagatgtgtctgctgcccctgagaaggaggaggaggaggccgagggccccctgcgggcccaggacctgcgggagagctacatccagctggtgcagggcgtgcaggagtggcaggacggctgcatgtaccagggcgagtttggcctgaacatgaagctgggctacggcaagttctcctggcccaccggggagagctaccacggccagttctacagagaccactgccacggcctgggcacctacatgtggccagatggcagcagcttcaccggcaccttctacctgagccaccgggagggctacggcaccatgtacatgaagaccaggctcttccagacccactgccacaatgacatcgtgaacctgctgctggactgtggggctgatgtgaacaagtgcagtgatgagggcctgacagccctgtccatgtgcttcctgctgcactacccagcccagagcttcaagcccaacgtggccgagaggaccatccctgagccccaggagccccccaagtttcctgtggtgcccatcctgagcagcagcttcatggacaccaacctggagagcctgtactatgaggtgaatgtgcccagccagggcagctatgagctgcggcccccaccagcccccctgctgctgccccgggtgtctggcagccatgagggcggccacttccaggacaccggccagtgtggcggcagcattgaccacaggagcagcagcctgaagggggacagccccctggtgaagggcagcctgggccacgtggagagcggcctggaggatgtgctgggcaacacagaccggggcagcctgtgcagcgctgagaccaagtttgagagcaatgtgtgtgtgtgtgacttcagcattgagctgagccaggccatgctggagaggtctgcccagagccacagcctgctgaagatggccagccccagcccctgcaccagcagctttgataaaggcaccatgaggaggatggccctgtccatgattgaaagaaggaagcgctggaggaccatcaagctgctgctgcggagaggagctgaccccaacctgtgctgcgtgcccatgcaggtgctcttcctggccgtgaaggctggagatgtggatggagtgcggctgctgctggagcacggggccaggacagacatctgcttccccccccagctgagcaccctgacccccctgcacatcgctgctgccctgcccggggaggagggcgtgcagatcgtggagctgctgctgcacgccatcacagatgtggatgccaaggccagtgatgaagatgacacctacaagccaggcaaggtggtgaaggagctgctgacccagggcgctgaccccaacctgcccctgaccaagggcctgggcagcgccctgtgtgtggcctgtgacctgacctatgagcaccagaggaacatggacagcaagctggccctgattgacaggctcatcagccacggggctgacatcctgaagcctgtgatgctgcggcagggcgagaaggaggccgtgggcacagctgtggactatggctacttccgcttcttccaggacagaagaattgcccgctgccccttccacaccctgatgcctgctgagcgggagaccttcctggccaggaagaggctgctggagtacatgggcctgcagctgcggcaggccgtgtttgccaaggagagccagtgggaccccacctggctgtacctgtgcaagagagctgagctgatccccagccacaggatgaagaagaagggccccagcctgccccggggcctggatgtgaaggagcagggccagatccccttcttcaagttctgctaccagtgtggccgcagcattggagtgcggctgctgccctgcccccgctgctacggcatcctgacctgcagcaagtactgcaagaccaaggcctggacagagttccacaagaaggactgtggggacctggtggccatcgtgacccagctggagcaggtgtccagaagaagagaggagttccagtag

SEQ ID NO: 195380 - DNA, 1320 bp, Artificial Sequence
  derived and/or modified sequence
atggagggcgcccacgccagcctgagcctggaggatgaggtgtctggagctggcagccggcagaggcccctggagggcaaaggaggagagaccccagctgctgaggagcccggcagcctgaagaactatgctgtgtttgccaccagagatgtgtctgctgcccctgagaaggaggaggaggaggccgagggccccctgcgggcccaggacctgcgggagagctacatccagctggtgcagggcgtgcaggagtggcaggacggctgcatgtaccagggcgagtttggcctgaacatgaagctgggctacggcaagttctcctggcccaccggggagagctaccacggccagttctacagagaccactgccacggcctgggcacctacatgtggccagatggcagcagcttcaccggcaccttctacctgagccaccgggagggctacggcaccatgtacatgaagaccaggctcttccagacccactgccacaatgacatcgtgaacctgctgctggactgtggggctgatgtgaacaagtgcagtgatgagggcctgacagccctgtccatgtgcttcctgctgcactacccagcccagagcttcaagcccaacgtggccgagaggaccatccctgagccccaggagccccccaagtttcctgtggtgcccatcctgagcagcagcttcatggacaccaacctggagagcctgtactatgaggtgaatgtgcccagccagggcagctatgagctgcggcccccaccagcccccctgctgctgccccgggtgtctggcagccatgagggcggccacttccaggacaccggccagtgtggcggcagcattgaccacaggagcagcagcctgaagggggacagccccctggtgaagggcagcctgggccacgtggagagcggcctggaggatgtgctgggcaacacagaccggggcagcctgtgcagcgctgagaccaagtttgagagcaatgtgtgtgtgtgtgacttcagcattgagctgagccaggccatgctggagaggtctgcccagagccacagcctgctgaagatggccagccccagcccctgcaccagcagctttgataaaggcaccatgaggaggatggccctgtccatgattgaaagaaggaagcgctggaggaccatcaagctgctgctgcggagaggagctgaccccaacctgtgctgcgtgcccatgcaggtgctcttcctggccgtgaaggctggagatgtggatggagtgcggctgctgctggagcacggggccaggacagacatctgcttccccccccagtgctag

SEQ ID NO: 195381 - DNA, 1020 bp, Artificial Sequence
  derived and/or modified sequence
atgagagatgtgtctgctgcccctgagaaggaggaggaggaggccgagggccccctgcgggcccaggacctgcgggagagctacatccagctggtgcagggcgtgcaggagtggcaggacggctgcatgtaccagggcgagtttggcctgaacatgaagctgggctacggcaagttctcctggcccactggagagagctaccacggccagttctacagagaccactgccacggcctgggcacctacatgtggccagatggcagcagcttcaccggcaccttctacctgagccaccgggagggctacggcaccatgtacatgaagaccaggctcttccagacccactgccacaatgacatcgtgaacctgctgctggactgtggggctgatgtgaacaagtgcagtgatgagggcctgacagccctgtccatgtgcttcctgctgcactacccagcccagagcttcaagcccaacgtggccgagaggaccatccctgagccccaggagccccccaagtttcctgtggtgcccatcctgagcagcagcttcatggacaccaacctggagagcctgtactatgaggtgaatgtgcccagccagggcagctatgagctgcggcccccaccagcccccctgctgctgccccgggtgtctggcagccatgaaggaggccacttccaggacaccggccagtgtggcggcagcattgaccacaggagcagcagcctgaagggggacagccccctggtgaagggcagcctgggccacgtggagagcggcctggaggatgtgctgggcaacacagaccggggcagcctgtgcagcgctgagaccaagtttgagagcaatgtgtgtgtgtgtgacttcagcattgagctgagccaggccatgctggagaggtctgcccagagccacagcctgctgaagatggccagccccagcccctgcaccagcagctttgacaagggcaccatgaggaggatggccctgtccatgattgagagctgcagcctgctgtag

SEQ ID NO: 195382 - DNA, 2154 bp, Artificial Sequence
  derived and/or modified sequence
atggagggcgcccacgccagcctgagcctggaggacgaggtgagcggggccggcagccgccaacggccgctcgagggcaaaggcggtgaaacccccgccgcagaggaaccaggctctctgaaaaactacgccgtcttcgcaacacgagacgtgagtgctgctcccgaaaaagaagaggaggaagctgagggcccactccgagctcaggaccttcgagagagttatatccagctggtccagggggtgcaagaatggcaggacggctgtatgtatcagggggagtttgggctcaacatgaaactgggctacggaaagttcagctggccgactggagaatcctaccacggccagttttacagggatcactgccacgggttaggaacatacatgtggcctgacggatcttcctttaccggaacattttacctatcccatagggaggggtacggcacgatgtatatgaaaacacgcctcttccagacgcactgccataatgatatcgtgaatcttctcctggattgtggagctgacgttaataaatgcagcgacgagggactcaccgcactgagcatgtgttttcttcttcactatcctgctcagtcgttcaaacccaacgttgctgaacggacgatccccgaaccccaggagcctcctaagtttcctgtggttcccatcttgtcctccagctttatggacaccaacctcgaaagcctgtactatgaggtcaacgtacccagtcagggatcgtacgagctgcgccctcctcctgccccgttattattgccgcgcgtgtctgggtcccacgaaggagggcatttccaagatacgggacaatgcggcggctccatcgatcatcgctctagtagtctgaagggtgactctccgctcgtcaagggtagtttaggtcatgtggaatcaggcctagaggacgtgttaggtaacacggatcgtggctcgttatgtagcgcggagaccaaattcgaatcaaatgtgtgcgtgtgcgacttctctatcgaactgtcacaggccatgctggaacggtctgcgcagtcacatagcctcttgaagatggcaagcccaagcccctgtacctcttcgttcgacaagggaaccatgcgaagaatggctttatcaatgatcgagagacggaagaggtggagaacaattaaacttctcctgagacggggcgccgaccctaacctgtgctgcgtgcccatgcaggtcctttttctcgcagttaaggccggcgacgttgatggggtaaggctgttactggaacatggggctcggactgatatctgttttccacctcagttatctacgctcacccctctgcacatcgctgctgctctcccaggcgaggagggagttcagatcgtcgaattgctgctgcacgcaataacagatgtggacgccaaggcaagcgacgaggacgatacgtataagccgggtaaggtggtcaaggaactgctgactcagggagcggatccaaatctgccccttacaaaaggactgggaagcgccttatgcgttgcgtgcgatctgacctacgaacaccagcggaacatggactccaagctggcactcattgacagactgatcagtcatggggcagacattctaaagccagttatgctacgacagggggaaaaagaggccgtggggaccgcagttgactatgggtattttaggttcttccaagatcgaagaattgcccgctgcccctttcacacattgatgcccgctgagcgcgagacttttttggccaggaagcggctgctggaatacatggggctgcagctcaggcaagccgtttttgccaaggagtcacaatgggatccaacatggctttacctttgtaagagggccgagctcattccatcacaccgtatgaagaaaaaaggtccctctctcccccgcggtttggacgtcaaagaacagggccagattcctttcttcaagttctgctaccagtgcggccgatccattggtgtgcggctgctaccctgtccccgttgttatggaatcttaacctgctcaaaatattgcaaaacaaaagcatggacagaattccacaaaaaggattgcggagacctggtcgccatagtgacccaactggaacaggtgagtaggcggcgcgaggaatttcagtag

SEQ ID NO: 195383 - DNA, 1320 bp, Artificial Sequence
  derived and/or modified sequence
atggagggcgcccacgccagcctgagcctggaggacgaggtgagcggcgccggatccaggcagcgtcccctggagggtaagggaggagagacacccgccgcggaggagcccggtagcttaaagaactacgctgtgtttgccacccgggacgtatcagccgccccggagaaagaggaagaggaggccgaaggtcctcttcgcgcccaggatcttcgggaatcctacattcagctagtgcagggcgttcaggaatggcaggatggatgtatgtaccagggcgagttcggacttaacatgaaactcggttatggcaagtttagctggcccacaggagaaagctaccacgggcagttttatagggatcattgtcatgggctgggtacatatatgtggccagatgggtcctccttcaccggcaccttctacctaagccacagggaggggtacggcaccatgtatatgaagaccaggctgttccaaacccattgtcataatgatattgttaacttgctgctggactgcggtgccgatgttaataaatgtagtgacgagggcctgacagccctgagcatgtgttttctgctgcactatccagcacagtcattcaagcctaacgtcgctgagaggacgatcccagagccgcaggaaccaccaaaatttccagtggtgcctatattgtcctcgagctttatggacacaaatttagaatccctttactatgaggtcaacgtgccctctcaggggagctatgaattacgcccacctccagccccacttctgctccccagggtgtccggctctcacgaaggaggccattttcaagacactgggcagtgtggaggctccatagaccatagatcttcatcgctgaaaggggatagccccctggtaaaaggctccttgggacatgtagagagcggcctcgaagacgtgctcggcaacactgatcgcgggtctctgtgctctgcggaaaccaaattcgagtccaacgtgtgcgtctgtgacttctctatcgagctaagtcaggccatgctggagcgaagcgcacagtcccactctctgctcaagatggcctccccctcaccgtgcacgtcgagctttgataaaggcactatgcgtcggatggccctgagtatgatcgagcgccgcaagcgctggagaaccattaaattactcttgaggcgtggcgcagatcccaacttatgctgtgtccccatgcaggtgctctttctggccgtcaaagctggggacgtggacggggttcgtttactactagaacatggggcccgcactgacatctgctttcctccccaatgttag

SEQ ID NO: 195384 - DNA, 1020 bp, Artificial Sequence
  derived and/or modified sequence
atgcgggacgtgagcgccgcccccgagaaggaggaggaggaggccgaagggccgctgagggctcaggatcttagggagtcttacatccaactggttcaaggggtgcaggagtggcaagatgggtgtatgtatcagggggaatttggactaaatatgaagctggggtacgggaagttcagttggcccactggtgaaagttatcatggccagttctacagggaccactgtcacggcctcggcacgtacatgtggccagacggatcaagtttcacagggaccttctacctgagtcatagagagggatacggtacaatgtatatgaaaaccagacttttccagacacactgtcacaatgatatcgtaaacctgttgctggactgtggagcagacgtgaataagtgttccgatgagggcttgactgctctctctatgtgttttctgctgcattaccctgctcagagctttaagccaaatgtagctgaacggaccattcccgagccgcaggagccgcccaagtttccggtagttccaattctcagcagctccttcatggacacaaacctggagagtttatactacgaggtgaatgtgcccagtcaggggagctacgaacttagacccccacctgcacctctgctgctgccaagggtctcaggaagtcacgagggggggcacttccaagatacgggacaatgtggcggttccattgatcatcggtccagttccctgaaaggggatagtcctctggtcaaaggtagtctcggacatgtagagtcagggctggaggatgtcctgggcaatactgaccgggggtccctctgctcggctgaaaccaaatttgagagtaatgtgtgtgtgtgtgattttagtattgaactttcccaagcaatgctggaacggtccgctcagtcccattcactgctgaaaatggcaagcccgtccccttgtacttcctcattcgataaaggtacaatgcgccggatggcgttgagcatgatcgagagctgcagcttgctctag

SEQ ID NO: 195385 - DNA, 2154 bp, Artificial Sequence
  derived and/or modified sequence
atggagggcgcacacgctagcctgagtctcgaggatgaggttagtggggcaggctccaggcagaggcccctggagggcaaaggcggagagacacccgctgctgaagagcccggatctttgaagaattatgcggtttttgccacaagagacgtgtcagccgctccagagaaagaggaagaagaggcggaggggcctctgagagcccaggatcttagagagagttatattcagctggtgcagggtgtccaggagtggcaggatgggtgcatgtatcagggcgagtttggtttgaatatgaagctggggtatggcaaattctcctggcccaccggagaatcataccacggtcagttttatagggatcactgccatggtttgggcacctacatgtggcccgatgggtccagtttcacggggaccttctacctgtcccaccgtgagggatacgggactatgtacatgaagacaagacttttccagacccactgtcataacgacattgtcaacttgcttctggactgtggagcagatgtgaacaaatgctccgacgaaggactgacggcgctcagcatgtgttttctcctccactaccccgcacagagctttaagcctaacgtcgcagagcggaccattcccgaaccccaagaaccaccaaagttcccagtggtcccaattttatcatcttcgttcatggatacaaacctggaatctctctattacgaagttaacgtgccctctcaaggttcttacgaactaaggccaccccctgcacctctgctcttgccccgtgtttccggaagccacgaaggcggacacttccaggacactggacaatgtggaggttctattgaccatcgatccagcagtctgaagggagatagcccgctggtcaaggggagtctagggcacgtagagtccgggctggaggacgtgttagggaatacagacagaggctcgctctgctcggcagagaccaagtttgagagtaatgtttgcgtgtgtgatttcagtattgagctctcgcaagccatgctggagcgctcagcacagtcacatagcttactgaaaatggcctccccctctccatgtacaagcagcttcgataaggggaccatgcgcagaatggctctgtccatgattgagagaagaaaacgatggagaactatcaagcttcttttgcgcaggggagccgacccaaacctttgctgcgtcccaatgcaggtcttgttcctggccgtaaaggccggagacgtggatggcgtgcggctcttactggaacatggggcaaggaccgacatttgcttcccccctcaacttagtactttgacccccttgcacattgctgccgctctcccaggagaagagggagtgcaaatcgtggagctgctgctgcatgccatcacagatgttgatgcaaaggcctctgacgaagatgatacgtacaagcctgggaaagttgtaaaggagctgctgacccagggggctgatccgaacctcccacttacaaagggattgggctctgccctgtgtgtggcatgcgaccttacgtacgaacaccagaggaacatggacagcaaattagccttgatagacaggctgatcagccatggcgctgacatcctgaagcctgtaatgcttcgccagggagaaaaggaggccgtgggtacagcggttgactacggctacttcaggttctttcaggatcgaaggattgcccgatgtcctttccacaccctgatgcccgcagagagggaaacgttcctcgcacgcaaacgtctcctcgaatatatgggacttcaattaaggcaggccgtttttgccaaagaatctcagtgggatcctacatggctgtacctttgtaagcgggctgaactgattccctcccatagaatgaagaaaaagggaccctccctgccaaggggactagacgtgaaggaacagggacagatcccttttttcaagttctgttatcagtgtggtaggtcgatcggggttagattactgccttgtccaagatgctatggcatcctcacctgtagcaaatactgcaagacaaaggcctggacagagttccataaaaaagattgtggcgatctcgtggcgattgtaacccaactggaacaggtgtcaagacgaagggaggagtttcaatag

SEQ ID NO: 195386 - DNA, 1320 bp, Artificial Sequence
  derived and/or modified sequence
atggagggcgctcacgcttctctgtcgttggaggacgaggtcagtggcgctggctctagacagcggcctttagaggggaagggaggcgaaactccagccgcagaggagccaggctctttgaagaattacgctgtgttcgctacccgggacgtgtctgccgcacccgagaaagaggaggaggaagcagagggccctttacgcgctcaggaccttagggagagttacattcaattagtgcagggagttcaggaatggcaagatggctgtatgtaccaaggagagttcggattaaacatgaaactgggctatgggaaattcagttggccaactggtgaatcttaccatggacagttctatagagatcactgccatggcctgggaacctacatgtggcctgacgggtcatctttcaccggcactttttacctgagccatagggaggggtacggaactatgtatatgaagacccgcctcttccagacacactgtcacaatgatatagtgaatttgctgctggactgcggggcagacgtaaacaaatgttccgatgagggattgactgccctttccatgtgcttccttctacactatcctgctcaatcttttaagccaaacgttgcagagagaaccatccccgaaccccaagagcctccaaaatttccagtggtccccattctgtccagctcattcatggacactaacctggagagtttgtactatgaggtgaacgtgcccagccagggatcatacgaactccgaccacctccagcccctctgctgttgcccagagtcagcggcagccacgagggaggacacttccaagatacagggcagtgtgggggttccatagatcacaggtccagtagtttaaagggcgattccccgttagtgaagggcagtttaggccacgtcgagtcggggttggaagacgtgctgggaaacaccgacagaggctcgctctgttccgctgaaacgaaattcgagtctaatgtttgcgtgtgcgacttcagcatcgagttatcgcaggccatgttagaaagatcagctcaatcgcactctctccttaagatggcgtctccaagcccttgcaccagttcctttgacaaaggaaccatgcgcagaatggcactttcgatgattgagcgcaggaaacgttggcgtacaattaagctgctactgcgtcgcggagcggaccccaatctgtgttgtgtgccgatgcaagtcctctttcttgccgtcaaagcgggagacgtcgacggcgtgcggctactattggaacacggcgctagaacagacatatgttttcctccccaatgttag

SEQ ID NO: 195387 - DNA, 1020 bp, Artificial Sequence
  derived and/or modified sequence
atgagagatgtgagcgctgcgccagagaaagaggaggaagaggccgagggacccctgagagcccaggacttgcgggaaagctatattcaactggtccagggagtgcaagagtggcaggacgggtgcatgtatcagggagaattcggcctcaatatgaaactaggatacggtaaattcagctggcctaccggggaaagctaccacgggcagttctacagagaccactgccacgggctgggaacatacatgtggccagacggaagctcttttacaggaaccttctacctgtcccatcgggagggctatgggacaatgtatatgaagacgcgcctttttcaaacacattgccacaatgatatcgtcaatctgctgttggattgtggggctgacgtgaacaaatgctccgatgagggactcaccgctctgtccatgtgctttttgctgcattaccctgcccaatcttttaagccaaatgtcgcagaacggacaatcccggagcctcaggagcctccaaagttccctgtggtgcctatcctatcttcgtctttcatggataccaacctggagagcctgtattacgaagtgaacgtgccttctcaaggaagttacgagctccgccctcctcctgccccactgcttctgcccagggtgtccggcagtcacgaggggggacacttccaggacacaggacagtgcgggggatccatcgaccatcggtcgtcctcacttaaaggcgacagtccactcgtgaagggctcactgggccatgtggagtctgggttagaggacgtcctggggaacaccgatcgcggttcactgtgtagcgccgagacaaaatttgagtccaatgtctgcgtgtgcgacttttcaatcgagctctcacaggctatgctcgaaagatccgcccagagccattctttactgaaaatggcttcaccatctccgtgtacatcttccttcgataaagggaccatgaggcgcatggccctgtctatgattgagtcttgtagtctcctgtag

SEQ ID NO: 195388 - protein, 1096 aa, Artificial Sequence
  derived and/or modified sequence
MGVQGFQEFLEKRCPGAVVPVDLLKLARTVSRQQQQQHLHRQLPPTAALAPGAPRAARGSVPLQPPLPPAALGAYSGGAGPIRHHHPAHHFHHHGQAQPGLHPPLPPPPPPQLPGARVLVDAGSALPRLYGGYQTDWVCGGQWNAMLGYLSALCQACAYPGGDGLELVVMFPGGLGKDRLAEWGRRCQAERQTAQLIVGHVGNKGTPPPRAWFLPPACLSHCVRLALIRFRVKVFQSLEDHHLEVVAFFRENGFHGLLAHDSEYALYNIPSYYSSHALKLSWNGKNLTTNQFLMQEVAKQLGLKRMNFPIFAALLGNHILPDEDLAAFHWSLLGPEHPLASLKVRAHQLVLPPCDVVIKAVSEYVSSIKDPSNLDVVGKDVFKQSQSRTEDKIERFKKAVEYYSVTTKLSSLPVGPSFLGFRNNRLGNPPLPRNQVGTISAGKPMFSHQVPQKVKYPPPFPVGPNSSLLFSSHALGESHAFSEDPMLQNSPFANWAVSYDSSASQFPNYLPSKASPPLGPDSSHSSSSDGDEPNGASSDHITEAFHHQPEWGNPNRDRGSWAQPVDTGVSEASLGDGEPHIPSLLSMSTRNHMDITIPPLPPVAPEVLRVAEHRHRRGLMYPYIYHVLTKGEIKIPVCIEDECNMELPPAALLFRSARQYVYGVLFSLAETQRKMERLAMRRRLPVEVPSVILKEWSAYKGKSPQTPELVSALTFREWTCPNLKKLWLGKAVEDKNRRMRAFLACMKSDTPSMLNPANVPTHLLLMCCVLRYMVQWPGGRILHRHELDTFLAQAVSTQLYEPDRLQELKIEKLDARGIQLAALFMSGVDTALFANDACGQPVPWEHCCPWIYFDGKLFQSKLIKAGRERVSLVELCDGQADLATKVEKMRQSILEGVNMNHPPPSALLPSPTFVPPMVPSLYPVSLYSRAMGSMPLPPQGRSRGFAGLHPIPPQGGKLEIAGMVVGQWAGSRSSRGRGSFGMQVVSVGGPGKGHGKEQTGRGSKGHKKGNKQGSSDGVSKSLELHQGRSRSQVNGNSGALIKEEKSDHRLPAPSQCALSRDSNECNNGNRYLPMNNREKNHLQEQKLETVAQRKED

SEQ ID NO: 195389 - protein, 238 aa, Artificial Sequence
  derived and/or modified sequence
MGVQGFQEFLEKRCPGAVVPVDLLKLARTVSRQQQQQHLHRQLPPTAALAPGAPRAARGSVPLQPPLPPAALGAYSGGAGPIRHHHPAHHFHHHGQAQPGLHPPLPPPPPPQLPGARVLVDAGSALPRLYGGYQTDWVCGGQWNAMLGYLSALCQACAYPGGDGLELVVMFPGGLGKDRLAEWGRRCQAERQTAQLIVGHVGNKGTPPPRAWFLPPACLSHCVRLALIRFRVKQAAML

SEQ ID NO: 195390 - DNA, 8057 bp, Artificial Sequence
  derived and/or modified sequence
cagatcgtcgcctatcctgcttgcgcagccgctatcgcgtctgcccaccgacgaagcatgggtgtccagggcttccaagagttcctggagaagcgctgtcccggggccgtggtgcccgtggacctcctaaaactcgcgcgcacggtctcgcgccagcagcagcagcagcacttgcaccgccagctgccgccgactgcagccctagcgcccggggctccacgcgccgccaggggctccgtgcctctgcaaccgccgcttccgcccgctgccttgggtgcctactccgggggcgcggggccgattcggcaccatcaccccgctcaccacttccaccatcatggccaagcgcagcccgggctgcaccctccgctgccgccgccgccgccccctcagctgcccggggcccgggtgctggtggacgccggctcggcgctgccgcggctctatggcggctaccagacggattgggtgtgtggcggccaatggaacgccatgctgggctacttgtcagcgctgtgccaggcttgtgcctatcctggcggcgacggcctggagctcgtggtcatgttcccggggggcctgggcaaggaccggctggccgagtggggccgtcggtgccaggccgagcggcagacagcgcaactgatcgtgggacacgtgggcaacaagggcacccctccaccgcgggcctggttcctgccaccggcctgcctgagccactgcgtgaggctagcactcatccgcttccgggtcaaggtctttcagagccttgaagaccaccatttggaagtggtggcgtttttcagggaaaatggcttccatggccttcttgcccatgactccgagtatgctctctacaatattccctcttactacagttcccatgctctgaaactgagctggaatgggaagaacctcactaccaaccagttcctgatgcaagaagtagccaagcagctgggcctgaagaggatgaatttccccatatttgctgcactgctaggtaaccacatcctcccagatgaggacctggctgcttttcactggagcctcttgggaccagaacatcctcttgcatcacttaaggttcgagctcatcagctggttcttcctccctgtgacgtggtgatcaaggctgtttctgagtatgtcagttccatcaaagatccctcaaacctggatgtagttgggaaggatgttttcaaacagtctcagtccaggacagaagataaaatagagcgattcaagaaagcagttgagtattattcagtcacaaccaaactctcttcgctgccagtgggtccctcctttctaggttttcggaataataggcttggaaatcctccccttccacgaaatcaagtgggcaccatttctgctggaaagccaatgttttctcatcaagtgccccagaaagtgaaatatccaccaccattcccagtgggacccaactcatctcttctcttctcctcccatgctttgggggaatcccatgctttttctgaggatcccatgctgcagaacagcccctttgccaattgggctgtctcctatgactcttctgcatcccagtttcccaattacctgccttctaaagcctcacctcctttgggaccagactcttcccactcctcttcctctgatggtgatgagccaaatggagctagctctgatcatatcacagaagcatttcatcaccagcctgagtggggaaatcccaatcgtgacagagggtcctgggcacagcctgttgatactggagtttcagaagcgagcctaggtgatggtgagccccacatcccatctctgctgtctatgtctacaaggaaccacatggatatcaccattccacccttacctccagtagctccagaagtcttgagagttgctgaacacagacaccggaggggtcttatgtacccatatatctaccatgtcctcactaagggtgaaattaagatccccgtatgtattgaggatgagtgtaacatggagctgcctccagctgctctcttattccggtcagctcgtcaatatgtatatggagttctttttagtctggcagagacacagaggaaaatggaacgcttggccatgcgacggcggctgcctgtggaagttccttcagtgatccttaaagagtggtctgcctataaagggaagtcacctcaaacccctgagctggtgtctgcactgacatttcgggaatggacttgcccaaacctcaagaagctctggctaggcaaagcagttgaagacaagaacagaaggatgcgggccttcctggcctgtatgaagtcggacacgcccagtatgctcaatccagctaatgtccccacccatctgctgctcatgtgttgtgtactccggtacatggttcagtggcctggtggccgaatcctgcatcgccatgagctagacaccttccttgcacaggcagtgtctacccagctttatgaaccagatcgactccaagaactcaagattgagaaactggatgcccgagggatccagcttgctgccctcttcatgagtggagtcgacacagctctgtttgctaatgatgcctgtggccagccagtcccttgggagcattgctgtccatggatttactttgatggcaagctgttccagagcaagctaattaaagcaggccgagagcgagtatctctggttgagctctgtgatggccaggctgacctggcaaccaaagtggaaaagatgagacagagcatccttgaaggagtcaacatgaatcatccaccgccttctgctctacttccgtcacctacttttgtgcctcccatggtgccctctctctaccctgtttcactttattcccgagctatgggctccatgccacttccccctcaagggaggagccggggatttgcaggtctccatccaatcccaccccaaggaggaaaactggagattgctgggatggttgtgggccagtgggctggcagcagatcctccaggggccgaggatccttcggcatgcaagtggtttctgtcggtgggccaggaaaggggcatggaaaagaacagactggtagaggatccaagggacacaaaaaaggaaataagcaaggctcttcagatggagtttctaaatccctggagcttcatcaaggtcggtctcgctcccaggtaaatggaaacagtggcgcattgatcaaggaagagaagagtgatcatcgtcttccagctccatcacaatgtgccttatccagagacagcaatgagtgtaataatggtaaccgctacctccctatgaataatagggagaagaaccacttacaagagcaaaagctagaaactgtggcacaacggaaagaggactgataagctgaagatggcttcaccaaaccaggaagagggaaaaacttttacttttctgattttaggcccaagctagaggaggatataaatgcttaccctagatttctccaggattttggtgggatgtcctattgtgtccatcttttccccttccctgcctgtttctgggacttcagattcagtggtctgtttctggagaagttctggtcaaagatgaatggcagtaagactaggtcctagtctcaaattgaagatatagcaccaatagtttatttatctcctctgggagcctagtaaggcagtagctgtcagaaattgggtatcatcacataaggtcctatagaaaagctctagctttggtttttctgagcatttataatgatactcattatcaaagacttatatgataaacctatgaggttgtggggacagctgtggcctcctgaggtttttttttgttttttttttttctctatgaagtggtatctacctcttcttcactccttccaacttacctacccctggattttgtaccaccacctctagctttggcctgacaatcagataggtagatgttttcagaaaagtaaggtagtattggttattttaatttttattttttattttatacacttcaaaaaaactatcaatggcctttgtactgggggattcaagtgaatcagaaaagtactgggcagatttttcctgcctctcaaccagtgcattgtttgtaaaatagaagatgtggcacagttcattcactccctattgcccacaccatgaaagggtgggaatcagtgtaatgaacttgagtacgaaagggactcaagagactgtgtgtgtgtgtgtgtgtgtgtgtgtgtgtgtgtgtgtgtgaatgtgtgcttgtgtgtgggtgtgggtggatgttgtgtgggtgggtgtatatatgaatgtgtgtatatgcatacacataccctttatataaagagacagatctatttatctatacatattttatatatatgtaagtgtgtgtgtatgtgtgtatatatgtgtgtatatatatatacacacatatatacacacatacatacatacatacatacatacatacatacatggtgatgtcccagaggatttactcaatttcccagaaatgcttccactgctatggagtggaaggtttcaaaagaccacacttttaatctgaaattcttactaagtcacagtgcattcacaactatgagaagttggatgggcttctctaaatcagacaaaaagtactttccagaaattgcctgttcagaacaataaactcttgggttgttacaagcttaatcttgaacagagccctcacatcccatatggtgaaaacaggaggttggaatgggattgggaagagttgggcatttccttatgaaggtttggagagaaaaggggggatgggaggtgactaccatttgaaagggctttcagccaatttggaggaaatctcttctggaactccagggtcaaattggtttcaggctagaattgattgacatgaatccctgaaggagagaggactagctttggaaagatagggtagggaagtgtgaggaaactatttgattttacacgcctagattgtttcatttgttcattgacattctgactactggatcttttcatttgctttgcaaggaagactttagaggactctggcctgggccttgagaagaattctattaaaagattctcagcctcctgtgtggccaggatctgcccaggataaagaggctattcctccttgctggagataatcttgagacaaccttgcatttccagtttccctccttgggcagcctaactatgagggagggaaacatggcttgcaataaattagcattgtgtcttcattcaggaattgaggcttccagcctcatatacctccttttgggctttgtgatattcttgcccaagaagtaccatttctacagaaatacaactgactaatcttctagcagggttctttttgaaaaaccccatgcaccttaacccacagcaggtccttggtgatttttgcccagacaaccagaaggctatttgcttactgcccacttacaatgaccagatcataggaaattgaaaacagtgtcagactatttagtcctaatctgtcccagattaagagaatccatgattttcagggggagggagccctgcaatgccttgacccctgcccagatacttcttacataaaccaaagaaaaatgacaagagtgtacatctaaccagacagaagtagaaacaaagtatagaaaaacctcctctttggaatcagctcccttaatgtggtcccccttctcttggacctgcccaacctttcacaacgtcttgaaggtaggacttctatatccagcaaaggaagggatagtagtaaatttacatggcttggaattttctttctggagccacagagggatgaatcctttggagctctaaaagcaaccagtatcactgagctgtgagatacctatatctccattttctaataggaagcacttggacttaaaattgctaagatattttttgcagttgctatttctgtgcatcttgaatctatctgacacaatcaaatgacagtattgttaactctcacaccattaagaaaatttcttattttgtaggcattcactgtgagaggtaaaattgctgctttggcaggtatgattccagtttgccaaacggcttttcttccttccacaacctctttttcccctagcccagggtgaaacaagtgggtcatctccaaccttgatttttatttggattcagcattttgggtttggaaggttacaagaaggaaccataaatggccatattcctagatttttatttatctgacaaaatacacaacttaaaagccaggaaaactaaggttcattacagggagatgaactttttctaattggaggacaaattgtggaaggtggggtctgatctttgcttcaccacttgaagagactgtcatccttcacctgaggttccatttctagcttttatgtgacctctcttgaacaaagtcatttgggaacccccagaaatgacccctttacattgtaggaccataagcaaaacactggttgtgtatagtcactgatccccaaggacttgcagttttttatttctgctggtgtgtcttgggatcagcttataactcctactcttacttagtcagtgaccagtccagtctggtctggaccaggcctgacaaacttctgctcacttgcatcattttcattctgagccagtaggactttgggtagactttaaagcccaagaattggtactcgctttggctagtgacatttgatttttgtctccatcttgatttctgacatcattggccaagtcacattaactttttttgatcactgagaaaaacagtcgaacaaggcattacagagggtggttaaggtagagggtggggggcaggaatgcttatgtaggatagaaagaatgtgggggtagctgtttggttatggtgatccagtcctttggaaccttacaaggctcctgtgggcatgtcaatgttaccattacagcctctacgacccacccacctttgaaaagtcagtacaagtagaccacagtttaaagtagttagtataattctactaaggtttaatcattatacttgttcacttcctggtgcatatttcctaaatatgcttggggtgtggggtggggggttgagttttcactgttccattgcgtgtcatcttatatttttctccatcctgtgactttggcatcttactcgactttctattttcttttcccttggcttattgcagtagtctgctggtgcaggtagagagctcagtgcacctattcccctgttactgctaattatcttgaatattgtcagaggttattttgatgttctaagaatataaagtcattttttacaaaatcatcttttccaagttaaaagcaaaataaaaaaatcccctgtgctagggtgcccatttcagcttttgacattgcccctgtacttttatagatgctctttttgtccgtgttggtagtaactaatgactagtgaattttcatgtaaatgaagcaaaataaatatttcagattttattaatctctcataacccagccaaatctgatgacttcattttaattgcttcccagaaagcacttcccctcctaccttctattctattctattctattctattctattctattctattctattctattctattctgttctattctgttctattctgtttttagaataacacactaggtaaagaaactttaactgcaaggagtcagtgacttttagtgctccctgataaatgatgttattgacaaaagtaaaaaattatttcattgtttttttcctgtattactatctcctctcctgtgcttttgacagtgtgtttagtggatggataatatgtatttctctttcccactcccagattccaaattccctgcctttttggcccacctcaccacaaaagctccatagtttattaatgtaagtttgaatggatgcttctttggggaaacttcaggagttaatggaagagtttcagaaaggaatgagaatgcctcaggagttgttctgtgatggaaattggtctgttgttctgttaatgctgatggaaagaaacttacaacgcttaataaaaatctattcttttagtaaaaaaaattgtgaaataa

SEQ ID NO: 195391 - DNA, 3291 bp, Artificial Sequence
  derived and/or modified sequence
atgggagttcagggctttcaggagtttttggagaagagatgccccggcgccgtggttcccgtggatttactgaaactcgcaagaaccgtttctcgacagcagcagcaacagcacctgcataggcagctccctcctaccgccgccctagctccaggagctccacgcgccgctagaggctcagtcccgctgcagccccccctcccacctgctgccctgggtgcctactcgggcggagctggaccgatccgccatcaccacccggcccatcattttcaccaccacggccaagcacagcccgggctgcatcctccactgccaccacctccgccccctcagctgcctggcgctagggttctggttgacgctggaagtgccctacctcggttatatggaggctaccaaactgactgggtgtgcgggggacaatggaatgccatgctgggctacctgtccgccctgtgtcaagcttgtgcgtaccccggaggagacggcctggaactggtagtcatgtttcccgggggtctaggaaaggaccggttggcagagtggggaagaaggtgtcaggccgaaaggcagaccgcgcagctaattgtcggacatgtgggcaacaaagggacgcccccgccccgcgcctggttcctgccacctgcgtgcctgagccactgcgtgagactcgcgctaatacgatttcgggttaaggtgtttcagagcctggaggaccaccatctggaggtcgtggctttctttagagagaacggatttcatggcctcctcgcccatgactcagagtacgccctatataacatcccttcctactactccagccacgcactgaagctttcatggaacggaaagaatctcactaccaatcaatttctaatgcaggaagttgctaagcagctcggcctcaaacgaatgaacttcccaatttttgccgcattgttaggcaatcatattctgcccgacgaagatctcgctgcattccactggtcactgctgggaccggaacatccccttgcatcccttaaagtccgcgcgcatcagctcgtgttacccccctgcgacgtggttatcaaggcagtctcagagtacgtctcgtcaattaaggatccttctaatctagatgtggtcgggaaggacgtttttaaacagtcccagagccgtacagaagataaaatcgaacgatttaagaaagctgtagagtattatagcgtcacaactaagctatcaagtctgcccgttggcccgtcatttctcggttttcggaacaatcggcttggcaatcctcctctgccaaggaaccaggttgggacgatctcagccgggaagccaatgtttagccaccaggtgcctcagaaggtgaagtatccacctcctttccctgtcggccccaacagctccctcctgttctcttctcacgccttgggcgaatcacacgccttctccgaagaccctatgcttcagaattccccattcgccaactgggcagtgtcttatgactcaagtgcgtcacagtttccaaattatcttccctccaaggcatccccccctttaggcccagattcatctcattcttctagtagcgacggcgacgaaccaaatggagcttcttctgatcacatcacagaggccttccaccatcaaccagaatggggaaacccaaatcgagaccgaggcagctgggctcagccagtggacacgggtgtgagtgaagctagtttaggggatggcgaaccccatattccatcgctactcagcatgagtacccgaaatcacatggatattactatcccacctttaccgcccgtagcccctgaggttttgcgcgtggccgaacaccggcacagacgcggtctgatgtacccatatatttatcatgtgctcaccaagggggagatcaagatcccagtctgcatcgaggacgagtgtaatatggaactcccccccgccgccctgttatttcggagcgccagacaatacgtttacggggtcctgttttcactggcggaaacccagcgcaaaatggagaggctcgcgatgcgaagaaggcttcctgtcgaggtcccctcagtaatcctcaaggagtggagtgcctataagggcaagagcccgcagacgcctgagctcgtaagtgcactgacattccgggaatggacctgccccaatctgaagaagctgtggcttggcaaagccgtcgaggataagaataggcgaatgagggcatttctggcctgtatgaaatccgacactccttctatgttgaaccccgccaacgtgcctacacaccttttgctaatgtgttgcgtcttgcggtacatggtgcagtggcccggcggacgaatcttgcaccgacacgagctcgacaccttcctagcacaggccgttagcacacagttgtatgaacccgataggctgcaggaactgaaaattgagaagctcgatgccagaggtatccagctcgccgcccttttcatgagcggggtggatactgctctgtttgccaacgatgcttgcggacaaccagttccctgggaacactgctgcccctggatatacttcgacggaaagttgttccagagtaagctaatcaaagccgggcgggagagagtgtctctggtggagttatgcgacggccaggcagacctcgcaactaaggtcgaaaagatgcgacaatccattctcgaaggggtcaatatgaaccatcctcctccatcagccctgctcccatctcctacgttcgtgccccctatggttccctcactatatcctgtatcattgtattcacgcgcgatgggaagcatgccgctgcctccacagggccgctcacggggctttgccggcttgcacccgatacccccacaggggggtaagcttgaaattgccgggatggtcgtcgggcagtgggcaggcagtcggtcatcaaggggacgcgggtccttcgggatgcaggtggtcagcgtcggaggaccaggaaagggccacgggaaagagcagaccgggagaggctctaagggtcacaaaaagggcaataagcagggaagttccgacggtgtcagtaaatcactagaactccatcagggacgatctcggtctcaggtgaatggaaactctggtgccctgatcaaggaagaaaaatccgatcatcggttgcccgctcctagtcaatgtgcgctgtctcgagactctaatgagtgtaataacggaaatcggtatctccctatgaataacagagaaaagaaccacctgcaggagcagaagctggagactgtggcccaacggaaagaggattag

SEQ ID NO: 195392 - DNA, 3291 bp, Artificial Sequence
  derived and/or modified sequence
atgggcgtgcagggcttccaggagttcctggagaagcgctgccctggagctgtggtgcctgtggacctgctgaagctggccaggacagtgtcccggcagcagcagcagcagcacctgcaccggcagctgcccccaacagctgccctggcccctggggccccccgggccgcccggggctctgtgcccctgcagccccccctgcccccagctgccctgggcgcctacagcggcggggccggccccatccgccaccaccacccagcccaccacttccaccaccacggccaggcccagcccggcctgcacccccccctgcccccacctcctccaccccagctgcccggggcccgggtgctggtggatgctggcagcgccctgccccggctgtatggaggctaccagacagactgggtgtgtggcggccagtggaatgccatgctgggctacctgagcgccctgtgccaggcctgtgcctacccaggaggagatggcctggagctggtggtgatgtttcctgggggcctgggcaaggaccggctggccgagtggggccgccgctgccaggccgagcggcagacagcccagctgattgtgggccacgtgggcaacaagggcaccccaccaccccgggcctggttcctgcccccagcctgcctgagccactgtgtgcggctggccctgatccgcttccgggtgaaggtgttccagagcctggaggaccaccacctggaggtggtggccttcttcagagaaaatggcttccacggcctgctggcccatgacagtgaatatgccctgtacaacatccccagctactacagcagccacgccctgaagctgtcctggaatggcaagaacctgaccaccaaccagttcctgatgcaggaggtggccaagcagctgggcctgaagaggatgaacttccccatctttgctgccctgctgggcaaccacatcctgcctgatgaggacctggccgccttccactggagcctgctgggccctgagcaccccctggccagcctgaaggtgcgggcccaccagctggtgctgcccccctgtgatgtggtgatcaaggctgtgtctgaatatgtgagcagcatcaaggaccccagcaacctggatgtggtgggcaaggatgtgttcaagcagagccagagcaggacagaggacaagattgagcgcttcaagaaggctgtggagtactacagcgtgaccaccaagctgagcagcctgcctgtgggccccagcttcctgggcttcaggaacaaccggctgggcaacccccccctgcccaggaaccaggtgggcaccatctctgctgggaagcccatgttcagccaccaggtgccccagaaggtgaagtaccccccacccttccctgtgggccccaacagcagcctgctcttcagcagccacgccctgggggagagccacgccttcagcgaggaccccatgctgcagaacagcccctttgccaactgggccgtgtcctatgacagcagcgccagccagttccccaactacctgcccagcaaggccagcccccccctgggccctgacagcagccacagcagcagcagtgatggagatgagcccaacggggccagcagtgaccacatcacagaggccttccaccaccagcctgagtggggcaaccccaacagagaccggggctcctgggcccagcctgtggacacaggagtgtctgaggccagcctgggagatggagagccccacatccccagcctgctgtccatgagcaccaggaaccacatggacatcaccatcccccccctgccccctgtggcccctgaggtgctgcgggtggccgagcaccgccaccggcggggcctgatgtacccctacatctaccacgtgctgaccaagggggagatcaagatccctgtgtgcattgaagatgagtgcaacatggagctgcccccagctgccctgctcttccgcagcgcccggcagtatgtgtatggagtgctcttcagcctggccgagacccagaggaagatggagcggctggccatgagaagaaggctgcctgtggaggtgcccagcgtcatcctgaaggagtggagcgcctacaagggcaagagcccccagaccccagagctggtgtctgccctgaccttccgggagtggacctgccccaacctgaagaagctgtggctgggcaaggctgtggaggacaagaacagaaggatgagggccttcctggcctgcatgaagagtgacacccccagcatgctgaacccagccaacgtgcccacccacctgctgctgatgtgctgcgtgctgcgctacatggtgcagtggccaggcggccgcatcctgcacagacatgagctggacaccttcctggcccaggccgtgtccacccagctgtatgagccagaccggctgcaggagctgaagattgagaagctggatgcccggggcatccagctggccgccctcttcatgtctggagtggacacagccctgtttgccaatgatgcctgtggccagcctgtgccctgggagcactgctgcccctggatctactttgatggcaagctgttccagagcaagctgatcaaggccggccgggagcgggtgtccctggtggagctgtgtgatggccaggccgacctggccaccaaggtggagaagatgaggcagagcatcctggagggcgtgaacatgaaccaccccccaccttctgccctgctgcccagccccacctttgtgccccccatggtgcccagcctgtaccctgtgtccctgtacagccgggccatgggctccatgcccctgcccccccagggccgcagccggggctttgctggcctgcaccccatccccccccagggcggcaagctggagattgctggcatggtggtgggccagtgggccggcagccgcagcagccggggccggggcagctttggcatgcaggtggtgtctgtgggcggccctgggaagggccacggcaaggagcagacaggccggggcagcaagggccacaagaagggcaacaagcagggcagcagtgatggagtgtccaagagcctggagctgcaccagggccgcagccgcagccaggtgaatggaaattctggggccctgatcaaggaggagaagagtgaccaccggctgcctgcccccagccagtgtgccctgagccgggacagcaatgaatgcaacaatggaaaccgctacctgcccatgaacaaccgggagaagaaccacctgcaggagcagaagctggagaccgtggcccagaggaaagaagattag

SEQ ID NO: 195393 - DNA, 3291 bp, Artificial Sequence
  derived and/or modified sequence
atgggcgtgcagggcttccaggagttcctggagaagcggtgccccggggcggtggtgcctgttgacctgctgaaactcgcccgaacggtgtctcgccagcagcagcaacagcatctccataggcaactgccccctacagccgctctggctcctggagcacctcgggccgccaggggatccgtccctctgcagcctcctctgccccctgcagctctgggcgcatattcaggtggggccggacccattagacaccaccaccctgctcaccacttccaccatcacggacaggctcagcccggcctgcatcctccccttccaccacctccccccccgcagctgccgggtgcccgcgttctcgtggatgccggttcagccctcccccgcctctatggcggttatcagaccgattgggtatgcggaggtcaatggaatgcgatgctgggctacttgtctgccctctgtcaggcctgcgcttatcctggcggagatggcctggagctggtggtaatgttcccaggcggactcgggaaagatagattggctgagtggggaagaaggtgccaagcagagcgacagactgctcagctgattgttggacatgtcgggaataaagggacacctccgccacgcgcttggtttctgcctcccgcatgtttgagtcactgcgtcagattggcactaataaggttccgcgtgaaagtgttccagtccctggaggaccaccacctggaggtggtcgctttcttccgcgagaatggcttccatgggttgttggcccacgattctgagtacgccctgtacaacataccgtcatactattcatcgcacgcgctcaaactgtcctggaacggcaagaatttgacaaccaatcaattcctgatgcaagaagttgcaaagcaactgggcctgaaaagaatgaattttccgatttttgcagctctgctcgggaaccacattcttcccgatgaggatctggccgcctttcactggtctctgctgggacccgagcatccccttgcttccctgaaagtccgtgctcatcaactggttctccccccctgtgatgtggtgatcaaggccgtgagcgagtatgtgtccagtataaaggacccctctaatcttgacgtggtaggcaaggacgtgtttaaacagtctcagagcaggaccgaggataagatagagaggttcaagaaagctgtagaatattacagtgtcaccaccaagcttagctcacttccagtggggccttcttttcttggcttccgcaacaataggctcgggaatccacctttgccccgaaaccaggtgggaactatcagcgccggaaaacccatgttttctcatcaggtgccccagaaggtgaaatacccacccccttttcctgtggggccaaacagcagcctcctgttctcgtcccacgccctaggagagtctcatgccttctctgaagatcccatgctgcaaaatagccctttcgcgaattgggcggtgtcttatgactctagtgcctcccagttcccaaattacctgccaagcaaggccagccccccccttggccccgatagttcacactcctccagctctgacggagatgagccgaatggggcctcttccgaccacatcacagaagccttccaccaccagccagagtggggtaaccctaaccgcgacagaggttcatgggcccaacccgtcgacacgggcgtatctgaggctagcctcggtgatggagagccacacatccccagcctactaagcatgagtactcgtaatcatatggatattacaatccccccactgccgcctgtcgccccagaggtccttagagtggccgagcacagacatagacgggggctgatgtatccctatatttatcacgtgctcaccaagggggaaatcaaaatccccgtgtgtatagaagacgagtgcaacatggagttacccccggctgccttgctcttccgatccgcacgccagtacgtttacggggttttatttagcctggcagaaacccaacggaagatggaaaggctggcaatgcggagaagactaccagtggaagtgcccagcgtcattctgaaggaatggtccgcatacaagggcaagagtcctcagacacccgagctggtgtcagccctgacattccgagagtggacatgtcctaatctgaagaagctgtggctggggaaggccgtcgaggataagaatagacgaatgcgggcatttcttgcttgtatgaagtccgacacccccagcatgctcaaccccgcgaatgttccaactcatctgctactgatgtgctgtgtgttgcgatacatggtgcagtggccaggtggaaggatactgcaccgacatgagctggacactttcttagcgcaagcagtctcaacacagctgtatgagccagataggctgcaagaacttaagattgagaagctcgatgcacggggaattcagctggcagcactgtttatgtcaggagtcgatacagcactgttcgccaatgacgcctgcggtcaacccgtcccctgggaacattgctgtccttggatttattttgacggtaagctgtttcaaagcaaacttattaaagctgggcgcgaacgggtctctcttgtggagttatgtgacggacaggctgacctagccaccaaggttgagaagatgagacagtctatactggagggggtgaacatgaaccacccgcctcccagcgctctcctcccctcaccaacattcgttccgccaatggtacccagtttgtaccccgtgtccttatactctcgagccatgggcagcatgccacttccaccccaggggcggagtaggggcttcgctggactccatccaataccgccgcagggcggtaagttggaaatcgccggaatggtggtggggcaatgggccgggtcacgctcaagcagaggccggggcagctttggcatgcaggtagtgagcgtgggtggacccgggaaaggtcacgggaaagaacaaaccggccgcgggtctaagggacacaagaaggggaataagcagggctcctcagatggggtgagcaagagtttagaactccaccagggtcgatctagatctcaggtgaacggaaactcaggagcactaattaaggaagagaagtccgaccaccgactgcccgcgccaagccagtgtgctctgagtcgcgactcaaatgagtgtaacaacggaaatcggtacttacctatgaataatagagaaaagaatcaccttcaggagcagaagctcgaaacggttgctcagaggaaagaagattag

SEQ ID NO: 195394 - DNA, 3291 bp, Artificial Sequence
  derived and/or modified sequence
atgggagttcagggttttcaggagttcttggaaaaacggtgccctggcgctgtggtccctgtcgacttgctgaagctggctcggaccgtgagccggcagcagcagcagcagcatctgcaccggcagctgccacccaccgccgctctcgcgcctggggctcccagggccgcaagagggagcgtgcccctccagccccctcttcctcctgctgccctcggtgcctactctggtggcgcaggtcctatcaggcaccaccatcctgcacatcattttcatcatcacggtcaagcccaacctggcctgcatcctcctctgccaccaccccctccccctcagctgccgggagccagggtgctggtcgacgctggcagcgcccttcctcgtctctacggaggataccaaactgactgggtttgcggtgggcagtggaacgccatgttagggtacctaagcgcactgtgtcaagcttgcgcgtatcctggaggggacggactggagctggtcgttatgttccctggcggtctcggcaaagacagattggcggaatgggggaggcgttgccaggccgaacggcagaccgctcagctcatcgtggggcacgttggaaacaaagggaccccacctcccagagcctggtttctcccaccagcttgtctgagccactgtgtcagactggctcttatcagattccgcgtcaaggtctttcagtcactggaggatcaccatttagaagtggtagccttcttccgcgagaatggatttcacggcctgttggcacacgacagtgaatacgctttgtacaatattcctagctactattctagtcatgccttaaagctgtcttggaatggcaagaatctgaccacaaaccagtttctcatgcaggaggtagctaaacaattagggctgaagcgaatgaacttcccgatcttcgccgctctccttggcaaccacatcctgcctgacgaagacctggccgcttttcactggtcactgctgggccctgaacaccctctcgcctctctgaaggttagagcccatcaattagtgctacccccatgcgacgtggttatcaaggccgtgtcagagtacgtgagctccatcaaggatccttcaaacctggatgtggtgggtaaggacgtgttcaagcagagccaaagcaggacagaagacaaaatcgaaagattcaagaaggccgtggaatattattccgtgacgactaaactgagtagtcttccagtcgggccaagcttccttggattccggaacaaccgattgggcaaccccccactccctcggaatcaggtggggactattagcgcaggcaaaccaatgttttcacaccaggtgcctcagaaagtaaaataccccccaccatttcccgtcggaccaaatagcagtctgttattctcgagtcacgccttgggcgagtcccacgccttttctgaagaccccatgttgcagaattctcctttcgccaactgggcggttagctacgattccagtgccagtcagttccccaattacctcccaagtaaagcttcaccccctttaggccctgacagtagccacagttcctccagcgacggcgatgagcccaatggtgccagcagcgatcatattacggaggcttttcatcaccagcctgagtggggtaacccaaacagggatcgtgggagttgggctcagcctgtggataccggggtgagtgaggcctcactgggcgacggggaacctcacatccctagcctgctgtccatgtcgacccggaatcatatggatattaccattcctccactccccccagtggccccagaggttctaagagtcgctgagcatagacatagacggggtttgatgtatccttacatctatcatgtcttgacaaaaggagagatcaagattccggtctgcattgaggatgagtgcaacatggagctgccgccagccgcactcctcttcaggagcgcaagacagtacgtctacggggtgctctttagcttagctgagacccaacggaaaatggaaagactggcaatgagacgcagactgccagtggaggttccctctgtaatcctgaaggaatggagcgcctacaagggcaagtcaccacagacccccgagctagtgtccgcattaactttcagggagtggacttgccctaacctgaaaaagctatggttaggaaaagctgtggaggacaaaaatcgcaggatgagggcctttctggcctgtatgaagtcagacacccctagcatgctgaacccggcaaatgtgccaacacacctcctgctgatgtgttgtgtgttaagatacatggtccaatggcctggtggtcgtattctgcaccggcacgagttagacacttttctggcccaagctgtctcgacacaactgtatgagccagacaggctccaggaattgaaaatagagaagctggacgctcggggaattcagctagccgcactgttcatgtccggggtcgacactgcattgttcgccaacgacgcctgcggtcagcctgtcccttgggagcattgttgtccctggatttacttcgacggcaagctgtttcagtctaaactcattaaggccggtcgagagagggtgtctctggtggagctttgtgatggccaggccgacctggccactaaagtcgaaaaaatgcggcagtccatactagagggcgtgaacatgaaccatccaccaccaagcgcactgctgccgagcccaacattcgtcccccctatggtgccctctctgtaccccgtcagtctctatagccgcgctatgggttccatgcctctcccaccgcaaggacgatctaggggattcgcgggtctgcaccctatcccaccccagggcggaaaactggaaatcgctggcatggtggtgggtcagtgggctggctcccggagttcgcggggaaggggctccttcggcatgcaggtggtttcagtcgggggacccggaaaaggccacggcaaagaacagactggtaggggcagcaagggacacaagaagggaaataaacagggctcttcggatggcgtgtcgaaatctcttgaactccaccaggggaggagccgaagtcaggtcaatggcaactcaggtgctctcatcaaggaggaaaagtctgaccacaggctccccgctccaagtcaatgtgccctgtcccgggacagcaacgagtgcaacaatgggaatagatatttgcccatgaacaaccgagagaagaatcacttgcaagaacagaaactcgaaactgtggctcaaaggaaagaggactag

SEQ ID NO: 195395 - DNA, 3291 bp, Artificial Sequence
  derived and/or modified sequence
atgggcgtgcagggcttccaggagttcctggagaagagatgccccggcgccgtggtgcccgtggacctgctgaagctggccagaaccgtgagcagacagcagcagcagcagcacctgcacagacagctgccccccaccgccgccctggcccccggcgcccccagagccgccagaggcagcgtgcccctgcagccccccctgccccccgccgccctgggcgcctacagcggcggcgccggccccatcagacaccaccaccccgcccaccacttccaccaccacggccaggcccagcccggcctgcacccccccctgcccccccccccccccccccagctgcccggcgccagagtgctggtggacgccggcagcgccctgcccagactgtacggcggctaccagaccgactgggtgtgcggcggccagtggaacgccatgctgggctacctgagcgccctgtgccaggcctgcgcctaccccggcggcgacggcctggagctggtggtgatgttccccggcggcctgggcaaggacagactggccgagtggggcagaagatgccaggccgagagacagaccgcccagctgatcgtgggccacgtgggcaacaagggcacccccccccccagagcctggttcctgccccccgcctgcctgagccactgcgtgagactggccctgatcagattcagagtgaaggtgttccagagcctggaggaccaccacctggaggtggtggccttcttcagagagaacggcttccacggcctgctggcccacgacagcgagtacgccctgtacaacatccccagctactacagcagccacgccctgaagctgagctggaacggcaagaacctgaccaccaaccagttcctgatgcaggaggtggccaagcagctgggcctgaagagaatgaacttccccatcttcgccgccctgctgggcaaccacatcctgcccgacgaggacctggccgccttccactggagcctgctgggccccgagcaccccctggccagcctgaaggtgagagcccaccagctggtgctgcccccctgcgacgtggtgatcaaggccgtgagcgagtacgtgagcagcatcaaggaccccagcaacctggacgtggtgggcaaggacgtgttcaagcagagccagagcagaaccgaggacaagatcgagagattcaagaaggccgtggagtactacagcgtgaccaccaagctgagcagcctgcccgtgggccccagcttcctgggcttcagaaacaacagactgggcaacccccccctgcccagaaaccaggtgggcaccatcagcgccggcaagcccatgttcagccaccaggtgccccagaaggtgaagtaccccccccccttccccgtgggccccaacagcagcctgctgttcagcagccacgccctgggcgagagccacgccttcagcgaggaccccatgctgcagaacagccccttcgccaactgggccgtgagctacgacagcagcgccagccagttccccaactacctgcccagcaaggccagcccccccctgggccccgacagcagccacagcagcagcagcgacggcgacgagcccaacggcgccagcagcgaccacatcaccgaggccttccaccaccagcccgagtggggcaaccccaacagagacagaggcagctgggcccagcccgtggacaccggcgtgagcgaggccagcctgggcgacggcgagccccacatccccagcctgctgagcatgagcaccagaaaccacatggacatcaccatcccccccctgccccccgtggcccccgaggtgctgagagtggccgagcacagacacagaagaggcctgatgtacccctacatctaccacgtgctgaccaagggcgagatcaagatccccgtgtgcatcgaggacgagtgcaacatggagctgccccccgccgccctgctgttcagaagcgccagacagtacgtgtacggcgtgctgttcagcctggccgagacccagagaaagatggagagactggccatgagaagaagactgcccgtggaggtgcccagcgtgatcctgaaggagtggagcgcctacaagggcaagagcccccagacccccgagctggtgagcgccctgaccttcagagagtggacctgccccaacctgaagaagctgtggctgggcaaggccgtggaggacaagaacagaagaatgagagccttcctggcctgcatgaagagcgacacccccagcatgctgaaccccgccaacgtgcccacccacctgctgctgatgtgctgcgtgctgagatacatggtgcagtggcccggcggcagaatcctgcacagacacgagctggacaccttcctggcccaggccgtgagcacccagctgtacgagcccgacagactgcaggagctgaagatcgagaagctggacgccagaggcatccagctggccgccctgttcatgagcggcgtggacaccgccctgttcgccaacgacgcctgcggccagcccgtgccctgggagcactgctgcccctggatctacttcgacggcaagctgttccagagcaagctgatcaaggccggcagagagagagtgagcctggtggagctgtgcgacggccaggccgacctggccaccaaggtggagaagatgagacagagcatcctggagggcgtgaacatgaaccaccccccccccagcgccctgctgcccagccccaccttcgtgccccccatggtgcccagcctgtaccccgtgagcctgtacagcagagccatgggcagcatgcccctgcccccccagggcagaagcagaggcttcgccggcctgcaccccatccccccccagggcggcaagctggagatcgccggcatggtggtgggccagtgggccggcagcagaagcagcagaggcagaggcagcttcggcatgcaggtggtgagcgtgggcggccccggcaagggccacggcaaggagcagaccggcagaggcagcaagggccacaagaagggcaacaagcagggcagcagcgacggcgtgagcaagagcctggagctgcaccagggcagaagcagaagccaggtgaacggcaacagcggcgccctgatcaaggaggagaagagcgaccacagactgcccgcccccagccagtgcgccctgagcagagacagcaacgagtgcaacaacggcaacagatacctgcccatgaacaacagagagaagaaccacctgcaggagcagaagctggagaccgtggcccagagaaaggaggactag

SEQ ID NO: 195396 - protein, 188 aa, Artificial Sequence
  derived and/or modified sequence
MGGGWWWARAARLARLRFRRSLLPPQRPRSGGARGSFAPGHGPRAGASPPPVSELDRADAWLLRKAHETAFLSWFRNGLLASGIGVISFMQSDMGREAAYGFFLLGGLCVVWGSASYAVGLAALRGPMQLTLGGAAVGAGAVLAASLLWACAVGLYMGQLELDVELVPEDDGTASAEGPDEAGRPPPE

SEQ ID NO: 195397 - DNA, 567 bp, Artificial Sequence
  derived and/or modified sequence
atgggcggcggctggtggtgggccagagccgccagactggccagactgagattcagaagaagcctgctgcccccccagagacccagaagcggcggcgccagaggcagcttcgcccccggccacggccccagagccggcgccagccccccccccgtgagcgagctggacagagccgacgcctggctgctgagaaaggcccacgagaccgccttcctgagctggttcagaaacggcctgctggccagcggcatcggcgtgatcagcttcatgcagagcgacatgggcagagaggccgcctacggcttcttcctgctgggcggcctgtgcgtggtgtggggcagcgccagctacgccgtgggcctggccgccctgagaggccccatgcagctgaccctgggcggcgccgccgtgggcgccggcgccgtgctggccgccagcctgctgtgggcctgcgccgtgggcctgtacatgggccagctggagctggacgtggagctggtgcccgaggacgacggcaccgccagcgccgagggccccgacgaggccggcagacccccccccgagtag

SEQ ID NO: 195398 - DNA, 567 bp, Artificial Sequence
  derived and/or modified sequence
atgggtgggggttggtggtgggcgcgcgcggctagacttgcacgcctgcgctttcggcggtcgcttctgccgccgcagcggccgaggagcggcggcgctcggggcagctttgctcctggccatggaccaagggcgggggccagccctccacctgtttctgagcttgacagggcagacgcctggctactcagaaaagctcatgaaacagcctttctgtcctggtttaggaacggcctgttagccagtggcattggggtgatatcctttatgcagagcgacatgggtcgagaggcagcgtacgggttttttctccttggaggcctctgtgtggtttggggctctgcttcgtacgcagtcggcctggcagcgttacgtggccctatgcagctgaccctgggaggtgctgccgtaggcgccggggcggtcttggctgctagtctgctctgggcctgcgctgtaggattatacatgggacagctcgaattggacgtggaactggttcctgaggatgacggaaccgcttccgctgaaggccctgatgaggctggcagaccaccacccgagtag

SEQ ID NO: 195399 - DNA, 567 bp, Artificial Sequence
  derived and/or modified sequence
atgggcggcggctggtggtgggcccgggccgcccggctggcccggctgcgcttcagaagaagcctgctgcccccccagaggcccaggtctgggggcgcccggggcagctttgcccctggccacggccccagggctggggccagccccccacctgtgtctgagctggacagagcagatgcctggctgctgaggaaggcccatgaaacagccttcctgtcctggttcagaaatggcctgctggccagcggcatcggggtcatctccttcatgcagagcgacatgggccgggaggccgcctacggcttcttcctgctgggcggcctgtgtgtggtgtggggcagcgccagctatgctgtgggcctggccgccctgcggggccccatgcagctgaccctgggcggcgctgctgtgggcgctggagctgtgctggccgccagcctgctgtgggcctgtgctgtgggcctgtacatgggccagctggagctggatgtggagctggtgcctgaagatgatggaacagccagcgctgagggcccagatgaggccggccggcccccacctgagtag

SEQ ID NO: 195400 - DNA, 567 bp, Artificial Sequence
  derived and/or modified sequence
atgggcggcggctggtggtgggcccgggccgcccggctggcccggctgagattcaggagatcactgctgccaccacagagaccgagatcaggaggagcccgaggttcatttgccccaggccacggtcccagggcgggtgctagcccgcctccagtctccgagttggacagggcagatgcatggctgttgagaaaagcgcacgaaaccgccttcctttcatggtttagaaatggactgttagccagcgggatcggagtgatttctttcatgcagtcagatatgggcagagaggctgcttatggcttttttctgctaggtgggctttgtgtggtgtggggcagcgcctcatacgctgtcgggcttgcggccctgcggggcccgatgcagctgaccctcggaggtgctgccgtgggagcaggagccgtactagctgcctcactgctgtgggcgtgtgcagtgggcctgtatatggggcagctagagctggatgtggagctggtgcccgaggacgacgggactgcttccgctgagggcccagatgaggctggcagacctcccccggagtag

SEQ ID NO: 195401 - DNA, 567 bp, Artificial Sequence
  derived and/or modified sequence
atgggaggcggttggtggtgggcaagggccgctagactagccagactgaggttccggagatcccttctcccaccacagcggccacggagcggcggtgccagggggtcatttgctccgggacacgggccacgagcgggtgcttctcccccacctgtgagtgaactggatcgcgcagacgcctggcttctgcgtaaagcccacgagaccgcattcctatcctggtttagaaacgggctgttggccagcgggataggagtaatcagcttcatgcagtccgacatggggcgtgaggctgcctatggctttttcttactgggaggactatgcgttgtatgggggtcagccagctacgccgttggtttggccgcactgagagggcctatgcagcttacgctcggtggagctgctgtgggtgccggagccgtccttgcggcaagcctgctgtgggcctgcgccgtgggcctttatatgggtcagctagagctggatgtggagctggtacccgaagatgatggcaccgcctcagctgaggggcctgacgaggcagggagaccaccacctgaatag

SEQ ID NO: 195402 - DNA, 654 bp, Artificial Sequence
  derived and/or modified sequence
agtgcgaatcatgggaggcggctggtggtgggctcgggccgctcgccttgcccgtcttcgcttccggaggtcgctactgccgcctcagcggccccggagcgggggcgcccgggggtccttcgcccccggccacggtccccgcgccggggcttcgccgcccccagtgtccgagctggatcgtgcggacgcctggctcctccgaaaagcgcacgagacagccttcctctcctggttccgcaatggcctcctggcatcgggcatcggggtcatctccttcatgcagagtgacatgggtcgggaagcagcatatggcttcttcctgctgggcggcctgtgcgtggtgtggggcagcgcctcgtacgccgtgggcctggcggcgctgcgaggacccatgcagctgacgctggggggcgcggccgtgggcgcgggcgccgtgctggccgccagcctgctctgggcgtgcgccgtgggcctctacatggggcagctggagctggacgtggagctggtgcccgaggacgacgggacggcctccgcggaaggccctgatgaggcgggtcggccgccacccgagtgagcgacacggccgtggggcctggcaggcgctggacagcgcccgaggactgggacattaaacctgacctcccctcctcc

SEQ ID NO: 195403 - DNA, 840 bp, Artificial Sequence
  derived and/or modified sequence
atgaagataatcatactcttggggttcttgggcgctactctcagcgctccccttataccacagcggttgatgagcgcatctaacagcaacgagctgctgctcaatctgaacaacggccaactcttgccactgcagttacagggccctctcaattcgtggattcctccgttttccgggatcctgcagcaacagcagcaggcacagatccctgggctgtctcagttcagcctgtcagctctcgaccaattcgcagggctgctgccaaaccagatcccactcactggagaggcctcctttgcccagggagcccaagctggacaagtggaccctctccagttgcagacacctccacaaacccagcctggtcctagtcacgtgatgccctacgtctttagcttcaaaatgccccaagagcaaggacaaatgttccagtactatccggtgtatatggtgctaccgtgggaacaaccgcagcagaccgtgcccaggagccctcagcagacccggcagcagcaatacgaggagcagatccctttctatgcacagtttggttatatacctcagctggcagaacccgctatctcagggggtcaacagcagctcgcctttgacccacagctggggacagcacctgaaattgccgtgatgtctacaggcgaggagataccttacctacagaaagaagctatcaactttcggcatgactctgccggagtcttcatgccatccacgtctccgaagccaagcactactaacgtgtttacgtcagccgtagaccaaacaatcactcccgaactcccagaggagaaggacaagacggatagtttaagagaaccttag

SEQ ID NO: 195404 - DNA, 840 bp, Artificial Sequence
  derived and/or modified sequence
atgaagattatcatcctgttgggatttctaggagcaaccctctccgcgcccctgattcctcagagattgatgagtgcgagcaatagcaatgagctcctgcttaatctgaacaacggccaacttctcccattgcagctccagggaccacttaatagctggatcccccccttttctgggattttgcagcagcagcaacaagcacaaatccccgggcttagccagtttagtctctcggccctggaccagttcgcagggctcctccccaaccagatccctctgactggtgaagcttcattcgcccagggagctcaggctggccaggtggatccactgcaactgcaaaccccccctcagacccagcccggtccttcccatgtcatgccctacgtcttctcattcaaaatgccgcaagaacagggacagatgttccagtactaccccgtctacatggtcctcccatgggaacagccccagcagaccgtcccccgttccccccagcagaccagacagcaacaatatgaggaacaaatccccttctacgcccagttcggttacatacctcaacttgcggaaccagcaataagtggtggacagcagcaacttgcattcgacccacagttgggcactgcccctgagatcgccgtaatgagcaccggagaagaaatcccatacttacagaaagaagctattaactttcggcatgactcagccggagtgtttatgccaagcacttcaccaaagccatcaaccacaaatgtgtttacctccgctgttgaccagaccataacacccgagttgccagaagaaaaggataagacagatagtttgagagaaccatag

SEQ ID NO: 195405 - DNA, 840 bp, Artificial Sequence
  derived and/or modified sequence
atgaaaattattatcctgttgggcttccttggagccacactgtccgcccctctcatcccacaacgtttgatgagtgcttccaactcaaatgaactgttacttaatctcaacaacggccagttgttgccccttcagctgcaggggcccctgaactcctggattccccctttcagcggtattctgcaacaacagcaacaagcccagattcccggcctgtctcaatttagcttgagtgcccttgaccaattcgctggactacttcctaaccagatcccactcaccggcgaggccagctttgcacaaggagcgcaagcaggccaagtggatcccctccagcttcagactcctcctcaaactcagcccggaccctctcacgttatgccttacgttttttcattcaagatgccccaggagcaaggacagatgttccagtattatcctgtgtatatggtccttccatgggaacaaccacagcagacggttccacgtagccctcagcagaccagacaacagcagtacgaagagcagatccccttctatgcccaattcggctatattccccagctcgcggagccggccatcagcggtgggcagcaacaacttgcattcgacccacagttgggcactgcccctgagatcgccgtaatgagcaccggagaagaaatcccatacttacagaaagaagctattaactttcggcatgactcagccggagtgtttatgccaagcacttcaccaaagccatcaaccacaaatgtgtttacctccgctgttgaccagaccataacacccgagttgccagaagaaaaggataagacagatagtttgagagaaccatag

SEQ ID NO: 195406 - DNA, 840 bp, Artificial Sequence
  derived and/or modified sequence
atgaagatcatcatcctgctgggcttcctgggcgccaccctgagcgcccccctgatcccccagagactgatgagcgccagcaacagcaacgagctgctgctgaacctgaacaacggccagctgctgcccctgcagctgcagggccccctgaacagctggatcccccccttcagcggcatcctgcagcagcagcagcaggcccagatccccggcctgagccagttcagcctgagcgccctggaccagttcgccggcctgctgcccaaccagatccccctgaccggcgaggccagcttcgcccagggcgcccaggccggccaggtggaccccctgcagctgcagacccccccccagacccagcccggccccagccacgtgatgccctacgtgttcagcttcaagatgccccaggagcagggccagatgttccagtactaccccgtgtacatggtgctgccctgggagcagccccagcagaccgtgcccagaagcccccagcagaccagacagcagcagtacgaggagcagatccccttctacgcccagttcggctacatcccccagctggccgagcccgccatcagcggcggccagcagcagctggccttcgacccccagctgggcaccgcccccgagatcgccgtgatgagcaccggcgaggagatcccctacctgcagaaggaggccatcaacttcagacacgacagcgccggcgtgttcatgcccagcaccagccccaagcccagcaccaccaacgtgttcaccagcgccgtggaccagaccatcacccccgagctgcccgaggagaaggacaagaccgacagcctgagagagccctag

SEQ ID NO: 195407 - DNA, 840 bp, Artificial Sequence
  derived and/or modified sequence
atgaagataatcatacttttgggatttcttggagccactttgtccgccccattgattccccagaggcttatgtccgcctctaattcaaatgaactactgcttaatctgaacaatgggcaacttctgcctctgcaactgcagggcccactgaattcttggatccctccgttctccggcattctccaacagcagcagcaggcccagattcctggcctttcccagttttccctgtctgcactggatcagttcgcaggattgctaccaaaccaaattcccctgacaggcgaggcgtcgttcgcgcagggcgcccaggctgggcaggtggaccccctgcagctccagacccccccccagactcagcccggtcccagccacgtgatgccctacgtctttagtttcaagatgccgcaggaacagggtcaaatgtttcagtactaccctgtgtacatggttcttccatgggaacagccacagcagactgttcctagatcaccgcagcaaacccgccaacagcaatacgaggaacagatcccattttacgcacaatttggttacatcccacagctggccgaaccagccatctcaggcgggcagcagcagctggctttcgatcctcagttgggcacagcgcctgaaatagcggtgatgtcaactggggaggagattccatacctacagaaagaagctattaacttccgacacgatagtgctggcgtgtttatgccatccacctcaccgaaaccatccactacgaatgtatttacgagcgccgtcgaccagacaatcacacccgagttgccggaggagaaggataagaccgacagcctccgggaaccatag

SEQ ID NO: 195408 - DNA, 840 bp, Artificial Sequence
  derived and/or modified sequence
atgaagatcatcatcctgctgggcttcctgggcgccaccctgagcgcccccctcatcccccagaggctgatgtctgccagcaacagcaatgagctgctgctgaacctgaacaacggccagctgctgcccctgcagctgcagggccccctgaacagctggatcccccccttcagcggcatcctgcagcagcagcagcaggcccagatccctggcctgagccagttcagcctgagcgccctggaccagtttgctggcctgctgcccaaccagatccccctgaccggggaggccagctttgcccagggcgcccaggccggccaggtggaccccctgcagctgcagaccccaccccagacccagcccggccccagccacgtgatgccctacgtgttctccttcaagatgccccaggagcagggccagatgttccagtactaccctgtgtacatggtgctgccctgggagcagccccagcagacagtgcccaggagcccccagcagacccggcagcagcagtatgaggagcagatccccttctacgcccagtttggctacatcccccagctggccgagcccgccatcagcggcggccagcagcagctggcctttgacccccagctgggcacagcccctgagattgctgtgatgagcactggagaggagatcccctacctgcagaaggaggccatcaacttcagacatgacagcgctggggtcttcatgcccagcaccagccccaagcccagcaccaccaacgtgttcaccagcgctgtggaccagaccatcaccccagagctgcctgaggagaaggacaagacagacagcctgcgggagccctag

SEQ ID NO: 195409 - DNA, 840 bp, Artificial Sequence
  derived and/or modified sequence
atgaagatcatcatcctgctgggcttcctgggcgccaccctgagcgcaccgctgatccctcaacgcctgatgtccgccagcaattctaatgaactccttttgaacttaaacaacggccagctgttgcccctgcaattgcagggccctctgaacagctggatccccccattctccgggatcctgcagcagcaacaacaggcccagatacccggcctgtcccagttctccctcagtgccctcgatcagttcgccggcttactgcctaaccagatacccctgacgggcgaggctagcttcgcccaaggagcgcaagccgggcaagtagatcccttgcagctccagacacccccccagacacagccaggcccttctcatgtgatgccctacgtgtttagcttcaagatgccccaggaacagggccagatgtttcagtattaccctgtgtacatggtgctcccgtgggaacagccccagcagacagtgccaaggagcccccaacagacccggcagcaacagtacgaagagcagatcccattctacgcacagttcggatatatcccacagttagcagagccagccatctctggcggccagcagcagttggccttcgacccacagcttggcaccgcacccgaaatcgccgtgatgagtacaggtgaagaaatcccttatctacagaaagaagccatcaattttagacatgactccgctggcgtgtttatgccaagtacaagcccgaagccgtcaacgacaaacgtgtttacatcagcagtggaccagacaataactccagaactccccgaagagaaggataagaccgatagtcttcgcgagccatag

SEQ ID NO: 195410 - RNA, 840 nt, Artificial Sequence
  derived and/or modified sequence
augaagauuaucauccuguugggauuucuaggagcaacccucuccgcgccccugauuccucagagauugaugagugcgagcaauagcaaugagcuccugcuuaaucugaacaacggccaacuucucccauugcagcuccagggaccacuuaauagcuggaucccccccuuuucugggauuuugcagcagcagcaacaagcacaaauccccgggcuuagccaguuuagucucucggcccuggaccaguucgcagggcuccuccccaaccagaucccucugacuggugaagcuucauucgcccagggagcucaggcuggccagguggauccacugcaacugcaaacccccccucagacccagcccgguccuucccaugucaugcccuacgucuucucauucaaaaugccgcaagaacagggacagauguuccaguacuaccccgucuacaugguccucccaugggaacagccccagcagaccgucccccguuccccccagcagaccagacagcaacaauaugaggaacaaauccccuucuacgcccaguucgguuacauaccucaacuugcggaaccagcaauaagugguggacagcagcaacuugcauucgacccacaguugggcacugccccugagaucgccguaaugagcaccggagaagaaaucccauacuuacagaaagaagcuauuaacuuucggcaugacucagccggaguguuuaugccaagcacuucaccaaagccaucaaccacaaauguguuuaccuccgcuguugaccagaccauaacacccgaguugccagaagaaaaggauaagacagauaguuugagagaaccauag

SEQ ID NO: 195411 - RNA, 840 nt, Artificial Sequence
  derived and/or modified sequence
augaaaauuauuauccuguugggcuuccuuggagccacacuguccgccccucucaucccacaacguuugaugagugcuuccaacucaaaugaacuguuacuuaaucucaacaacggccaguuguugccccuucagcugcaggggccccugaacuccuggauucccccuuucagcgguauucugcaacaacagcaacaagcccagauucccggccugucucaauuuagcuugagugcccuugaccaauucgcuggacuacuuccuaaccagaucccacucaccggcgaggccagcuuugcacaaggagcgcaagcaggccaaguggauccccuccagcuucagacuccuccucaaacucagcccggacccucucacguuaugccuuacguuuuuucauucaagaugccccaggagcaaggacagauguuccaguauuauccuguguauaugguccuuccaugggaacaaccacagcagacgguuccacguagcccucagcagaccagacaacagcaguacgaagagcagauccccuucuaugcccaauucggcuauauuccccagcucgcggagccggccaucagcggugggcagcaacaacuugcauucgacccacaguugggcacugccccugagaucgccguaaugagcaccggagaagaaaucccauacuuacagaaagaagcuauuaacuuucggcaugacucagccggaguguuuaugccaagcacuucaccaaagccaucaaccacaaauguguuuaccuccgcuguugaccagaccauaacacccgaguugccagaagaaaaggauaagacagauaguuugagagaaccauag

SEQ ID NO: 195412 - protein, 200 aa, Artificial Sequence
  derived and/or modified sequence
MLIRHMEHWAHRLFPKLQFEDFIDRVEYLGSKKEVQTCLKRIRLDLPILHEDFVSNNDEVAENNEHDVTSTELDPFLTNLSESEMFASELSRSLTEEQQQRIERNKQLALERRQAKLLSNSQTLGNDMLMNTPRAHTVEEVNTDEDQKEESNGLNEDILDNPCNDAIANTLNEEETLLDQSFKNVQQQLDATSRNITEAR

SEQ ID NO: 195413 - protein, 548 aa, Artificial Sequence
  derived and/or modified sequence
MAAPPARADADPSPTSPPTARDTPGRQAEKSETACEDRSNAESLDRLLPPVGTGRSPRKRTTSQCKSEPPLLRTSKRTIYTAGRPPWYNEHGTQSKEAFAIGLGGGSASGKTTVARMIIEALDVPWVVLLSMDSFYKVLTEQQQEQAAHNNFNFDHPDAFDFDLIISTLKKLKQGKSVKVPIYDFTTHSRKKDWKTLYGANVIIFEGIMAFADKTLLELLDMKIFVDTDSDIRLVRRLRRDISERGRDIEGVIKQYNKFVKPSFDQYIQPTMRLADIVVPRGSGNTVAIDLIVQHVHSQLEERELSVRAALASAHQCHPLPRTLSVLKSTPQVRGMHTIIRDKETSRDEFIFYSKRLMRLLIEHALSFLPFQDCVVQTPQGQDYAGKCYAGKQITGVSILRAGETMEPALRAVCKDVRIGTILIQTNQLTGEPELHYLRLPKDISDDHVILMDCTVSTGAAAMMAVRVLLDHDVPEDKIFLLSLLMAEMGVHSVAYAFPRVRIITTAVDKRVNDLFRIIPGIGNFGDRYFGTDAVPDGSDEEEVAYTG

SEQ ID NO: 195414 - protein, 419 aa, Artificial Sequence
  derived and/or modified sequence
MAAPPARADADPSPTSPPTARDTPGRQAEKSETACEDRSNAESLDRLLPPVGTGRSPRKRTTSQCKSEPPLLRTSKRTIYTAGRPPWYNEHGTQSKEAFAIGLGGGSASGKTTVARMIIEALDVPWVVLLSMDSFYKVLTEQQQEQAAHNNFNFDHPDAFDFDLIISTLKKLKQGKSVKVPIYDFTTHSRKKDWKTLYGANVIIFEGIMAFADKTLLELLDMKIFVDTDSDIRLVRRLRRDISERGRDIEGVIKQYNKFVKPSFDQYIQPTMRLADIVVPRGSGNTVAIDLIVQHVHSQLEEGCAGLGTPVPPAAPDAERPEEHAAGTGHAHHHQVRAHLGTGRPRARAPAQLLAPQGQGDQSRRVHLLLQETDAAAHRARALLPALSGLRRTDPAGAGLCGQVLCGEADHRCVHSARR

SEQ ID NO: 195415 - protein, 548 aa, Artificial Sequence
  derived and/or modified sequence
MAAPPARADADPSPTSPPTARDTPGRQAEKSETACEDRSNAESLDRLLPPVGTGRSPRKRTTSQCKSEPPLLRTSKRTIYTAGRPPWYNEHGTQSKEAFAIGLGGGSASGKTTVARMIIEALDVPWVVLLSMDSFYKVLTEQQQEQAAHNNFNFDHPDAFDFDLIISTLKKLKQGKSVKVPIYDFTTHSRKKDWKTLYGANVIIFEGIMAFADKTLLELLDMKIFVDTDSDIRLVRRLRRDISERGRDIEGVIKQYNKFVKPSFDQYIQPTMRLADIVVPRGSGNTVAIDLIVQHVHSQLEELRFVPRAALASAHQCHPLPRTLSVLKSTPQVRGMHTIIRDKETSRDEFIFYSKRLMRLLIEHALSFLPFQDCVVQTPQGQDYAGKCYAGKQITGVSILRAGETMEPALRAVCKDVRIGTILIQTNQLTGEPELHYLRLPKDISDDHVILMDCTVSTGAAAMMAVRVLLDHDVPEDKIFLLSLLMAEMGVHSVAYAFPRVRIITTAVDKRVNDLFRIIPGIGNFGDRYFGTDAVPDGSDEEEVAYTG

SEQ ID NO: 195416 - DNA, 1647 bp, Artificial Sequence
  derived and/or modified sequence
atggccgccccccccgccagagccgacgccgaccccagccccaccagcccccccaccgccagagacacccccggcagacaggccgagaagagcgagaccgcctgcgaggacagaagcaacgccgagagcctggacagactgctgccccccgtgggcaccggcagaagccccagaaagagaaccaccagccagtgcaagagcgagccccccctgctgagaaccagcaagagaaccatctacaccgccggcagacccccctggtacaacgagcacggcacccagagcaaggaggccttcgccatcggcctgggcggcggcagcgccagcggcaagaccaccgtggccagaatgatcatcgaggccctggacgtgccctgggtggtgctgctgagcatggacagcttctacaaggtgctgaccgagcagcagcaggagcaggccgcccacaacaacttcaacttcgaccaccccgacgccttcgacttcgacctgatcatcagcaccctgaagaagctgaagcagggcaagagcgtgaaggtgcccatctacgacttcaccacccacagcagaaagaaggactggaagaccctgtacggcgccaacgtgatcatcttcgagggcatcatggccttcgccgacaagaccctgctggagctgctggacatgaagatcttcgtggacaccgacagcgacatcagactggtgagaagactgagaagagacatcagcgagagaggcagagacatcgagggcgtgatcaagcagtacaacaagttcgtgaagcccagcttcgaccagtacatccagcccaccatgagactggccgacatcgtggtgcccagaggcagcggcaacaccgtggccatcgacctgatcgtgcagcacgtgcacagccagctggaggagagagagctgagcgtgagagccgccctggccagcgcccaccagtgccaccccctgcccagaaccctgagcgtgctgaagagcaccccccaggtgagaggcatgcacaccatcatcagagacaaggagaccagcagagacgagttcatcttctacagcaagagactgatgagactgctgatcgagcacgccctgagcttcctgcccttccaggactgcgtggtgcagaccccccagggccaggactacgccggcaagtgctacgccggcaagcagatcaccggcgtgagcatcctgagagccggcgagaccatggagcccgccctgagagccgtgtgcaaggacgtgagaatcggcaccatcctgatccagaccaaccagctgaccggcgagcccgagctgcactacctgagactgcccaaggacatcagcgacgaccacgtgatcctgatggactgcaccgtgagcaccggcgccgccgccatgatggccgtgagagtgctgctggaccacgacgtgcccgaggacaagatcttcctgctgagcctgctgatggccgagatgggcgtgcacagcgtggcctacgccttccccagagtgagaatcatcaccaccgccgtggacaagagagtgaacgacctgttcagaatcatccccggcatcggcaacttcggcgacagatacttcggcaccgacgccgtgcccgacggcagcgacgaggaggaggtggcctacaccggctag

SEQ ID NO: 195417 - DNA, 1647 bp, Artificial Sequence
  derived and/or modified sequence
atggccgccccccccgccagagccgacgccgaccccagccccaccagcccccccaccgccagagacacccccggcagacaggccgagaagagcgagaccgcctgcgaggacagaagcaacgccgagagcctggacagactgctgccccccgtgggcaccggcagaagccccagaaagagaaccaccagccagtgcaagagcgagccccccctgctgagaaccagcaagagaaccatctacaccgccggcagacccccctggtacaacgagcacggcacccagagcaaggaggccttcgccatcggcctgggcggcggcagcgccagcggcaagaccaccgtggccagaatgatcatcgaggccctggacgtgccctgggtggtgctgctgagcatggacagcttctacaaggtgctgaccgagcagcagcaggagcaggccgcccacaacaacttcaacttcgaccaccccgacgccttcgacttcgacctgatcatcagcaccctgaagaagctgaagcagggcaagagcgtgaaggtgcccatctacgacttcaccacccacagcagaaagaaggactggaagaccctgtacggcgccaacgtgatcatcttcgagggcatcatggccttcgccgacaagaccctgctggagctgctggacatgaagatcttcgtggacaccgacagcgacatcagactggtgagaagactgagaagagacatcagcgagagaggcagagacatcgagggcgtgatcaagcagtacaacaagttcgtgaagcccagcttcgaccagtacatccagcccaccatgagactggccgacatcgtggtgcccagaggcagcggcaacaccgtggccatcgacctgatcgtgcagcacgtgcacagccagctggaggagctgagattcgtgcccagagccgccctggccagcgcccaccagtgccaccccctgcccagaaccctgagcgtgctgaagagcaccccccaggtgagaggcatgcacaccatcatcagagacaaggagaccagcagagacgagttcatcttctacagcaagagactgatgagactgctgatcgagcacgccctgagcttcctgcccttccaggactgcgtggtgcagaccccccagggccaggactacgccggcaagtgctacgccggcaagcagatcaccggcgtgagcatcctgagagccggcgagaccatggagcccgccctgagagccgtgtgcaaggacgtgagaatcggcaccatcctgatccagaccaaccagctgaccggcgagcccgagctgcactacctgagactgcccaaggacatcagcgacgaccacgtgatcctgatggactgcaccgtgagcaccggcgccgccgccatgatggccgtgagagtgctgctggaccacgacgtgcccgaggacaagatcttcctgctgagcctgctgatggccgagatgggcgtgcacagcgtggcctacgccttccccagagtgagaatcatcaccaccgccgtggacaagagagtgaacgacctgttcagaatcatccccggcatcggcaacttcggcgacagatacttcggcaccgacgccgtgcccgacggcagcgacgaggaggaggtggcctacaccggctag

SEQ ID NO: 195418 - DNA, 1647 bp, Artificial Sequence
  derived and/or modified sequence
atggcagccccccccgcacgggccgatgccgacccttctccaacaagtccaccgacagccagggacacacccggtcggcaagcggagaaaagcgaaacagcctgcgaggataggagtaatgctgaatctctggataggctcctgcccccagtcggtaccggccgaagtcctaggaaacgtaccacttctcaatgcaagagtgagccccctctgctaagaacatctaaaagaaccatttacaccgcagggaggcccccttggtacaacgagcatggaactcagagtaaagaagcatttgccattggcttgggaggggggagtgctagtggcaaaacgaccgttgcaagaatgatcatagaagctttggatgtgccttgggtcgtcctgttgtctatggatagcttttacaaggtcctgaccgaacagcagcaggagcaggccgctcataacaactttaactttgaccacccagatgcgttcgattttgacctgattataagtacattgaagaagctgaagcaggggaaaagtgtcaaggtaccaatctacgactttacaacacattcccggaaaaaggactggaaaactctttatggcgcaaatgtgatcatctttgagggaatcatggcttttgccgataagaccctgctcgaactactagacatgaagatctttgtggacacggactccgatatccggttggtacgcagactccgccgggacatttctgagcggggtagggacatagaaggcgtcatcaaacagtataacaaattcgtgaagcccagttttgaccagtacattcagcccactatgaggctggccgatattgttgtccctcgaggctctggcaacactgtggctatcgatttgatcgtgcagcacgtccacagtcagctggaggagcgcgagctgagtgtcagagcagccctggccagcgcgcatcaatgtcatccgttgcctcggacgctgtccgtgcttaagagtaccccacaggttagagggatgcacactatcattcgcgacaaagagacctcacgagacgagtttattttttattcgaagcgactgatgagattgctgattgaacacgcactgtcttttctccccttccaggattgtgtggtgcaaacaccacagggacaagactatgccggtaaatgttacgcaggaaaacagatcactggagtatcaatccttagagcgggggagactatggagccagctctcagggctgtatgcaaagacgtcaggattgggacaatcctgatccagacaaatcagctgaccggcgagccagagttacattacctccggctgcccaaggacattagtgatgatcatgtgatactgatggactgtacagtgtcaaccggggccgcagctatgatggctgtgagggtgttactggatcatgatgtgcctgaagacaagatctttttgctgagcctccttatggccgagatgggggttcacagcgttgcatacgcattcccgagggtccgcatcatcactacagccgtggacaaaagggtgaacgacctgtttagaattatcccaggaatcggaaattttggagaccggtactttgggaccgacgccgtgccagatgggtctgacgaggaggaggtcgcatatacaggctag

SEQ ID NO: 195419 - DNA, 1647 bp, Artificial Sequence
  derived and/or modified sequence
atggcagctccacccgccagggccgacgccgatccgtcccccacatccccacctaccgctcgggacacacccggccgtcaggccgagaagagtgagacagcctgcgaggatagatccaacgccgagagcctggatagactgttgcctccagtgggaaccggacgcagtccccgcaagcggactacgtcacaatgtaagagcgaacctcctttgttgagaacctccaaacggactatttatacagcaggtaggcccccctggtacaatgaacacggcacacagagcaaagaggccttcgctattggattaggcggggggtcagcctcagggaaaaccacagtggcccgaatgataatcgaagctctggacgtgccctgggtcgtgttgctgtccatggacagcttttataaggttctgacagaacagcagcaggaacaggctgctcacaacaacttcaatttcgaccacccagatgcctttgactttgacctcataattagcactctgaagaaactgaagcagggcaaatccgtaaaagtgccaatttatgattttactacgcactcgagaaagaaggactggaagacactttacggcgccaatgttattatttttgagggaattatggccttcgcagataaaactctgctggagcttttggacatgaagatctttgttgatactgacagcgacataagacttgtgcggcgactaaggcgggacatctctgagagaggccgtgacattgaaggagtaattaaacagtacaataagttcgtaaagccatccttcgatcaatacattcagcccaccatgaggctcgccgacatagtcgtgccacgtggtagcggcaataccgtagccatcgacctgatcgtacagcacgtacacagccagctggaagagctgcggttcgtcccaagagccgctctggcctccgcacatcagtgccatcctttgccacggaccctttctgtcctgaagtccaccccccaggtgaggggcatgcacacaattatacgtgataaggaaacctcccgcgatgagtttatcttttatagtaagcgcctcatgaggctgttgattgagcacgccttgagttttcttccatttcaggattgtgttgttcagacaccacaggggcaggactatgccggcaagtgctacgccggcaaacagattacgggagtgtctatactgcgggccggcgagacgatggaaccagcccttagagcagtctgcaaagacgtgagaattgggaccatccttatccagaccaaccagctcaccggcgaacccgagctgcattacctacgcctgcctaaggacatctcagacgatcacgtcatcttaatggactgcacagtatctacaggggccgccgccatgatggccgtgagggtgttattggaccatgatgttcccgaggacaagattttcctcctatcactcctcatggccgaaatgggtgtgcattctgtggcgtacgctttccctagagtgcgcataataaccaccgccgtggataaaagagtgaacgatctgtttagaatcatccccgggataggtaatttcggagaccggtatttcgggaccgacgcggtccctgatggcagtgacgaggaggaggtcgcatacacagggtag

SEQ ID NO: 195420 - DNA, 1647 bp, Artificial Sequence
  derived and/or modified sequence
atggccgcccccccagcccgggcagatgctgaccccagccccaccagccccccaacagcccgggacaccccaggccggcaggccgagaagtcagaaacagcctgtgaggacaggagcaatgctgagagcctggaccggctgctgccccctgtgggcaccggccgcagccccaggaagaggaccaccagccagtgcaagtctgagccccccctgctgcggaccagcaagaggaccatctacacagctggccggcccccctggtacaatgaacatggcacccagagcaaggaggcctttgccatcggcctgggcggcggcagcgccagcggcaagaccaccgtggccaggatgatcatcgaggccctggatgtgccctgggtggtgctgctgtccatggacagcttctacaaggtgctgacagagcagcagcaggagcaggccgcccacaacaacttcaactttgaccacccagatgcctttgattttgacctgatcatcagcaccctgaagaagctgaagcagggcaagtctgtgaaggtgcccatctatgacttcaccacccacagcaggaagaaggactggaagaccctgtatggagccaacgtcatcatctttgagggcatcatggcctttgctgacaagaccctgctggagctgctggacatgaagatctttgtggacacagacagcgacatccggctggtgcggcggctgcggcgggacatcagcgagcggggccgggacattgaaggagtcatcaagcagtacaacaagtttgtgaagcccagctttgaccagtacatccagcccaccatgaggctggccgacatcgtggtgccccggggcagcggcaacacagtggccatcgacctgattgtgcagcacgtgcacagccagctggaggagcgggagctgtctgtgcgggccgccctggccagcgcccaccagtgccaccccctgcccaggaccctgtctgtgctgaagagcaccccccaggtgcggggcatgcacaccatcatccgggacaaggagaccagcagagatgagttcatcttctacagcaagaggctgatgaggctgctgattgagcacgccctgtccttcctgcccttccaggactgtgtggtgcagaccccccagggccaggactatgctggaaaatgttatgctgggaagcagatcactggagtgtccatcctgcgggccggggagaccatggagcccgccctgcgggctgtgtgcaaggatgtgagaattggcaccatcctgatccagaccaaccagctgaccggggagcctgagctgcactacctgcggctgcccaaggacatcagtgatgaccacgtgatcctgatggactgcaccgtgtccactggagctgctgccatgatggctgtgcgggtgctgctggaccatgatgtgcctgaggacaagatcttcctgctgagcctgctgatggccgagatgggcgtgcacagcgtggcctatgccttcccccgggtgcgcatcatcaccacagctgtggacaagagggtgaatgacctcttccgcatcatccctggcatcggcaactttggagaccgctacttcggcacagatgctgtgcctgatggcagtgatgaggaggaggtggcctacacaggatag

SEQ ID NO: 195421 - DNA, 1647 bp, Artificial Sequence
  derived and/or modified sequence
atggccgcccccccagcccgggcagatgctgaccccagccccaccagccccccaacagcccgggacaccccaggccggcaggccgagaagtcagaaacagcctgtgaggacaggagcaatgctgagagcctggaccggctgctgccccctgtgggcaccggccgcagccccaggaagaggaccaccagccagtgcaagtctgagccccccctgctgcggaccagcaagaggaccatctacacagctggccggcccccctggtacaatgaacatggcacccagagcaaggaggcctttgccatcggcctgggcggcggcagcgccagcggcaagaccaccgtggccaggatgatcatcgaggccctggatgtgccctgggtggtgctgctgtccatggacagcttctacaaggtgctgacagagcagcagcaggagcaggccgcccacaacaacttcaactttgaccacccagatgcctttgattttgacctgatcatcagcaccctgaagaagctgaagcagggcaagtctgtgaaggtgcccatctatgacttcaccacccacagcaggaagaaggactggaagaccctgtatggagccaacgtcatcatctttgagggcatcatggcctttgctgacaagaccctgctggagctgctggacatgaagatctttgtggacacagacagcgacatccggctggtgcggcggctgcggcgggacatcagcgagcggggccgggacattgaaggagtcatcaagcagtacaacaagtttgtgaagcccagctttgaccagtacatccagcccaccatgaggctggccgacatcgtggtgccccggggcagcggcaacacagtggccatcgacctgattgtgcagcacgtgcacagccagctggaggagctgcgctttgtgcccagggctgccctggccagcgcccaccagtgccaccccctgcccaggaccctgtctgtgctgaagagcaccccccaggtgcggggcatgcacaccatcatccgggacaaggagaccagcagagatgagttcatcttctacagcaagaggctgatgaggctgctgattgagcacgccctgtccttcctgcccttccaggactgtgtggtgcagaccccccagggccaggactatgctggaaaatgttatgctgggaagcagatcactggagtgtccatcctgcgggccggggagaccatggagcccgccctgcgggctgtgtgcaaggatgtgagaattggcaccatcctgatccagaccaaccagctgaccggggagcctgagctgcactacctgcggctgcccaaggacatcagtgatgaccacgtgatcctgatggactgcaccgtgtccactggagctgctgccatgatggctgtgcgggtgctgctggaccatgatgtgcctgaggacaagatcttcctgctgagcctgctgatggccgagatgggcgtgcacagcgtggcctatgccttcccccgggtgcgcatcatcaccacagctgtggacaagagggtgaatgacctcttccgcatcatccctggcatcggcaactttggagaccgctacttcggcacagatgctgtgcctgatggcagtgatgaggaggaggtggcctacacaggatag

SEQ ID NO: 195422 - DNA, 1647 bp, Artificial Sequence
  derived and/or modified sequence
atggccgccccccccgcccgggccgacgccgaccccagccccacctcaccacctaccgctcgggatacaccaggacgacaggccgagaagtcagagactgcctgtgaggacagatcaaacgctgagtcactggataggttgttgcccccagtgggcacggggcgaagcccgcgcaaacgaaccactagtcagtgcaaatctgaaccccccctgctccggacaagtaaacggacaatttacacagccgggcgacccccatggtataacgaacatggcacccaatccaaggaagcttttgcaattggcctgggaggaggatccgcttccggcaaaactacagtggccagaatgattattgaggcactggatgttccatgggtggtgcttctttccatggattccttttacaaagtcctcaccgagcaacagcaggagcaggccgcccataacaacttcaacttcgaccacccagacgcattcgattttgatttaattatctcaacactcaaaaagttgaagcaaggaaagtccgtgaaggtgcctatatacgatttcacaactcattcacgtaaaaaggattggaagaccctgtatggtgcaaatgtgatcatcttcgaaggtatcatggcgtttgctgataagactctcttggaattattggacatgaagatcttcgtcgacaccgattctgacattcggttggtacgcaggttgcggcgggatatctctgaacgcggtcgtgatatcgagggagtgattaagcaatacaacaaatttgtcaagccaagtttcgatcagtacatccagccaacaatgcgcctggcggacatcgtggtgccgcggggctcgggcaacacagtggctatcgatctgatcgtgcaacatgtacattcccagctggaggagcgtgagctcagcgtgcgcgcagctctcgcgtcggctcatcagtgccacccactgcctagaaccctctcagtgctgaagtccacaccacaggtccggggcatgcatacaattataagagacaaggaaacctcccgcgacgagttcatcttttattcaaagaggttgatgcgtctgctcattgaacatgccttgagttttctgccatttcaggattgtgtagtccagaccccacagggtcaagactatgcaggtaaatgctacgcaggaaagcagatcactggtgtgtcgattctgagagcaggcgaaactatggaacccgctctgagggctgtgtgtaaagatgttcgaataggaacgatcctcatacagacaaaccagctaactggcgagccggaattgcattacctgcgcttacctaaggacatcagcgacgaccacgtaattctgatggactgcactgtgtcaacgggagcggcggcgatgatggcagttcgcgtcctgttagatcacgatgtgcctgaggataagatttttctgttatcacttctaatggccgaaatgggcgtgcacagcgtggcctacgccttccctagagttagaattattacaacagcagtcgataagcgcgttaacgacctcttcagaataatccccggaataggtaacttcggagatagatattttggaactgacgccgttccagatggctccgatgaggaggaggttgcttatacaggttag

SEQ ID NO: 195423 - DNA, 1647 bp, Artificial Sequence
  derived and/or modified sequence
atggccgccccccccgcccgggccgacgccgaccccagccccacctctcccccaaccgctagagacacccctgggaggcaagcagagaagtccgaaaccgcctgtgaggatcgctccaacgcggagagtcttgaccgtttgttacctcctgtgggcactggcagatctccccgaaaaagaaccacatctcagtgcaaatctgagcccccccttctgagaactagtaagcggacaatctacacggctgggagacccccctggtacaatgagcacggtacgcagtccaaagaggcttttgctatcgggcttggagggggcagtgcgtcagggaagaccaccgtagcccgcatgatcattgaggctctggatgtgccatgggtcgtattgctctctatggacagcttttataaggtgctcacggaacaacagcaagagcaggcagcccacaataatttcaattttgaccatccagacgcattcgatttcgatctaatcatctcaacactcaagaaactgaagcagggtaaatctgtgaaagtgccgatctacgattttacgacacacagccgaaaaaaggattggaagacactgtacggcgccaacgtaattatcttcgagggcattatggcattcgcagacaagaccttactcgaactgctcgacatgaagattttcgtagacaccgactccgacatacgcctggtgaggagactgcgcagagatatctctgaaagggggcgggacatagaaggagtcattaaacaatacaataagttcgtgaagccatccttcgaccagtacattcagcccacaatgaggctcgccgacatcgtcgttcctcgaggtagtggcaataccgtggctattgatctcatcgtccagcacgtgcattcgcaattggaggagctgcgattcgtgccccgtgccgcactggcatcggcccaccagtgtcatcctctccctcgaactttgtcagtcctgaagagcacacctcaggtcagagggatgcacacaatcatcagagacaaagagacctccagagatgagtttatcttttacagcaagagactcatgcgcctgctcatcgaacacgctctatctttcttgcccttccaggactgcgtagtccaaaccccacagggtcaagattatgctggcaagtgttatgcgggcaaacaaattacaggggtctctattctccgtgccggcgaaacaatggagccagcactgcgggcagtctgtaaggacgtccgaattggaaccattctcattcagacaaatcagcttacaggagagcctgagctacactacctcaggttacctaaagacataagcgacgatcacgtcattctgatggactgtacggtgtccacaggcgctgccgcaatgatggccgtcagggtgctccttgaccacgacgtcccagaggacaagatctttcttctgtcactcctcatggcagaaatgggcgtgcactccgtggcatacgccttcccgagggtgcgcataattacgactgccgtcgacaagagggtgaatgacctgtttaggatcatcccaggaattggtaactttggcgatcgatatttcgggaccgacgccgtgcctgacggctccgacgaagaggaggtggcctatacaggctag

SEQ ID NO: 195424 - DNA, 1647 bp, Artificial Sequence
  derived and/or modified sequence
atggccgctccgcctgcgagggcagatgcggacccgtcgcccacctccccccctacagctcgggataccccaggacgtcaggcagagaaaagcgaaaccgcatgtgaagaccgcagtaatgcagagagtttggacagactgttgcccccagtgggaactggacggagccccagaaagcgaactacgtcccagtgtaagtccgaacctcccctcctgcggacaagcaagaggacaatctacacagccggtcgccctccatggtataatgagcacggcactcaatctaaggaggcatttgctatcggactggggggaggttccgcaagcggtaagactacagtcgctagaatgatcattgaggctctggacgtgccttgggtggttttactgtctatggactctttttataaggtactgactgaacagcagcaggaacaggccgctcacaacaatttcaatttcgaccaccccgatgcttttgacttcgatttgattatctccacattgaaaaagttaaagcagggtaagagtgtgaaagtgcccatttatgatttcacaacgcatagtaggaagaaggactggaagacactttacggcgctaatgtgattatcttcgaaggcattatggcgtttgcagataaaacactgttagaactgctagacatgaagatctttgttgataccgattccgacatacgcttagtgagacgcctgcgaagagatattagtgaacgcggtcgggacatcgagggggtcatcaagcaatataacaagttcgtcaagccttcatttgatcagtacattcagccaacaatgcgtctggccgacatagtagtgccaagggggagcggcaacacggtcgccattgacctgatcgtgcagcatgtccattctcaactagaggagcgagaactgtctgttcgagccgcacttgcctctgcccatcagtgtcatccactgcctagaacattgagtgtactgaagtctacccctcaagttagggggatgcatactatcatccgtgacaaggaaacatctcgtgacgagtttatcttctactctaagcgcttgatgcgtcttctgatcgagcacgctctgtcgtttcttccatttcaagactgtgtagtgcagactccgcaggggcaagactacgctgggaagtgttatgctggaaagcagatcaccggggtttctatactcagggccggtgaaaccatggaacctgccctccgggctgtctgcaaggacgttcgtataggcactattctcatccagaccaaccagctgaccggcgagccggagcttcattacctcagactgcccaaggacatcagtgatgaccacgttatactgatggattgcacagtgagtacgggggcagcagctatgatggctgtgcgcgttctattagaccacgatgtgccagaggacaaaattttcctcctatctctgctcatggctgaaatgggtgtccactccgtagcctacgctttccccagagttcgaatcataaccaccgcagtggataagagggtgaatgatctgttccgcatcatacccggtataggcaatttcggcgaccggtactttggaacagacgccgtgcccgatgggtccgatgaagaggaggtggcatacaccgggtag

SEQ ID NO: 195425 - DNA, 1647 bp, Artificial Sequence
  derived and/or modified sequence
atggctgccccacctgccagggcagatgccgaccccagtcctacatctcctcctaccgccagagatactcccggtcggcaggccgagaagtcagagactgcctgtgaagataggagtaacgcagaaagcctggacaggctattgcctccggtgggcacaggacggagtcccaggaagcgtacgacaagccagtgcaagagcgagcctccactacttcgcacatcaaaacggaccatctatactgccggtcgtcccccatggtataacgaacatgggacccaatctaaagaggcattcgccataggactgggaggaggctctgcatccgggaaaacaactgtggcccgtatgataatcgaggccctagacgtcccttgggtggtgttactctctatggattcattctacaaagttttaacagaacagcaacaagaacaagccgctcacaacaatttcaatttcgaccatcccgatgcctttgacttcgatctaatcatctcaaccctgaaaaagctgaagcaaggtaagagtgtgaaggttcccatctacgactttactacacactcccgtaagaaagattggaagacactgtatggcgcaaacgtgattatattcgagggcattatggcctttgcagacaagactctgcttgagctcctcgacatgaagattttcgtcgataccgactccgatattagattagtccggcgtctccgacgcgacatctccgagaggggtagggacatagagggagtgattaaacagtataacaagtttgtcaagccaagctttgaccagtacatacagcccaccatgcggctggccgatattgtggtacccagaggatcaggaaatactgtcgctattgacctcatcgtacaacacgtgcactctcagcttgaggagctgcggttcgttccccgagcagccctggcctcagcccaccagtgtcaccctctcccaagaacactctccgttctgaagtcaacgccacaggtgcgaggcatgcacactatcatccgagataaggaaacctccagggatgagtttatcttttacagcaagaggctgatgcggctgcttatcgagcatgccctgagcttcttaccattccaggactgtgtggtacagaccccccaggggcaagattatgcaggaaagtgctatgctggcaagcagatcaccggggtgagtattctccgcgcaggtgagactatggagccagcactgagggctgtttgcaaagatgtcagaataggcactatccttatacaaaccaaccagttaaccggcgaacccgagctccattaccttagattacctaaggacattagcgacgaccacgtgatactgatggactgtactgtgagcaccggagcagctgctatgatggctgtgagagtcctgctcgatcacgatgtgccggaggataagatcttcctgctcagtctcctgatggccgaaatgggcgtccatagtgtggcttacgcgtttcctcgggtgcgaattataactactgcagtggacaaaagagtgaatgatctttttagaatcatccccggaatcggaaattttggagaccggtatttcggaacggacgcagtgccagatggttctgacgaggaggaggtggcatataccggatag

SEQ ID NO: 195426 - DNA, 1833 bp, Artificial Sequence
  derived and/or modified sequence
tgcgcgccgcccggccaggcccgcaaagaggcctccgagcgccatggctgcgcccccggcccgcgcggacgctgatccttcgcccacgtcgccacctacggcccgagacacaccaggccggcaggctgagaaaagcgagaccgcgtgcgaggaccgcagcaatgcagagtccctggacaggctcctgccacctgtgggcactgggcgctctccccggaagcggaccaccagccagtgcaagtcagagcctcccctgctgcgtacaagcaagcgtaccatctacaccgccgggcggccgccctggtacaatgaacacggcacgcaatccaaagaggccttcgccatcggcttgggaggcggcagtgcctctgggaagaccactgtggccagaatgatcatcgaggccctggatgtgccctgggtggtcttgctgtccatggactccttctacaaggtgctgactgagcagcagcaggaacaggccgcacacaacaacttcaacttcgaccacccagatgcctttgacttcgacctcatcatttccaccctcaagaagctgaagcaggggaagagtgtcaaggtgcccatttatgacttcaccacgcacagccggaagaaggactggaaaacactgtatggtgcaaacgtcatcatctttgagggcatcatggcctttgctgacaagacactgttggagctcctggacatgaagatctttgtggacacagactccgacatccgcctggtacggcggctgcgccgggacatcagtgagcgcggccgggacatcgagggtgtcatcaagcagtacaacaagtttgtcaagccctccttcgaccagtacatccagcccaccatgcgcctggcagacatcgtggtccccagagggagcggcaacacggtggccatcgacctgattgtgcagcacgtgcacagccagctggaggagcgtgaactcagcgtcagggctgcgctggcctcggcacaccagtgccacccgctgccccggacgctgagcgtcctgaagagcacgccgcaggtacggggcatgcacaccatcatcagggacaaggagaccagtcgcgacgagttcatcttctactccaagagactgatgcggctgctcatcgagcacgcgctctccttcctgccctttcaggactgcgtcgtacagaccccgcaggggcaggactatgcgggcaagtgctatgcggggaagcagatcaccggtgtgtccattctgcgcgccggtgaaaccatggagcccgcgctgcgcgctgtgtgcaaagacgtgcgcatcggcaccatcctcatccagaccaaccagcttaccggggagcccgagctccactacctgaggctgcccaaggacatcagcgatgaccacgtgatcctcatggactgcaccgtgtccacgggcgcggcggccatgatggcagtgcgcgtgctcctggaccacgacgtgcctgaggacaagatctttttgctgtcgctgctcatggcagagatgggcgtgcactcagtggcctatgcatttccgcgagtgagaatcatcaccacggcggtggacaagcgggtcaatgaccttttccgcatcatcccaggcattgggaactttggcgaccgctactttgggacagacgcggtccccgatggcagtgacgaggaggaagtggcctacacgggttagctgcccagtgagccatcccgtccccaccaccctcctcctgcctcctgacccaggactgctgaatacaaagatgttaatttttaaaatgttactagtataatttattctatgcattttataaaataaataaagctttagaaaaa

SEQ ID NO: 195427 - DNA, 1827 bp, Artificial Sequence
  derived and/or modified sequence
atgcgcgccgcccggccaggcccgcaaagaggcctccgagcgccatggctgcgcccccggcccgcgcggacgctgatccttcgcccacgtcgccacctacggcccgagacacaccaggccggcaggctgagaaaagcgagaccgcgtgcgaggaccgcagcaatgcagagtccctggacaggctcctgccacctgtgggcactgggcgctctccccggaagcggaccaccagccagtgcaagtcagagcctcccctgctgcgtacaagcaagcgtaccatctacaccgccgggcggccgccctggtacaatgaacacggcacgcaatccaaagaggccttcgccatcggcttgggaggcggcagtgcctctgggaagaccactgtggccagaatgatcatcgaggccctggatgtgccctgggtggtcttgctgtccatggactccttctacaaggtgctgactgagcagcagcaggaacaggccgcacacaacaacttcaacttcgaccacccagatgcctttgacttcgacctcatcatttccaccctcaagaagctgaagcaggggaagagtgtcaaggtgcccatttatgacttcaccacgcacagccggaagaaggactggaaaacactgtatggtgcaaacgtcatcatctttgagggcatcatggcctttgctgacaagacactgttggagctcctggacatgaagatctttgtggacacagactccgacatccgcctggtacggcggctgcgccgggacatcagtgagcgcggccgggacatcgagggtgtcatcaagcagtacaacaagtttgtcaagccctccttcgaccagtacatccagcccaccatgcgcctggcagacatcgtggtccccagagggagcggcaacacggtggccatcgacctgattgtgcagcacgtgcacagccagctggaggagctcaggtttgtccccagggctgcgctggcctcggcacaccagtgccacccgctgccccggacgctgagcgtcctgaagagcacgccgcaggtacggggcatgcacaccatcatcagggacaaggagaccagtcgcgacgagttcatcttctactccaagagactgatgcggctgctcatcgagcacgcgctctccttcctgccctttcaggactgcgtcgtacagaccccgcaggggcaggactatgcgggcaagtgctatgcggggaagcagatcaccggtgtgtccattctgcgcgccggtgaaaccatggagcccgcgctgcgcgctgtgtgcaaagacgtgcgcatcggcaccatcctcatccagaccaaccagcttaccggggagcccgagctccactacctgaggctgcccaaggacatcagcgatgaccacgtgatcctcatggactgcaccgtgtccacgggcgcggcggccatgatggcagtgcgcgtgctcctggaccacgacgtgcctgaggacaagatctttttgctgtcgctgctcatggcagagatgggcgtgcactcagtggcctatgcatttccgcgagtgagaatcatcaccacggcggtggacaagcgggtcaatgaccttttccgcatcatcccaggcattgggaactttggcgaccgctactttgggacagacgcggtccccgatggcagtgacgaggaggaagtggcctacacgggttagctgcccagtgagccatcccgtccccaccaccctcctcctgcctcctgacccaggactgctgaatacaaagatgttaatttttaaaatgttactagtataatttattctatgcattttataaaataaataaagcttt

SEQ ID NO: 195428 - protein, 242 aa, Artificial Sequence
  derived and/or modified sequence
MLRLLRLALAFYGRTADPAERQGPQQQGLPQGDTQLTTVQGVVTSFCGDYGMIDESIYFSSDVVTGNVPLKVGQKVNVVVEEDKPHYGLRAIKVDVVPRHLYGAGPSDSGTRVLIGCVTSINEDNIYISNSIYFSIAIVSEDFVPYKGDLLEVEYSTEPGISNIKATSVKPIRCIHTEEVCITSVHGRNGVIDYTIFFTLDSVKLPDGYVPQVDDIVNVVMVESIQFCFIWRAISITPVHKS

SEQ ID NO: 195429 - DNA, 729 bp, Artificial Sequence
  derived and/or modified sequence
atgctgagactgctgagactggccctggccttctacggcagaaccgccgaccccgccgagagacagggcccccagcagcagggcctgccccagggcgacacccagctgaccaccgtgcagggcgtggtgaccagcttctgcggcgactacggcatgatcgacgagagcatctacttcagcagcgacgtggtgaccggcaacgtgcccctgaaggtgggccagaaggtgaacgtggtggtggaggaggacaagccccactacggcctgagagccatcaaggtggacgtggtgcccagacacctgtacggcgccggccccagcgacagcggcaccagagtgctgatcggctgcgtgaccagcatcaacgaggacaacatctacatcagcaacagcatctacttcagcatcgccatcgtgagcgaggacttcgtgccctacaagggcgacctgctggaggtggagtacagcaccgagcccggcatcagcaacatcaaggccaccagcgtgaagcccatcagatgcatccacaccgaggaggtgtgcatcaccagcgtgcacggcagaaacggcgtgatcgactacaccatcttcttcaccctggacagcgtgaagctgcccgacggctacgtgccccaggtggacgacatcgtgaacgtggtgatggtggagagcatccagttctgcttcatctggagagccatcagcatcacccccgtgcacaagagctag

SEQ ID NO: 195430 - DNA, 1728 bp, Artificial Sequence
  derived and/or modified sequence
agagggagaagtcagcggagaagctgggagctcctttggaggctgcggtgtccctgactctcctgaggggggctcactaacgggtgggtcccatgccacagtgtctgaggagaagcaggaagtgagtccctgaggagacgccgtgacctgagggcttcccttactgaggaggcctcgtgcttcatctgccacaagcggtgcccaggccggtggtgacaactgggacgatgctcaggcttctgagacttgctttggccttctacgggaggacggccgaccctgcagagcgacagggcccacagcagcagggcctcccacaaggtgacacccagttgacaactgtgcagggagttgtcacaagtttctgtggtgattatggcatgattgatgagtcgatctacttcagtagtgatgttgtgactggcaacgtgcctctaaaagttggacaaaaagttaatgtggttgtggaagaagataaaccacattatggattgagagcaatcaaggtggatgttgtgcctcgccatctttatggtgctggaccctcagactcaggaaccagagttttaattggatgtgttacttctataaatgaagataatatttatattagtaacagcatttatttttccatagccattgtttctgaagattttgtgccttataagggtgacttgttagaagttgaatattccactgagccaggcatctcaaacatcaaggcaacttctgtgaagcccatccgttgtattcatacggaagaggtctgcattactagcgtacatggaagaaatggggtgatagattatactatttttttcaccttggattctgtgaaacttcctgatggatacgtacctcaagtagatgatatcgtcaatgtggtcatggtggagagcattcagttctgctttatttggagagcgatttctatcaccccagtgcataaatcgtaatgacaaagcatttttattctgtttatctttccttttatgagcagtaaaggggctggtttaacttaaaaggttagcttagtaagcctaaatagtattttatatatgacttttctggcaaatctaattgagacactggccagtccaactggaccaggaacccagcttagggaaataacttattaattaaaaagcatgctaaattagcttgctagtcactggaggaaaggagttcttaattaaaatgaacacggccattaaatttgaattccatatttcccattagcagcagcggattccaggatgacggaggcctgggacggcccaaaagggaacgtcggagccaaagcatttaactgaaaaggcatcagggacagcatgttaaaggcatgatttaaagttacaatttgacttcagttttgagccccgttatgctgcctgtacaacctgtattgttccatagcctctttcatcttctgtcacccacataacttgcggtgtttgttgttttacttgttccttcttccccatgctagaatgtaaactccacaatggcaggatgtcttttaatctggtttttttttttcttttttctttctttttttttttctgttgtcattaaagcatcaccaagcacttagaagagtgcctggcagactcaatgagcagataaaatgttattaagttcaatgactgaatgactgggccagcaatgatacttacctgtggttcattcatcactggttccttaggaataaaattgttgagcaatgca

SEQ ID NO: 195431 - DNA, 729 bp, Artificial Sequence
  derived and/or modified sequence
atgctccggctgcttcggctggccctggcgttctatggccgcacggcagaccccgctgagagacagggtccacaacaacaaggtctgcctcagggggacactcagttaacaactgttcagggtgtagttacatcattctgcggcgattacggtatgatagacgagtctatttacttcagtagcgatgttgtgacaggcaacgttcccctcaaggtcgggcagaaggttaatgtcgtcgtggaagaggataagccccactatggactcagagcaattaaggtggacgtcgtgcctagacacttgtatggtgcaggccccagcgactcaggtacccgtgtgttaataggctgcgtgacttccatcaacgaagataacatctatatatcgaactctatctacttttctattgccatcgtttctgaggatttcgtgccatacaagggggatctcctggaggtcgagtattctaccgaacctgggatctccaacataaaggccacctccgttaagcctatccgctgtatccacaccgaggaagtctgtatcactagcgttcacggaagaaatggtgttattgactacacaattttcttcaccctagatagcgtgaagctccccgacggatacgtcccacaagtagacgatattgtcaatgtggtgatggtagagtccatccagttttgtttcatctggcgggccattagcatcacaccagttcacaagagctag

SEQ ID NO: 195432 - DNA, 729 bp, Artificial Sequence
  derived and/or modified sequence
atgctgcggctgctgcggctggccctggccttctacggccgcacagctgaccctgctgagcggcagggcccccagcagcagggcctgccccagggcgacacccagctgaccaccgtgcagggcgtggtgaccagcttctgtggggactatggcatgattgatgagagcatctacttcagcagtgatgtggtgactggaaatgtgcccctgaaggtgggccagaaggtgaatgtggtggtggaggaggacaagccccactacggcctgcgggccatcaaggtggatgtggtgcccaggcacctgtatggagctggccccagcgacagcggcaccagggtgctgattggctgtgtgaccagcatcaatgaagacaacatctacatcagcaacagcatctacttcagcatcgccatcgtgtctgaagattttgtgccctacaagggggacctgctggaggtggagtacagcacagagcccggcatcagcaacatcaaggccacctctgtgaagcccatccgctgcatccacacagaggaggtgtgcatcacctctgtgcacggcagaaatggagtcatcgactacaccatcttcttcaccctggacagcgtgaagctgcctgatggctacgtgccccaggtggatgacatcgtgaatgtggtgatggtggagagcatccagttctgcttcatctggagggccatcagcatcacccctgtgcacaagagctag

SEQ ID NO: 195433 - DNA, 729 bp, Artificial Sequence
  derived and/or modified sequence
atgctgcggctgctgcggctggccctggccttctacggccggaccgctgaccctgccgaaaggcagggcccgcaacagcagggcctaccccaaggtgacacccaactgactactgtccagggagtcgttaccagtttttgcggcgattatggcatgattgatgaaagtatctatttttcctctgatgttgttactgggaacgtccctttgaaagtggggcagaaagttaatgtagtcgtggaagaagataagcctcactacggactgagggccataaaggtggatgtggtgccacggcacttgtacggagccggtccatcagactctgggacacgggttctcattgggtgcgttacatctataaacgaagataacatttacatttccaattctatctatttctcaattgcaattgtgtctgaggacttcgtaccctacaagggcgacctgctggaagttgaatatagcactgagccagggataagtaatatcaaggcgaccagtgtgaagccgatccgatgtattcacaccgaggaagtctgcattacctctgtgcacggtcgcaacggcgtgatcgactacaccattttttttacgttagacagtgttaagctccctgatgggtacgtgccacaggtcgacgatattgtgaacgtggtgatggtggagtccatccaattctgctttatatggcgagcaatctccattacccctgtgcataagagttag

SEQ ID NO: 195434 - DNA, 729 bp, Artificial Sequence
  derived and/or modified sequence
atgctcaggctgttgaggctcgccctggcattctatggacggacggccgatccggcagagagacagggccctcagcagcaaggcttgcctcagggcgacacccagctcaccaccgtccagggggtggtaacaagtttttgcggcgactatggcatgatcgatgagtcgatctactttagcagcgacgtcgtgacagggaacgtgccactaaaagtggggcagaaggttaacgtggttgtggaagaagataagcctcattacggcttgagggccatcaaagtcgatgttgtcccccgtcacctctacggcgctgggccttctgactccgggacacgggtgctgataggctgcgtgacgtcgataaatgaagataacatttacatctccaactccatctacttttctattgcaatagtctcggaggattttgtaccttacaagggagatctgcttgaagttgagtattcaacagaaccaggaatctccaatattaaggctacatcggttaagccaataagatgcatccacacagaggaggtctgcattactagcgttcacgggcgaaatggagttattgactatactattttcttcacactggacagcgttaaacttccagatggctacgtaccccaggtggatgatatcgtgaacgtggttatggtcgaatcaatccagttctgtttcatttggcgagcaatctcgattacgccagtgcataagtcgtag

SEQ ID NO: 195435 - protein, 978 aa, Artificial Sequence
  derived and/or modified sequence
MSAEAADREAATSSRPCTPPQTCWFEFLLEESLLEKHLRKPCPDPAPVQLIVQFLEQASKPSVNEQNQVQPPPDNKRNRILKLLALKVAAHLKWDLDILEKSLSVPVLNMLLNELLCISKVPPGTKHVDMDLATLPPTTAMAVLLYNRWAIRTIVQSSFPVKQAKPGPPQLSVMNQMQQEKELTENILKVLKEQAADSILVLEAALKLNKDLYVHTMRTLDLLAMEPGMVNGETESSTAGLKVKTEEMQCQVCYDLGAAYFQQGSTNSAVYENAREKFFRTKELIAEIGSLSLHCTIDEKRLAGYCQACDVLVPSSDSTSQQLTPYSQVHICLRSGNYQEVIQIFIEDNLTLSLPVQFRQSVLRELFKKAQQGNEALDEICFKVCACNTVRDILEGRTISVQFNQLFLRPNKEKIDFLLEVCSRSVNLEKASESLKGNMAAFLKNVCLGLEDLQYVFMISSHELFITLLKDEERKLLVDQMRKRSPRVNLCIKPVTSFYDIPASASVNIGQLEHQLILSVDPWRIRQILIELHGMTSERQFWTVSNKWEVPSVYSGVILGIKDNLTRDLVYILMAKGLHCSTVKDFSHAKQLFAACLELVTEFSPKLRQVMLNEMLLLDIHTHEAGTGQAGERPPSDLISRVRGYLEMRLPDIPLRQVIAEECVAFMLNWRENEYLTLQVPAFLLQSNPYVKLGQLLAATCKELPGPKESRRTAKDLWEVVVQICSVSSQHKRGNDGRVSLIKQRESTLGIMYRSELLSFIKKLREPLVLTIILSLFVKLHNVREDIVNDITAEHISIWPSSIPNLQSVDFEAVAITVKELVRYTLSINPNNHSWLIIQADIYFATNQYSAALHYYLQAGAVCSDFFNKAVPPDVYTDQVAILCQFLREIDYKTAFKSLQEQNSHDAMDSYYDYIWDVTILEYLTYLHHKRGETDKRQIAIKAIGQTELNASNPEEVLQLAAQRRKKKFLQAMAKLYF

SEQ ID NO: 195436 - protein, 995 aa, Artificial Sequence
  derived and/or modified sequence
MSAEAADREAATSSRPCTPPQTCWFEFLLEESLLEKHLRKPCPDPAPVQLIVQFLEQASKPSVNEQNQVQPPPDNKRNRILKLLALKVAAHLKWDLDILEKSLSVPVLNMLLNELLCISKVPPGTKHVDMDLATLPPTTAMAVLLYNRWAIRTIVQSSFPVKQAKPGPPQLSVMNQMQQEKELTENILKVLKEQAADSILVLEAALKLNKDLYVHTMRTLDLLAMEPGMVNGETESSTAGLKVKTEEMQCQVCYDLGAAYFQQGSTNSAVYENAREKFFRTKELIAEIGSLSLHCTIDEKRLAGYCQACDVLVPSSDSTSQQLTPYSQVHICLRSGNYQEVIQIFIEDNLTLSLPVQFRQSVLRELFKKAQQGNEALDEICFKVCACNTVRDILEGRTISVQFNQLFLRPNKEKIDFLLEVCSRSVNLEKASESLKGNMAAFLKNVCLGLEDLQYVFMISSHELFITLLKDEERKLLVDQMRKRSPRVNLCIKPVTSFYDIPASASVNIGQLEHQLILSVDPWRIRQILIELHGMTSERQFWTVSNKWEVPSVYSGVILGIKDNLTRDLVYILMAKGLHCSTVKDFSHAKQLFAACLELVTEFSPKLRQVMLNEMLLLDIHTHEAGTGQAGERPPSDLISRVRGYLEMRLPDIPLRQVIAEECVAFMLNWRENEYLTLQVPAFLLQSNPYVKLGQLLAATCKELPGPKESRRTAKDLWEVVVQICSVSSQHKRGNDGRVSLIKQRESTLGIMYRSELLSFIKKLREPLVLTIILSLFVKLHNVREDIVNDITAEHISIWPSSIPNLQSVDFEAVAITVKELVRYTLSINPNNHSWLIIQADIYFATNQYSAALHYYLQAGAVCSDFFNKAVPPDVYTDQVIKRMIKCCSLLNCHTQVAILCQFLREIDYKTAFKSLQEQNSHDAMDSYYDYIWDVTILEYLTYLHHKRGETDKRQIAIKAIGQTELNASNPEEVLQLAAQRRKKKFLQAMAKLYF

SEQ ID NO: 195437 - DNA, 3321 bp, Artificial Sequence
  derived and/or modified sequence
gtttccgggacgttcggagggtggcctctctcccaccgggttccgcataccccaggcaccggcccgcatccaagtgtcaggttggagccgggaagcggccctggtggtagcggcggcgggggcaggatgagcgcggaggcggcggaccgggaggcggccacctccagccggccctgcaccccgccgcagacctgctggtttgagtttctgctggaggagtcactgttggagaaacatctgcgcaagccctgcccggatcctgcaccagttcaacttatagttcagtttttggaacaggcttccaaaccttcagttaatgaacaaaaccaagttcaacctccgcctgataacaagagaaatcgtattttaaaactacttgctcttaaagttgctgcacatttgaagtgggacttagacatattagagaaaagtttgtctgttccagtattgaatatgctactaaatgaactactctgcatcagtaaagttcctcctgggacaaagcatgtagacatggatctggccactttacctccgaccactgccatggctgtacttctctataatagatgggcaattaggacaattgttcaaagtagttttccagtcaaacaggcaaaacccggaccccctcagttaagtgttatgaatcaaatgcaacaggaaaaagagctaacagaaaacattttgaaagtgctcaaagaacaagctgctgattctattttggtactagaagcagccctaaaattaaacaaggatctttatgtccatacgatgagaactctagatttattggccatggaaccaggcatggtaaatggagaaactgagagttctactgctggattgaaagtcaaaaccgaagaaatgcagtgccaggtgtgctatgatttgggcgcagcatacttccagcaaggctccacaaattcagctgtctatgaaaatgccagggaaaaattttttagaaccaaagaactaattgcagagataggttcattatctcttcattgtaccatagatgagaagcggttagctggctattgtcaagcatgtgatgttcttgtaccttcttctgatagtacatctcaacagttgactccatatagtcaagtccatatttgtttgagatctggcaactatcaggaggtaatacagattttcattgaagacaacttaaccttgagtttacctgtccagttccgacagtcagtcctaagagaactctttaagaaagctcaacagggaaatgaagctctagatgaaatctgttttaaagtttgtgcctgtaatacagtccgtgatatactggaaggcagaacaattagtgttcaatttaaccagctatttcttagaccaaataaagagaaaatagactttcttcttgaggtatgttcaagatcagtaaatttagaaaaagcttcagagtctttgaaaggaaacatggctgcttttctaaagaatgtgtgtctggggttggaagatctgcagtatgttttcatgatttcttcacatgagcttttcattacattgttgaaagatgaagaacgaaagctacttgttgatcagatgaggaagagatcccctagagtaaatctgtgcattaaacctgtaacttcattttatgatatcccagcttcagcaagtgtcaacattggtcagttagagcatcaacttatattgtcagtggatccttggaggattagacaaattttaattgaattacatggtatgacttcagagcgccagttctggacagtgtctaataagtgggaagtaccttctgtctatagtggtgttatcctgggaattaaagacaatttaacaagagatttggtttatattcttatggccaaaggtttgcactgcagtactgttaaggacttttcccatgctaaacagctctttgctgcttgtttggagttggtaacagagttctcaccgaagcttcgtcaggtcatgctgaatgagatgttgcttttggatattcatacacacgaagctgggacagggcaggcaggagagagaccgccatccgaccttataagtagagtacgaggctatctggaaatgaggcttcctgatattcctcttcgtcaagttatagctgaggaatgtgttgcctttatgttaaactggagagaaaatgaataccttacactccaagttcctgcatttttgcttcagagtaatccatatgtaaagcttggacagcttttagcagctacatgcaaagaacttccaggccctaaagaaagtagacggactgccaaagacctttgggaagttgttgttcaaatctgtagtgtgtccagtcagcacaaacgaggaaatgatggcagagttagtttaataaaacagagggaatctacgttaggtatcatgtatcggagtgaactgctttcttttatcaaaaaattacgagaaccactcgttttgactattattttatcactctttgtgaaacttcacaatgttcgggaggacattgtgaatgatattacagctgaacacatttctatttggccatcttccattcccaacctccagtctgtggactttgaagctgtggcaatcacagtgaaagagctagttcgatatacactcagtataaatccaaataaccattcttggttaattatccaggcagatatttactttgcaacgaatcagtattcagcagctcttcactattacctccaggcaggagctgtgtgttctgacttctttaacaaggctgtgccccctgatgtttatacagaccaggtggccattttatgtcagttcctcagagaaattgactacaaaacagcgtttaaatctctgcaagaacaaaacagtcatgatgctatggactcctactacgactacatatgggatgttaccattttggaatacttgacttatcttcatcataaaagaggagaaacagataaaagacaaattgcaatcaaagccatcggccagacagagttgaatgcaagcaatccagaagaagtgttacagctggcagcgcagagaaggaaaaaaaagtttctccaagcaatggcaaaactttacttttaagcagttaaatttttttaacttttattttttaaacaatgggctaaaaataaacagtattaaaaggttaagtttatataatacatatgtacacaattagtggtgttttcttttcagacaaaatactgaaacaaatattagtttaaaaacaaactatacagaagacttcataccgtaacaataaatgtatagtttcttcaaagggagaagagattcacatatctgataacaaaataaactagcaatctagttttctaatct

SEQ ID NO: 195438 - DNA, 4633 bp, Artificial Sequence
  derived and/or modified sequence
tgtgtgagtttccgggacgttcggagggtggcctctctcccaccgggttccgcataccccaggcaccggcccgcatccaagtgtcaggttggagccgggaagcggccctggtggtagcggcggcgggggcaggatgagcgcggaggcggcggaccgggaggcggccacctccagccggccctgcaccccgccgcagacctgctggtttgagtttctgctggaggagtcactgttggagaaacatctgcgcaagccctgcccggatcctgcaccagttcaacttatagttcagtttttggaacaggcttccaaaccttcagttaatgaacaaaaccaagttcaacctccgcctgataacaagagaaatcgtattttaaaactacttgctcttaaagttgctgcacatttgaagtgggacttagacatattagagaaaagtttgtctgttccagtattgaatatgctactaaatgaactactctgcatcagtaaagttcctcctgggacaaagcatgtagacatggatctggccactttacctccgaccactgccatggctgtacttctctataatagatgggcaattaggacaattgttcaaagtagttttccagtcaaacaggcaaaacccggaccccctcagttaagtgttatgaatcaaatgcaacaggaaaaagagctaacagaaaacattttgaaagtgctcaaagaacaagctgctgattctattttggtactagaagcagccctaaaattaaacaaggatctttatgtccatacgatgagaactctagatttattggccatggaaccaggcatggtaaatggagaaactgagagttctactgctggattgaaagtcaaaaccgaagaaatgcagtgccaggtgtgctatgatttgggcgcagcatacttccagcaaggctccacaaattcagctgtctatgaaaatgccagggaaaaattttttagaaccaaagaactaattgcagagataggttcattatctcttcattgtaccatagatgagaagcggttagctggctattgtcaagcatgtgatgttcttgtaccttcttctgatagtacatctcaacagttgactccatatagtcaagtccatatttgtttgagatctggcaactatcaggaggtaatacagattttcattgaagacaacttaaccttgagtttacctgtccagttccgacagtcagtcctaagagaactctttaagaaagctcaacagggaaatgaagctctagatgaaatctgttttaaagtttgtgcctgtaatacagtccgtgatatactggaaggcagaacaattagtgttcaatttaaccagctatttcttagaccaaataaagagaaaatagactttcttcttgaggtatgttcaagatcagtaaatttagaaaaagcttcagagtctttgaaaggaaacatggctgcttttctaaagaatgtgtgtctggggttggaagatctgcagtatgttttcatgatttcttcacatgagcttttcattacattgttgaaagatgaagaacgaaagctacttgttgatcagatgaggaagagatcccctagagtaaatctgtgcattaaacctgtaacttcattttatgatatcccagcttcagcaagtgtcaacattggtcagttagagcatcaacttatattgtcagtggatccttggaggattagacaaattttaattgaattacatggtatgacttcagagcgccagttctggacagtgtctaataagtgggaagtaccttctgtctatagtggtgttatcctgggaattaaagacaatttaacaagagatttggtttatattcttatggccaaaggtttgcactgcagtactgttaaggacttttcccatgctaaacagctctttgctgcttgtttggagttggtaacagagttctcaccgaagcttcgtcaggtcatgctgaatgagatgttgcttttggatattcatacacacgaagctgggacagggcaggcaggagagagaccgccatccgaccttataagtagagtacgaggctatctggaaatgaggcttcctgatattcctcttcgtcaagttatagctgaggaatgtgttgcctttatgttaaactggagagaaaatgaataccttacactccaagttcctgcatttttgcttcagagtaatccatatgtaaagcttggacagcttttagcagctacatgcaaagaacttccaggccctaaagaaagtagacggactgccaaagacctttgggaagttgttgttcaaatctgtagtgtgtccagtcagcacaaacgaggaaatgatggcagagttagtttaataaaacagagggaatctacgttaggtatcatgtatcggagtgaactgctttcttttatcaaaaaattacgagaaccactcgttttgactattattttatcactctttgtgaaacttcacaatgttcgggaggacattgtgaatgatattacagctgaacacatttctatttggccatcttccattcccaacctccagtctgtggactttgaagctgtggcaatcacagtgaaagagctagttcgatatacactcagtataaatccaaataaccattcttggttaattatccaggcagatatttactttgcaacgaatcagtattcagcagctcttcactattacctccaggcaggagctgtgtgttctgacttctttaacaaggctgtgccccctgatgtttatacagaccaggtaataaaacgaatgataaaatgttgttctttgctgaattgccacacacaggtggccattttatgtcagttcctcagagaaattgactacaaaacagcgtttaaatctctgcaagaacaaaacagtcatgatgctatggactcctactacgactacatatgggatgttaccattttggaatacttgacttatcttcatcataaaagaggagaaacagataaaagacaaattgcaatcaaagccatcggccagacagagttgaatgcaagcaatccagaagaagtgttacagctggcagcgcagagaaggaaaaaaaagtttctccaagcaatggcaaaactttacttttaagcagttaaatttttttaacttttattttttaaacaatgggctaaaaataaacagtattaaaaggttaagtttatataatacatatgtacacaattagtggtgttttcttttcagacaaaatactgaaacaaatattagtttaaaaacaaactatacagaagacttcataccgtaacaataaatgtatagtttcttcaaagggagaagagattcacatatctgataacaaaataaactagcaatctagttttctaatctactttatgaggctggattttttttttagaaaagctaatttaaaatatttagaaatagctagcctatgtacagcaagttttcatgtctttttttaataaatagatttctaggagtcagtatatatttaatactcttcttccttaagaaaatagaagtttaggtcaagtgttaagctttatcactttgacactgtccttatctcacaatggaggaatttagaaaggaccttaacagtttcacaaacataaataaagccttagtcacactaaattaaaaaaaaaaattccttagggatatcttagagtagtaaagtgacttcctcatataaatagtttgaaagggtacttaagtttttcacccaaattgtgatatacaaaaaggttattaccaagcaacctacatgtcaagaaagccccagttaggaaggagccacagcatttatcttgtttataatttctttggtactcccactgtttagagcacaggttgaacaccatgttcatctaagccttattagttaaaaaatgtgttatggcaaggcaaataaactagtttaaaaaacattaaatttcaccatttgtagaaattcaagttttataatagcttgctatagcagctatagataaattagtcaccttattacaaaactaaacctttgtaaacaagtttaaatttaattttcaagaaccaaattgcactagtcaagagtgtaggaattttgagaatctaacaactagattcaaagtactgtatcacttagtataccctttaaggtagcacttatccagtccaaaactccagtgacaaaattcctagtttatcaagataaacacagtaacactggattaaaggaaaaacattgctatggtatagactgtggttggcttctatccagtaaccttgggaatgaagacatctttgtaaacaagtcctgctgtttctttaacagctaacataggaaataattaaatgtattctttagtgccaattgtaagttttaaaatcagaatggcagtgtaacttgtgaattggctagggcaatcaatcacagcactactttctgtaaaactttagtagttcagtgataccagttctacccaatcttggtgaattccaacttgtttgcttagttatcttctttagtgttttcctggtggtttttcagtgctcttcggtggtgtcataatgcctccattgcacactggtgacaactgtcccccttttctgaaggtgtttatgtaatttacttcctcc

SEQ ID NO: 195439 - DNA, 2937 bp, Artificial Sequence
  derived and/or modified sequence
atgtccgccgaggccgcagatagggaggctgcaacaagttccaggccctgtactccaccccaaacgtgctggttcgaattcctcctcgaggaaagcctgctggaaaagcatctgcgaaaaccatgtcctgaccccgcacctgtgcagttgatcgtccagttcctggagcaagcctccaagccttcagtaaacgaacagaaccaggtgcagccccctccggacaacaagcgcaatagaattttgaagctgctagccctcaaggttgctgcccatctcaaatgggacttggacatcctcgagaagagtctgagcgtgcccgtgttgaatatgctgcttaacgagctgctctgcatctcgaaagtgccgcccggaacaaagcacgtcgacatggacctggcgactttaccccccacgacggctatggccgttctgctctacaatcggtgggccatccgcactattgtgcagtcctccttccccgtgaaacaggccaaacccggacccccccaactgtccgtgatgaatcagatgcagcaagagaaggagttgacagaaaacattctcaaggtactcaaagagcaagccgccgacagtatcctcgtgttggaggcagcactcaaactcaataaagacctttatgttcacacaatgcgcacactggatttactggcaatggaacccgggatggtaaacggcgagacagaaagttcgaccgcgggtcttaaggtgaaaacggaagagatgcaatgccaggtgtgttatgacctgggggctgcatactttcagcaaggctctactaatagcgcagtctacgagaatgcaagagaaaaatttttccgaactaaagaactgatcgcagaaatcgggtctctgtctctgcactgcaccatcgacgagaagcgcctggccggatactgccaggcgtgtgacgtgctggttccgtcgtcagattcaacctcccagcagctgaccccatactcacaggttcatatttgtttaagaagcggcaattatcaggaggtcattcagatcttcatcgaagacaaccttacccttagcctgcccgtgcagtttcggcaatctgtattacgagagctgttcaagaaggcgcagcaaggaaacgaagctctggacgagatctgcttcaaggtgtgcgcctgcaatactgtgagggacatacttgagggtagaaccatctccgtacaattcaaccaactctttctccggcccaacaaggagaagatagatttcctccttgaggtctgttccagaagtgttaatctggagaaagcctcagagtctcttaagggaaacatggcggccttcctgaagaacgtgtgcttagggctggaagatctgcagtacgtgttcatgatcagcagccatgaactctttataaccttgctgaaggacgaagaaaggaagcttttggttgatcaaatgcgcaagagatctccccgggtcaatctgtgtatcaaacccgtcactagtttttacgatatacctgctagtgcaagtgtgaacattgggcagctggagcaccagctgatcctgagtgtcgacccatggcggatccgccagatcctgatcgaattacacggcatgacatccgagcgacagttttggacagtttccaacaaatgggaagtaccgagcgtctacagcggtgtaatcttgggtattaaagataatctgacccgagaccttgtctacattctcatggccaagggcctgcactgttcaaccgttaaagatttttcccacgcaaaacagctgtttgctgcctgtctcgaacttgtcaccgaattctcgccaaagttaaggcaggtaatgctgaacgaaatgttgctgctcgacattcacacacacgaagctggaactggccaggctggagaaagacccccaagcgacctcatttcacgggtcaggggctacctggagatgcgcctccctgacatccccctgagacaggtgattgcagaagaatgtgtggccttcatgcttaactggcgcgagaatgaatatttaactctccaagttcccgcctttctgcttcagtctaacccatacgtgaagctcggccaattgttggcagccacgtgcaaggaactgcccgggcccaaggagtctcgaaggacagctaaagatctgtgggaagtagtcgttcagatctgctcagtcagtagccaacacaagagggggaacgatggcagggtgagtttgatcaaacagagggaatcaaccttggggatcatgtatcgtagtgaactgctgagctttatcaagaagctacgagaacctctggtactgaccatcattctcagccttttcgttaagctgcacaatgtgcgggaggacatcgtcaatgatatcacggccgaacatattagtatctggccgagtagcatcccgaacctccaaagtgtagacttcgaggctgtcgctatcaccgtgaaagagctggtgcgttatacgctctctatcaaccccaacaaccactcttggctaattatccaggctgacatctactttgccaccaatcaatattcagccgctttgcactactatctgcaagctggtgccgtctgcagtgattttttcaataaagctgtccctcctgacgtgtacaccgaccaggtagccatcctctgtcagttcctgcgcgagatagactacaagacagcatttaaaagcctgcaagagcagaatagtcatgacgctatggattcatactatgactacatatgggatgtaactatcctcgaatacctcacttatcttcatcataagcgaggagaaaccgacaaacgccagatcgctatcaaagccattgggcagaccgagttaaatgcgagcaaccctgaagaggtgcttcagctcgccgcacagcggcgcaaaaaaaaatttcttcaggccatggctaaactatatttctag

SEQ ID NO: 195440 - DNA, 2988 bp, Artificial Sequence
  derived and/or modified sequence
atgagcgcagaggcagccgacagggaagccgcaacctcctcccgcccttgcactcccccacagacatgctggttcgaattcctcctggaggaaagccttttggaaaagcacctgaggaagccttgccccgatccagctcctgttcaattaatcgtccaatttttagaacaggccagcaagccttccgttaacgagcagaaccaggtccagccaccacctgataataaaaggaatagaatcctgaagctacttgcattgaaagtcgccgctcatctgaaatgggacctggatatcttagagaaatcgcttagcgttcccgtgcttaacatgttgctgaacgagctcttgtgtatctccaaagtgcctcctggaacgaaacacgtggatatggacctcgccacgttacctccaaccaccgcaatggccgtgctcttatataatcgctgggcgatcaggaccattgttcagtcttcctttcctgttaaacaggccaaaccggggcctcctcagctctcagtcatgaatcagatgcagcaggagaaggagcttactgagaacatcctgaaagtgctcaaggaacaggccgcagacagcatccttgtgctggaagcagctctcaagctcaacaaggacctgtacgtgcacaccatgaggactcttgatttgctcgcaatggagcccgggatggtcaacggcgaaaccgagagcagcacagctggtttaaaggtgaagacagaagagatgcagtgccaggtatgctatgacctgggggccgcctatttccagcagggcagtaccaacagcgctgtgtacgaaaatgcgcgggagaaatttttccggaccaaggagcttatcgcggaaatcggttctctgagcctccactgcactatcgatgaaaaacgcttagcgggctattgtcaggcctgcgacgtcctggtgccatctagcgattccaccagccaacagcttacaccttacagccaggtccacatttgcttgcgttctggaaattatcaggaagtgatccagatcttcatagaagataatctgaccctgtctctccctgtgcaattccgccagagtgtgttacgagagctcttcaagaaggctcaacagggtaatgaagctttggatgagatttgcttcaaggtgtgtgcatgcaataccgtgcgcgatatcttagaggggcgaaccattagcgtgcagtttaatcaactgtttctgaggcctaacaaagagaaaatcgactttcttctggaggtatgctcccgcagcgtcaatttagagaaagcatcggagagtctgaaaggcaacatggcagctttcctcaagaatgtctgcctgggcctggaagacctgcagtatgtgttcatgatctcttctcacgaactctttataactctccttaaggacgaggagcgcaaacttttggtagatcaaatgcgaaaacgcagccctcgagtgaatctttgtatcaagccagttaccagcttctacgacatcccggcttcagccagcgtgaacatcgggcaactcgagcaccagcttattttgtctgtagatccatggaggattcggcagatcttgatagagctgcacggcatgacctctgagaggcagttctggactgtctccaacaagtgggaagtgccatcagtgtatagcggagtgattctcggcattaaggacaacctgacacgggacttggtgtacatcctgatggccaaaggcttacattgcagtaccgtaaaagatttctcccatgccaaacagctgttcgccgcctgcctggaactcgtcaccgagttttctccgaaactcaggcaggtgatgctcaatgagatgttactgctggacatccacacacacgaagcaggcaccggccaggctggagagaggcctccatccgatctgatatcacgggtgcggggctacctggagatgcgtcttcccgacattccactcaggcaagttatagccgaggagtgcgtggccttcatgctgaactggagggagaacgaatacctcactctccaagtccccgcctttctgctgcagtcaaacccctacgtcaagcttggtcaattactggccgctacctgcaaggagctgcctggccccaaggagagtagaaggactgccaaagatctgtgggaggtagtcgttcagatttgttcagtgagcagccagcataaacgaggtaacgacggccgtgtctccctgatcaagcagcgggagtctactttaggcataatgtacagaagcgagctgctcagctttattaaaaagctccgcgaacccctggtgttgacaatcatcctgtctctatttgtaaaacttcacaatgttcgcgaggatattgtaaacgacataactgccgaacatatttccatctggccttcatctattcccaacttgcaaagcgttgatttcgaggcagtggccatcaccgtgaaagagttagtcagatatactttaagtattaaccccaataaccactcctggctgatcatacaagctgacatctattttgcaactaatcagtactctgcagctctccactattatctgcaggcaggagctgtttgttccgatttcttcaacaaggcggtccctccagacgtttacacagatcaggtaattaagcgcatgattaagtgctgtagtctgcttaactgccacacccaggtcgccatattatgccaattcctaagagaaatcgattacaagactgcttttaagtccttacaggagcagaatagccatgacgccatggacagctattatgactacatctgggacgtgactattttggagtacctgacctacctgcatcataagagaggggagacggataagcggcagattgctataaaggccatcggtcagactgaactgaatgcctcaaatcctgaggaagtgctccaactggccgcacagaggcggaagaagaagtttctccaggccatggctaaactttacttctag

SEQ ID NO: 195441 - DNA, 2937 bp, Artificial Sequence
  derived and/or modified sequence
atgtctgctgaggccgctgaccgggaggccgccaccagcagccggccctgcaccccaccccagacctgctggtttgagttcctgctggaggagagcctgctggagaagcacctgaggaagccctgcccagaccctgcccctgtgcagctgattgtgcagttcctggagcaggccagcaagcccagcgtgaatgagcagaaccaggtgcagcccccaccagacaacaagaggaaccgcatcctgaagctgctggccctgaaggtggccgcccacctgaagtgggacctggacatcctggagaagagcctgtctgtgcctgtgctgaacatgctgctgaatgagctgctgtgcatcagcaaggtgcccccaggcaccaagcacgtggacatggacctggccaccctgccccccaccacagccatggctgtgctgctgtacaaccgctgggccatccgcaccatcgtgcagagcagcttccctgtgaagcaggccaagccaggccccccccagctgtctgtgatgaaccagatgcagcaggagaaggagctgacagagaacatcctgaaggtgctgaaggagcaggccgctgacagcatcctggtgctggaggccgccctgaagctgaacaaggacctgtatgtgcacaccatgaggaccctggacctgctggccatggagcccggcatggtgaatggagaaacagagagcagcacagctggcctgaaggtgaagacagaggagatgcagtgccaggtgtgctatgacctgggcgccgcctacttccagcagggcagcaccaacagcgctgtgtatgaaaatgcccgggagaagttcttccgcaccaaggagctgattgctgagatcggcagcctgagcctgcactgcaccattgatgagaagaggctggccggctactgccaggcctgtgatgtgctggtgcccagcagtgacagcaccagccagcagctgaccccctacagccaggtgcacatctgcctgcggagcggcaactaccaggaggtgatccagatcttcatcgaggacaacctgaccctgagcctgcctgtgcagttccggcagagcgtgctgcgggagctgttcaagaaggcccagcagggcaatgaggccctggatgagatctgcttcaaggtgtgtgcctgcaacacagtgcgggacatcctggagggccgcaccatctctgtgcagttcaaccagctgttcctgcggcccaacaaggagaagattgacttcctgctggaggtgtgcagccgctctgtgaacctggagaaggccagcgagagcctgaagggcaacatggccgccttcctgaagaatgtgtgcctgggcctggaggacctgcagtatgtgttcatgatcagcagccatgagctgttcatcaccctgctgaaggatgaggagaggaagctgctggtggaccagatgaggaagaggagcccccgggtgaacctgtgcatcaagcctgtgaccagcttctatgacatcccagccagcgcctctgtgaacatcggccagctggagcaccagctgatcctgtctgtggacccctggaggatccggcagatcctgattgagctgcacggcatgaccagcgagcggcagttctggacagtgagcaacaagtgggaggtgcccagcgtgtacagcggggtcatcctgggcatcaaggacaacctgacccgggacctggtgtacatcctgatggccaagggcctgcactgcagcacagtgaaggacttcagccacgccaagcagctgtttgctgcctgcctggagctggtgacagagttcagccccaagctgcggcaggtgatgctgaatgagatgctgctgctggacatccacacccatgaagctggcaccggccaggccggggagcggccccccagcgacctgatcagccgggtgcggggctacctggagatgaggctgcctgacatccccctgcggcaggtgattgctgaggagtgtgtggccttcatgctgaactggagagaaaatgagtacctgaccctgcaggtgcctgccttcctgctgcagagcaacccctacgtgaagctgggccagctgctggccgccacctgcaaggagctgcccggccccaaggagagcagaagaacagccaaggacctgtgggaggtggtggtgcagatctgcagcgtgagcagccagcacaagagaggaaatgatggccgggtgtccctcatcaagcagcgggagagcaccctgggcatcatgtacagaagtgagctgctgtccttcatcaagaagctgcgggagcccctggtgctgaccatcatcctgagcctgtttgtgaagctgcacaacgtgagagaagatattgtgaatgacatcacagctgagcacatcagcatctggcccagcagcatccccaacctgcagagcgtggactttgaagctgtggccatcaccgtgaaggagctggtgcgctacaccctgagcatcaaccccaacaaccacagctggctgatcatccaggccgacatctactttgccaccaaccagtacagcgctgccctgcactactacctgcaggccggggctgtgtgcagcgacttcttcaacaaggctgtgcccccagatgtgtacacagaccaggtggccatcctgtgccagttcctgcgggagattgactacaagacagccttcaagagcctgcaggagcagaacagccatgatgccatggacagctactatgactacatctgggatgtgaccatcctggagtacctgacctacctgcaccacaagagaggagaaacagacaagaggcagatcgccatcaaggccatcggccagacagagctgaatgccagcaaccctgaggaggtgctgcagctggccgcccagaggaggaagaagaagttcctgcaggccatggccaagctgtacttctag

SEQ ID NO: 195442 - DNA, 2988 bp, Artificial Sequence
  derived and/or modified sequence
atgtctgctgaggccgctgaccgggaggccgccaccagcagccggccctgcaccccaccccagacctgctggtttgagttcctgctggaggagagcctgctggagaagcacctgaggaagccctgcccagaccctgcccctgtgcagctgattgtgcagttcctggagcaggccagcaagcccagcgtgaatgagcagaaccaggtgcagcccccaccagacaacaagaggaaccgcatcctgaagctgctggccctgaaggtggccgcccacctgaagtgggacctggacatcctggagaagagcctgtctgtgcctgtgctgaacatgctgctgaatgagctgctgtgcatcagcaaggtgcccccaggcaccaagcacgtggacatggacctggccaccctgccccccaccacagccatggctgtgctgctgtacaaccgctgggccatccgcaccatcgtgcagagcagcttccctgtgaagcaggccaagccaggccccccccagctgtctgtgatgaaccagatgcagcaggagaaggagctgacagagaacatcctgaaggtgctgaaggagcaggccgctgacagcatcctggtgctggaggccgccctgaagctgaacaaggacctgtatgtgcacaccatgaggaccctggacctgctggccatggagcccggcatggtgaatggagaaacagagagcagcacagctggcctgaaggtgaagacagaggagatgcagtgccaggtgtgctatgacctgggcgccgcctacttccagcagggcagcaccaacagcgctgtgtatgaaaatgcccgggagaagttcttccgcaccaaggagctgattgctgagatcggcagcctgagcctgcactgcaccattgatgagaagaggctggccggctactgccaggcctgtgatgtgctggtgcccagcagtgacagcaccagccagcagctgaccccctacagccaggtgcacatctgcctgcggagcggcaactaccaggaggtgatccagatcttcatcgaggacaacctgaccctgagcctgcctgtgcagttccggcagagcgtgctgcgggagctgttcaagaaggcccagcagggcaatgaggccctggatgagatctgcttcaaggtgtgtgcctgcaacacagtgcgggacatcctggagggccgcaccatctctgtgcagttcaaccagctgttcctgcggcccaacaaggagaagattgacttcctgctggaggtgtgcagccgctctgtgaacctggagaaggccagcgagagcctgaagggcaacatggccgccttcctgaagaatgtgtgcctgggcctggaggacctgcagtatgtgttcatgatcagcagccatgagctgttcatcaccctgctgaaggatgaggagaggaagctgctggtggaccagatgaggaagaggagcccccgggtgaacctgtgcatcaagcctgtgaccagcttctatgacatcccagccagcgcctctgtgaacatcggccagctggagcaccagctgatcctgtctgtggacccctggaggatccggcagatcctgattgagctgcacggcatgaccagcgagcggcagttctggacagtgagcaacaagtgggaggtgcccagcgtgtacagcggggtcatcctgggcatcaaggacaacctgacccgggacctggtgtacatcctgatggccaagggcctgcactgcagcacagtgaaggacttcagccacgccaagcagctgtttgctgcctgcctggagctggtgacagagttcagccccaagctgcggcaggtgatgctgaatgagatgctgctgctggacatccacacccatgaagctggcaccggccaggccggggagcggccccccagcgacctgatcagccgggtgcggggctacctggagatgaggctgcctgacatccccctgcggcaggtgattgctgaggagtgtgtggccttcatgctgaactggagagaaaatgagtacctgaccctgcaggtgcctgccttcctgctgcagagcaacccctacgtgaagctgggccagctgctggccgccacctgcaaggagctgcccggccccaaggagagcagaagaacagccaaggacctgtgggaggtggtggtgcagatctgcagcgtgagcagccagcacaagagaggaaatgatggccgggtgtccctcatcaagcagcgggagagcaccctgggcatcatgtacagaagtgagctgctgtccttcatcaagaagctgcgggagcccctggtgctgaccatcatcctgagcctgtttgtgaagctgcacaacgtgagagaagatattgtgaatgacatcacagctgagcacatcagcatctggcccagcagcatccccaacctgcagagcgtggactttgaagctgtggccatcaccgtgaaggagctggtgcgctacaccctgagcatcaaccccaacaaccacagctggctgatcatccaggccgacatctactttgccaccaaccagtacagcgctgccctgcactactacctgcaggccggggctgtgtgcagcgacttcttcaacaaggctgtgcccccagatgtgtacacagaccaggtgatcaagaggatgatcaagtgctgcagcctgctgaactgccacacccaggtggccatcctgtgccagttcctgcgggagattgactacaagacagccttcaagagcctgcaggagcagaacagccatgatgccatggacagctactatgactacatctgggatgtgaccatcctggagtacctgacctacctgcaccacaagagaggagaaacagacaagaggcagatcgccatcaaggccatcggccagacagagctgaatgccagcaaccctgaggaggtgctgcagctggccgcccagaggaggaagaagaagttcctgcaggccatggccaagctgtacttctag

SEQ ID NO: 195443 - DNA, 2937 bp, Artificial Sequence
  derived and/or modified sequence
atgagcgccgaggccgccgaccgggaggccgccaccagcagccggccatgtacaccccctcagacttgctggttcgagttcctactcgaggagtctctcctggaaaagcatctccgcaaaccctgcccagaccccgcccccgtgcagctaatagtccagttcctagaacaggcaagcaaaccctcggtgaatgaacagaatcaggtgcagccacctccggacaacaaacgtaaccggatcctgaagctgctggcccttaaagttgccgcccatctcaagtgggacctggatattttagaaaaatctctctcggtcccagtcttgaacatgctcctcaacgaactgctgtgcatcagtaaagtgccaccaggcacaaagcacgtagacatggacttagctactcttccaccaacaaccgccatggctgtattgctttacaatcgctgggccatacggactattgtgcaaagtagcttcccagtgaaacaggcaaagccagggccacctcagctgagcgtcatgaatcagatgcagcaggaaaaagagctgacagaaaatatactgaaagttctgaaggagcaggccgccgacagcatcctcgtcctggaagctgccctaaaattaaacaaagacctctacgtgcatacaatgcggaccctagatctgctggccatggagccgggcatggtgaatggagaaactgagtcatcaactgctggcttaaaggtaaagacagaagaaatgcaatgtcaggtctgttatgacttgggagcagcttatttccaacagggaagtactaatagtgccgtatacgaaaacgcccgggagaaattttttcgcaccaaggaacttatagccgaaataggtagtctatctcttcactgcaccattgacgagaaacggctcgcggggtactgccaagcttgtgatgtgcttgtcccatcctccgattcgactagccagcagctgaccccttactcccaggtccacatatgccttagatccggcaattaccaggaggtcatccagatcttcattgaggataacttaacattaagcctgcccgtccagttccggcagtccgtcttgcgcgaactgtttaagaaagcacagcagggaaacgaggcactggatgaaatatgttttaaggtctgcgcctgtaataccgtgagagatatcctggagggaagaacgattagcgtgcagttcaatcagctttttctgagacccaataaggagaagattgatttcttactggaagtttgcagccggtcagtgaatctggaaaaagcaagcgaatccttaaagggtaatatggccgcatttctaaagaatgtttgtttgggcctcgaagatctgcagtacgtgttcatgatcagttcacacgagttgtttatcactctgctgaaggatgaggaaagaaaactcctggtggatcagatgcgaaaaagatcccctagggtcaatctatgcatcaagcccgtgacttcattctacgacattcccgcgtcagcttctgtgaacattggtcagcttgagcatcagttaattctgagcgtcgacccttggcggatccgccaaattctgattgagctgcacggcatgactagcgagaggcagttttggactgtctcaaataagtgggaagttccatcagtgtactcaggcgtgatcctgggtatcaaggataatcttacccgcgatctcgtttatatcttgatggctaaggggctgcactgttctacagtgaaggacttctcccatgctaagcagctattcgcagcttgcctggagcttgtaaccgagttcagccctaagctgaggcaggttatgttgaatgagatgctccttctggacatacacactcacgaagccggcaccggtcaggctggcgaacggccgccgtctgacctgatttcaagggtccgcgggtacctggaaatgcggctccctgacatccccctgcgccaagttatcgccgaggagtgcgtggccttcatgctgaattggagggaaaatgagtacctcactctgcaggtacccgcatttctcctccagagtaatccttatgtcaaacttggacaattgctcgctgccacatgcaaggagttgcccgggcctaaagagtccagaaggactgctaaggacctttgggaagtggttgtccagatttgctccgtgtcatcccagcataaaagagggaatgatgggcgcgtctcactcatcaagcagcgcgaaagcactctggggatcatgtaccgctcagaactgttgagttttatcaaaaaactgcgcgagccgctcgtcctcaccattatactgtccctttttgttaaactgcacaacgtcagggaagacatcgtcaatgacatcacggccgaacatatatccatctggccatccagtatccctaatctgcagagcgtggacttcgaggccgttgccatcaccgtgaaagaactcgtaaggtacacactgagtataaacccgaacaaccactcttggcttatcatccaggcagacatttacttcgcaaccaaccagtactcagccgcattacactactatcttcaggccggagcagtatgctccgacttttttaacaaagccgtgcctccggacgtgtacaccgaccaagttgcaattctttgccagttcttaagagagattgactacaaaactgcattcaagtctctgcaggagcagaatagccatgacgctatggatagctactacgattacatttgggacgtcacaattctcgaatatttgacttacctccaccataaacggggtgagactgataagcgccaaattgctattaaagctattggccaaaccgagcttaacgcctcaaaccctgaagaggtgctgcagttggccgcgcaacggcggaaaaaaaaattcctgcaggccatggccaagctatacttctag

SEQ ID NO: 195444 - DNA, 2988 bp, Artificial Sequence
  derived and/or modified sequence
atgagcgccgaggccgccgaccgggaggccgccaccagcagccggccctgtacacccccacagacctgttggtttgaatttctgctggaagaaagcctgctggaaaaacatcttcgaaaaccttgcccagacccggcacccgtccagcttatcgtgcaatttctagagcaggcttctaaaccatcggtgaatgagcagaatcaggtgcagccccccccagacaacaagcggaatcggattttaaaactactcgctctcaaggtcgcagcccacctgaagtgggacctggatatcctcgaaaagtccttgagtgtgcctgtgcttaatatgcttttaaacgaactcctgtgcataagcaaggtgccacccgggactaagcacgtcgatatggatctggccacactaccgccaacaaccgccatggccgtcctgctgtataacagatgggccattcggaccatagtacagagctcttttcctgtgaaacaggccaagccagggccaccacaacttagtgtcatgaaccaaatgcagcaggaaaaggagttgaccgagaatattttgaaggtgctgaaggagcaggctgctgacagcatcctggtgctcgaggcggccctcaagttaaataaggacttgtatgttcatactatgcgaactctggatctactcgctatggagcccggcatggttaacggagagactgagagcagtacggcaggcctgaaagtgaaaaccgaggaaatgcagtgtcaggtgtgttatgacctgggggccgcctacttccagcaaggcagtacaaactccgccgtttatgaaaatgcaagggaaaagtttttccggaccaaagaacttattgccgaaattggcagcctttctttacattgtactattgatgaaaaaagattggcagggtactgtcaggcatgcgatgtgctggtcccctctagcgatagcaccagtcaacagctcaccccctatagccaggtacacatctgcttgcgctcaggcaactatcaggaggttatacagatcttcatcgaagataacctgacactcagcctccccgtgcagttccggcagtctgtcctcagggagctattcaagaaagcgcaacagggaaatgaggcccttgatgaaatttgttttaaagtatgcgcgtgcaataccgttcgggacatacttgagggtaggactatttctgtccaattcaatcaactgtttctacgacccaacaaagaaaaaattgattttctgttggaagtgtgttcacggtcagttaacctcgaaaaggcctctgagtcactgaaggggaacatggccgcttttctgaaaaacgtatgtttaggtcttgaagacctgcagtatgttttcatgatctcctcacatgaactttttatcactctgctcaaggacgaggaacggaagcttctggttgatcaaatgagaaagcgatccccgcgtgtgaacctgtgcattaaacccgttacatccttttacgacatccctgcaagcgcgtccgtcaacatcgggcaactggaacaccagctgatcctatccgtggatccttggcgaattagacagattctgatcgaattgcacggaatgacaagcgaaagacaattctggacagtgtccaacaagtgggaggttccctccgtatattcgggcgtgattctcgggataaaagacaacctcacccgcgaccttgtttacatcctaatggccaagggccttcactgttccaccgtcaaggacttcagccacgctaagcagcttttcgccgcatgcctagagttggtcacagagttttcacctaagctccgccaggttatgctcaacgagatgcttctgctggatatccacacccacgaagccggcactgggcaggcaggcgagcgccctccttccgacctcatcagtagagttagaggatacctcgagatgagactaccagacatcccactgcgccaggtgattgcggaagagtgcgtcgcgtttatgctcaactggcgcgaaaatgagtatttgaccttacaagtgcctgcattcctgttgcaatccaacccttacgtaaaactgggtcagttgctggccgctacatgtaaagagcttccaggaccaaaggagagtagaaggaccgctaaagatctgtgggaagtggtcgtacaaatctgtagcgtcagcagccagcacaagagaggcaacgatggacgagtgtcacttattaagcaacgcgaaagcacacttggtatcatgtaccgatccgagcttctttctttcattaagaaactgagggaaccgctggtgttaaccatcatcttaagtctctttgtcaagttacacaacgtccgcgaagacatagtcaacgatattacagcagagcacatttctatctggccttctagcataccaaatctgcagtcggttgacttcgaggccgtagcgattactgtgaaggagcttgtgagatacaccctatctatcaacccaaataatcatagttggctgataattcaggccgacatctactttgcgaccaatcagtactcggccgctctccattattatctgcaggcaggcgccgtgtgctctgactttttcaacaaagcagtccccccagatgtgtacaccgaccaggtaataaaaagaatgataaagtgctgcagcctgctgaactgccatacccaagtggctattctttgtcagttcctgcgtgagatcgattacaagacggcttttaagtcacttcaggagcagaacagccatgacgcaatggatagttattatgactacatttgggatgttacaatcctggagtatctgacctaccttcaccataaacgaggagagacagacaagcgtcagattgccatcaaagccatagggcaaactgagttgaacgcctcaaatcccgaggaagtcttacaattagcagcacagcggcgcaaaaaaaaattcctacaggccatggctaagctgtatttctag

SEQ ID NO: 195445 - DNA, 2937 bp, Artificial Sequence
  derived and/or modified sequence
atgtccgctgaggcagcggatcgtgaggccgctactagctcccggccatgcactccccctcagacctgctggttcgaatttctgctcgaggagtctttactagaaaagcatctgagaaaaccctgccccgaccccgctccagtgcagctcatcgttcagtttctggagcaggcctcaaagccttctgttaacgaacaaaatcaggtgcaacctcccccagataataaacggaaccgtattttgaagctcctggcactaaaggtcgcagcacaccttaaatgggatcttgatatcctagagaaatccctgagcgtgcctgttttaaacatgctgctgaacgaattactttgtatttctaaggtgccgcctggtaccaaacacgtggatatggacctggccactctccctcccactacagcaatggctgtactgctgtacaaccgctgggccattagaacaatagtgcagtcctcctttccagtgaaacaggccaagccgggacccccacagctgtcagtgatgaaccagatgcagcaggagaaggagctgacagagaacatcctcaaagtgctgaaggaacaagccgcagactccatcttggtgttggaagccgctctcaaactcaacaaagacctctatgttcacacaatgcgcacactggatcttctggccatggagccaggtatggtaaatggagaaactgagtcctccaccgccggactgaaagtcaagaccgaggagatgcagtgtcaggtgtgttatgatcttggcgcagcttatttccaacagggttccacaaattccgctgtctatgagaatgccagagagaagtttttccggacaaaggagctgattgcggaaatagggtcactcagcctgcattgcacaatcgatgaaaaacgtttagctggctattgtcaggcttgtgacgtactcgtgcctagctccgatagcaccagtcagcaacttactccatatagtcaggtacatatctgcctgcggtccggcaactaccaggaggtgatccagatctttattgaggataatctaactcttagcctgcccgtacagtttagacaatcagtattgcgtgaactgttcaagaaagcacagcagggtaatgaggcgctggacgagatatgttttaaggtctgcgcttgcaatacagtccgcgacattctggaggggaggactatctccgtgcagttcaatcaactgttcttgaggcccaataaagaaaagatagattttctcttggaggtgtgttcccggtccgttaatttggaaaaagcctctgagtctttgaagggaaatatggcggcatttctcaagaacgtgtgtctgggtctcgaagacctccaatatgttttcatgatcagcagtcacgaattgttcataaccttgctgaaggacgaagaacggaagctgcttgtagatcaaatgcgaaaacgaagcccccgagtgaacttgtgcatcaaaccagtcacatcgttttatgatatccccgctagcgcatcagtgaatattgggcaactggagcatcaactgatattgtcagtcgacccctggcggatacgacagatactcattgaattacacggaatgacgagcgagcggcagttttggactgtgtcgaataagtgggaggtgccaagcgtctacagcggtgttatcttaggcattaaggacaacctgacacgcgacctggtatacattttaatggccaaggggctccattgctcgaccgtgaaggatttctcgcatgcaaaacaactgtttgcagcttgcctcgagttagtgactgagttttcaccgaaactgaggcaagtgatgttaaacgagatgctgctgctcgacatacatactcacgaggccggaactggtcaggccggtgaacgccctccctctgacctgatcagccgtgtaaggggataccttgaaatgagacttcccgatatccctcttcggcaagtgattgccgaagagtgcgtggccttcatgctcaattggcgtgaaaacgagtacttaaccctgcaggtacccgcattcctccttcagagtaacccctacgttaagctaggccaactgctggccgcaacttgtaaagagctcccgggaccaaaggagagccgaagaactgccaaagatttgtgggaagtggtggtgcagatctgtagtgtgtcctctcagcacaagcgcggaaacgacggcagagttagcctcatcaaacagcgtgagtcaaccctcggcattatgtacagatccgagctcctctcctttataaaaaaactgcgggagccattggtactcaccatcattcttagcctgtttgtgaagctgcataacgttagggaggatatcgtgaacgatatcaccgctgagcatatctccatctggccttcatcgattcctaacctgcaatcagtggactttgaggccgtcgcgatcaccgttaaagagcttgtgcggtacacattaagcatcaaccccaacaaccactcctggttgataatccaggctgatatatatttcgctaccaatcagtatagcgccgctctgcactattaccttcaagcaggagctgtttgtagcgactttttcaacaaagccgtaccaccagacgtgtatacagaccaagtggccattctttgccagttcctgcgggaaatcgactacaagacagcctttaagagtctgcaggagcagaatagccatgatgctatggacagttattatgactatatttgggacgtgaccatactggagtacctgacatacctgcatcataaacggggtgagactgataaacggcagatcgctattaaggctattggccagacagaactaaacgcctcaaacccggaagaggtgctccagcttgctgcccaacggagaaagaaaaaattcctgcaggctatggctaagctgtacttttag

SEQ ID NO: 195446 - DNA, 2988 bp, Artificial Sequence
  derived and/or modified sequence
atgtccgccgaggccgctgacagagaggcagcaacctcctccagaccatgcaccccaccccagacctgctggttcgagttcctgcttgaggaaagtctgttggagaagcacctacggaagccgtgcccagaccccgctccggtacagcttatcgttcaatttctggaacaggcctctaagccttcggtgaacgagcaaaaccaggtccaacctcctcccgacaacaagaggaatcggatcctcaaactcctggcccttaaggtcgcggcacacctgaagtgggatctggatatccttgaaaagtccctaagtgtgcccgtactgaacatgctactcaatgaactgctgtgcatttctaaagtgcctcccggtaccaagcacgtcgacatggatctcgccaccctgccccctacaactgccatggccgtgctattgtacaatcgctgggcaattagaactatcgttcagtcaagcttccctgttaaacaggctaagcctggcccaccacagttgtctgtgatgaaccaaatgcagcaggaaaaggagctgacggagaatatcctcaaagtcctaaaggaacaggccgctgattccattctcgttttggaagccgctttaaagcttaacaaggatctctacgttcatacaatgcggacattggaccttctggctatggaacccggaatggtgaatggtgaaaccgagagctctacagctggactgaaagtgaagaccgaggaaatgcaatgccaggtatgctatgacctgggtgcagcttatttccagcaggggagtacaaacagtgctgtctacgagaatgctcgagaaaagttttttagaacaaaagaactcatagcagagatagggagcttgtcgctgcattgcaccatcgatgaaaagagactcgcgggatactgccaggcgtgtgacgtcctggttcccagcagtgatagcacatcacagcaattgacaccttattcccaggtccatatatgtttgagaagcgggaactatcaagaggtcattcagatcttcattgaggacaaccttacgctgtccttacccgtccagtttaggcagtccgtgttgcgggagctgtttaagaaggctcagcaaggaaacgaagcacttgatgagatttgctttaaggtctgcgcctgtaatacagtccgagacatcctcgaaggtcgtacgatttctgttcagtttaaccagttgtttcttagacccaataaagaaaaaattgacttcctgctggaggtgtgttccaggagcgtgaatctcgaaaaggcctcagagtctttaaaagggaatatggctgcttttctgaagaatgtttgtctgggcctagaagatctgcaatacgtttttatgatctcatcacacgagctgttcatcaccctgcttaaagatgaggaacgcaaactactagtggatcaaatgcgcaagcgcagcccacgcgtgaacctatgtatcaagcccgtaacatcattctacgacatccccgcttcagcatctgtgaatataggtcaactggagcaccagctcattctgagtgtagatccgtggcgtatccgtcagatattgatcgagctccatgggatgacatcagagcgccagttttggacagtgagtaataagtgggaggttccttccgtttattccggcgtgattctggggattaaggacaacttgacaagagatctcgtttatatcttgatggccaaaggcttacactgtagcactgttaaagattttagccacgccaagcagttatttgccgcttgtctggaactggtaaccgagttcagcccgaagttaaggcaggtgatgctcaacgaaatgctcctgctggacattcacacccacgaagccggtactggacaggcaggcgaacgtccgccttctgatcttatatcacgggtcaggggttacctagagatgcggctgccagacataccgttgcggcaggtgatcgctgaggagtgcgtggcgttcatgttgaattggagagaaaatgagtatctcacgctccaggtccctgcgtttttacttcaatccaatccatacgtgaaactgggtcagctgctggctgctacctgtaaggaactccctggtcctaaagagagcagaagaactgcaaaagacctttgggaggtggtggtacagatttgctctgtaagctctcaacataaacggggaaacgatgggagagttagcctgattaagcagcgagagtctactctggggatcatgtaccgatccgagctgctcagttttataaagaaactacgagagcccttagtcttaacaatcatcctctccctgtttgttaaattgcacaacgttagagaggatatagtcaacgatattactgccgagcatatttccatctggccttctagtatccccaatctccagagtgttgatttcgaagcagtggccatcactgtgaaagagctggtgcgatataccctgtctatcaaccccaataaccactcatggctgatcatccaagctgatatttattttgccaccaaccaatacagcgctgccctgcattattacttgcaggctggggctgtatgctctgatttcttcaataaggccgtgccccctgacgtgtacacagatcaggtcattaagcgaatgataaaatgttgttctctccttaactgccacactcaggtagccatcctgtgtcagtttctgagggaaatcgattacaaaaccgcctttaaatctcttcaggagcagaattctcacgatgccatggatagctattatgattacatttgggatgttacgatcctggagtaccttacttatcttcatcacaaaagaggtgagacggataagcgacaaatagcgattaaagctattgggcagacagaactgaacgcctctaatccagaggaggtgctgcagctggctgctcagcgcaggaagaaaaagtttctacaggccatggcaaaactttacttctag

SEQ ID NO: 195447 - DNA, 2937 bp, Artificial Sequence
  derived and/or modified sequence
atgagcgccgaggccgccgacagagaggccgccaccagcagcagaccctgcacccccccccagacctgctggttcgagttcctgctggaggagagcctgctggagaagcacctgagaaagccctgccccgaccccgcccccgtgcagctgatcgtgcagttcctggagcaggccagcaagcccagcgtgaacgagcagaaccaggtgcagcccccccccgacaacaagagaaacagaatcctgaagctgctggccctgaaggtggccgcccacctgaagtgggacctggacatcctggagaagagcctgagcgtgcccgtgctgaacatgctgctgaacgagctgctgtgcatcagcaaggtgccccccggcaccaagcacgtggacatggacctggccaccctgccccccaccaccgccatggccgtgctgctgtacaacagatgggccatcagaaccatcgtgcagagcagcttccccgtgaagcaggccaagcccggccccccccagctgagcgtgatgaaccagatgcagcaggagaaggagctgaccgagaacatcctgaaggtgctgaaggagcaggccgccgacagcatcctggtgctggaggccgccctgaagctgaacaaggacctgtacgtgcacaccatgagaaccctggacctgctggccatggagcccggcatggtgaacggcgagaccgagagcagcaccgccggcctgaaggtgaagaccgaggagatgcagtgccaggtgtgctacgacctgggcgccgcctacttccagcagggcagcaccaacagcgccgtgtacgagaacgccagagagaagttcttcagaaccaaggagctgatcgccgagatcggcagcctgagcctgcactgcaccatcgacgagaagagactggccggctactgccaggcctgcgacgtgctggtgcccagcagcgacagcaccagccagcagctgaccccctacagccaggtgcacatctgcctgagaagcggcaactaccaggaggtgatccagatcttcatcgaggacaacctgaccctgagcctgcccgtgcagttcagacagagcgtgctgagagagctgttcaagaaggcccagcagggcaacgaggccctggacgagatctgcttcaaggtgtgcgcctgcaacaccgtgagagacatcctggagggcagaaccatcagcgtgcagttcaaccagctgttcctgagacccaacaaggagaagatcgacttcctgctggaggtgtgcagcagaagcgtgaacctggagaaggccagcgagagcctgaagggcaacatggccgccttcctgaagaacgtgtgcctgggcctggaggacctgcagtacgtgttcatgatcagcagccacgagctgttcatcaccctgctgaaggacgaggagagaaagctgctggtggaccagatgagaaagagaagccccagagtgaacctgtgcatcaagcccgtgaccagcttctacgacatccccgccagcgccagcgtgaacatcggccagctggagcaccagctgatcctgagcgtggacccctggagaatcagacagatcctgatcgagctgcacggcatgaccagcgagagacagttctggaccgtgagcaacaagtgggaggtgcccagcgtgtacagcggcgtgatcctgggcatcaaggacaacctgaccagagacctggtgtacatcctgatggccaagggcctgcactgcagcaccgtgaaggacttcagccacgccaagcagctgttcgccgcctgcctggagctggtgaccgagttcagccccaagctgagacaggtgatgctgaacgagatgctgctgctggacatccacacccacgaggccggcaccggccaggccggcgagagaccccccagcgacctgatcagcagagtgagaggctacctggagatgagactgcccgacatccccctgagacaggtgatcgccgaggagtgcgtggccttcatgctgaactggagagagaacgagtacctgaccctgcaggtgcccgccttcctgctgcagagcaacccctacgtgaagctgggccagctgctggccgccacctgcaaggagctgcccggccccaaggagagcagaagaaccgccaaggacctgtgggaggtggtggtgcagatctgcagcgtgagcagccagcacaagagaggcaacgacggcagagtgagcctgatcaagcagagagagagcaccctgggcatcatgtacagaagcgagctgctgagcttcatcaagaagctgagagagcccctggtgctgaccatcatcctgagcctgttcgtgaagctgcacaacgtgagagaggacatcgtgaacgacatcaccgccgagcacatcagcatctggcccagcagcatccccaacctgcagagcgtggacttcgaggccgtggccatcaccgtgaaggagctggtgagatacaccctgagcatcaaccccaacaaccacagctggctgatcatccaggccgacatctacttcgccaccaaccagtacagcgccgccctgcactactacctgcaggccggcgccgtgtgcagcgacttcttcaacaaggccgtgccccccgacgtgtacaccgaccaggtggccatcctgtgccagttcctgagagagatcgactacaagaccgccttcaagagcctgcaggagcagaacagccacgacgccatggacagctactacgactacatctgggacgtgaccatcctggagtacctgacctacctgcaccacaagagaggcgagaccgacaagagacagatcgccatcaaggccatcggccagaccgagctgaacgccagcaaccccgaggaggtgctgcagctggccgcccagagaagaaagaagaagttcctgcaggccatggccaagctgtacttctag

SEQ ID NO: 195448 - DNA, 2988 bp, Artificial Sequence
  derived and/or modified sequence
atgagcgccgaggccgccgacagagaggccgccaccagcagcagaccctgcacccccccccagacctgctggttcgagttcctgctggaggagagcctgctggagaagcacctgagaaagccctgccccgaccccgcccccgtgcagctgatcgtgcagttcctggagcaggccagcaagcccagcgtgaacgagcagaaccaggtgcagcccccccccgacaacaagagaaacagaatcctgaagctgctggccctgaaggtggccgcccacctgaagtgggacctggacatcctggagaagagcctgagcgtgcccgtgctgaacatgctgctgaacgagctgctgtgcatcagcaaggtgccccccggcaccaagcacgtggacatggacctggccaccctgccccccaccaccgccatggccgtgctgctgtacaacagatgggccatcagaaccatcgtgcagagcagcttccccgtgaagcaggccaagcccggccccccccagctgagcgtgatgaaccagatgcagcaggagaaggagctgaccgagaacatcctgaaggtgctgaaggagcaggccgccgacagcatcctggtgctggaggccgccctgaagctgaacaaggacctgtacgtgcacaccatgagaaccctggacctgctggccatggagcccggcatggtgaacggcgagaccgagagcagcaccgccggcctgaaggtgaagaccgaggagatgcagtgccaggtgtgctacgacctgggcgccgcctacttccagcagggcagcaccaacagcgccgtgtacgagaacgccagagagaagttcttcagaaccaaggagctgatcgccgagatcggcagcctgagcctgcactgcaccatcgacgagaagagactggccggctactgccaggcctgcgacgtgctggtgcccagcagcgacagcaccagccagcagctgaccccctacagccaggtgcacatctgcctgagaagcggcaactaccaggaggtgatccagatcttcatcgaggacaacctgaccctgagcctgcccgtgcagttcagacagagcgtgctgagagagctgttcaagaaggcccagcagggcaacgaggccctggacgagatctgcttcaaggtgtgcgcctgcaacaccgtgagagacatcctggagggcagaaccatcagcgtgcagttcaaccagctgttcctgagacccaacaaggagaagatcgacttcctgctggaggtgtgcagcagaagcgtgaacctggagaaggccagcgagagcctgaagggcaacatggccgccttcctgaagaacgtgtgcctgggcctggaggacctgcagtacgtgttcatgatcagcagccacgagctgttcatcaccctgctgaaggacgaggagagaaagctgctggtggaccagatgagaaagagaagccccagagtgaacctgtgcatcaagcccgtgaccagcttctacgacatccccgccagcgccagcgtgaacatcggccagctggagcaccagctgatcctgagcgtggacccctggagaatcagacagatcctgatcgagctgcacggcatgaccagcgagagacagttctggaccgtgagcaacaagtgggaggtgcccagcgtgtacagcggcgtgatcctgggcatcaaggacaacctgaccagagacctggtgtacatcctgatggccaagggcctgcactgcagcaccgtgaaggacttcagccacgccaagcagctgttcgccgcctgcctggagctggtgaccgagttcagccccaagctgagacaggtgatgctgaacgagatgctgctgctggacatccacacccacgaggccggcaccggccaggccggcgagagaccccccagcgacctgatcagcagagtgagaggctacctggagatgagactgcccgacatccccctgagacaggtgatcgccgaggagtgcgtggccttcatgctgaactggagagagaacgagtacctgaccctgcaggtgcccgccttcctgctgcagagcaacccctacgtgaagctgggccagctgctggccgccacctgcaaggagctgcccggccccaaggagagcagaagaaccgccaaggacctgtgggaggtggtggtgcagatctgcagcgtgagcagccagcacaagagaggcaacgacggcagagtgagcctgatcaagcagagagagagcaccctgggcatcatgtacagaagcgagctgctgagcttcatcaagaagctgagagagcccctggtgctgaccatcatcctgagcctgttcgtgaagctgcacaacgtgagagaggacatcgtgaacgacatcaccgccgagcacatcagcatctggcccagcagcatccccaacctgcagagcgtggacttcgaggccgtggccatcaccgtgaaggagctggtgagatacaccctgagcatcaaccccaacaaccacagctggctgatcatccaggccgacatctacttcgccaccaaccagtacagcgccgccctgcactactacctgcaggccggcgccgtgtgcagcgacttcttcaacaaggccgtgccccccgacgtgtacaccgaccaggtgatcaagagaatgatcaagtgctgcagcctgctgaactgccacacccaggtggccatcctgtgccagttcctgagagagatcgactacaagaccgccttcaagagcctgcaggagcagaacagccacgacgccatggacagctactacgactacatctgggacgtgaccatcctggagtacctgacctacctgcaccacaagagaggcgagaccgacaagagacagatcgccatcaaggccatcggccagaccgagctgaacgccagcaaccccgaggaggtgctgcagctggccgcccagagaagaaagaagaagttcctgcaggccatggccaagctgtacttctag

SEQ ID NO: 195449 - protein, 260 aa, Artificial Sequence
  derived and/or modified sequence
MLFLALGSPWAVELPLCGRRTALCAAAALRGPRASVSRASSSSGPSGPVAGWSTGPSGAARLLRRPGRAQIPVYWEGYVRFLNTPSDKSEDGRLIYTGNMARAVFGVKCFSYSTSLIGLTFLPYIFTQNNAISESVPLPIQIIFYGIMGSFTVITPVLLHFITKGYVIRLYHEATTDTYKAITYNAMLAETSTVFHQNDVKIPDAKHVFTTFYAKTKSLLVNPVLFPNREDYIHLMGYDKEEFILYMEETSEEKRHKDDK

SEQ ID NO: 195450 - protein, 107 aa, Artificial Sequence
  derived and/or modified sequence
MLFLALGSPWAVELPLCGRRTALCAAAALRGPRASVSRASSSSGPSGPVAGWSTGPSGAARLLRRPGRAQIPVYWEGYVRFLNTPSDKSEDGRLIYTGNMARAVFGK

SEQ ID NO: 195451 - DNA, 783 bp, Artificial Sequence
  derived and/or modified sequence
atgctgttcctggccctgggcagcccctgggccgtggagctgcccctgtgcggcagaagaaccgccctgtgcgccgccgccgccctgagaggccccagagccagcgtgagcagagccagcagcagcagcggccccagcggccccgtggccggctggagcaccggccccagcggcgccgccagactgctgagaagacccggcagagcccagatccccgtgtactgggagggctacgtgagattcctgaacacccccagcgacaagagcgaggacggcagactgatctacaccggcaacatggccagagccgtgttcggcgtgaagtgcttcagctacagcaccagcctgatcggcctgaccttcctgccctacatcttcacccagaacaacgccatcagcgagagcgtgcccctgcccatccagatcatcttctacggcatcatgggcagcttcaccgtgatcacccccgtgctgctgcacttcatcaccaagggctacgtgatcagactgtaccacgaggccaccaccgacacctacaaggccatcacctacaacgccatgctggccgagaccagcaccgtgttccaccagaacgacgtgaagatccccgacgccaagcacgtgttcaccaccttctacgccaagaccaagagcctgctggtgaaccccgtgctgttccccaacagagaggactacatccacctgatgggctacgacaaggaggagttcatcctgtacatggaggagaccagcgaggagaagagacacaaggacgacaagtag

SEQ ID NO: 195452 - DNA, 783 bp, Artificial Sequence
  derived and/or modified sequence
atgttattcttggcattgggcagtccttgggctgtcgaactgcccttgtgcggccggcgcactgctctttgcgctgcggccgctctacgggggccccgtgcctccgtaagcagagctagcagctcttccggcccgagtggccccgtcgccggttggagtaccgggcctagtggtgcagccagacttctgcgcagacctgggcgcgcacagatcccagtttattgggaaggatacgtcagattcctcaataccccgtcagacaaatccgaagacgggcggctcatctatactgggaacatggctcgcgcagtgttcggcgtcaaatgcttttcatactccaccagcctgatcggcctcacttttcttccatatatatttacacaaaataatgccattagcgagagcgtcccactgcctattcagatcatcttttatgggattatggggtcattcacagtgataacaccagtgctgcttcactttatcaccaaaggctatgtgatcaggctgtaccatgaggccaccacagacacttataaagccatcacctacaacgccatgctggccgaaaccagcaccgttttccaccagaacgacgtgaagattccagatgcaaagcatgtatttacaacgttttacgcgaaaaccaaatcactgctcgttaatccggtgctgttcccgaaccgggaggactatattcatctcatgggctatgacaaggaggaattcatcctatacatggaggagacaagcgaggagaaacggcacaaggatgacaagtag

SEQ ID NO: 195453 - DNA, 783 bp, Artificial Sequence
  derived and/or modified sequence
atgctgttcctggccctgggcagcccctgggccgtggagctgcccctgtgtggcagaagaacagccctgtgtgccgctgctgccctgcggggcccccgggcctctgtgtcccgggccagcagcagcagcggccccagcggccctgtggccggctggagcacaggccccagcggggccgcccggctgctgcggcggcccggccgggcccagatccctgtgtactgggagggctacgtgcgcttcctgaacacccccagcgacaagtcagaagatggccgcctcatctacacaggcaacatggcccgggctgtgtttggagtgaagtgcttctcctacagcaccagcctgattggcctgaccttcctgccctacatcttcacccagaacaatgccatcagcgagagcgtgcccctgcccatccagatcatcttctacggcatcatgggcagcttcaccgtcatcacccctgtgctgctgcacttcatcaccaagggctacgtgatccggctgtaccacgaggccaccacagacacctacaaggccatcacctacaatgccatgctggccgagaccagcacagtgttccaccagaatgatgtgaagatcccagatgccaagcacgtgttcaccaccttctacgccaagaccaagagcctgctggtgaaccctgtgctcttccccaaccgggaggactacatccacctgatgggctatgacaaggaggagttcatcctgtacatggaggagaccagcgaggagaagaggcacaaggatgacaagtag

SEQ ID NO: 195454 - DNA, 783 bp, Artificial Sequence
  derived and/or modified sequence
atgctgttcctggccctgggcagcccctgggccgtggagctgcccctgtgcgggaggagaacagccctgtgcgcggccgcagcactgcgcggccccagagcctccgtctcgagagcgagctcctcgtctggacctagtggccctgtagccggatggtctacagggccttcgggtgccgctcgtttgctacgacggcctgggagggctcagatcccagtctattgggagggatatgtgagattcctcaataccccgtcggacaagtccgaagatggacgattaatatataccggaaacatggcaagagctgtgttcggtgtaaaatgtttctcatacagtacctctttgatcggactcactttcctcccctatatatttactcagaacaatgccatctctgagtccgtgcctctccccatccagataatcttctacggcatcatgggatcgttcaccgtgatcacacctgtgcttttgcacttcatcacaaaggggtatgttatacggttgtatcatgaggcaacgacagatacatacaaggccattacctacaatgctatgttggccgaaacctcaaccgtcttccatcagaacgatgtcaagataccagacgccaagcacgtctttactacgttctatgccaagacgaagagtctgcttgtgaaccccgtcttgttccccaacagagaagattacatccacctgatgggatacgacaaagaggaatttatcctttatatggaagaaactagcgaagagaaacggcacaaggacgacaagtag

SEQ ID NO: 195455 - DNA, 783 bp, Artificial Sequence
  derived and/or modified sequence
atgctattccttgctcttggcagcccatgggccgtggagctgccactctgtggacgcagaacagccctgtgtgcagcagccgcactgagaggcccacgggctagtgtctctcgggcatcctcgagtagcggcccttcagggccagtggccggatggtcaaccggacccagcggcgcagccaggttgctgcggaggcctggcagagctcaaatacccgtctattgggaaggttatgtccgattcctcaatacgcctagtgataagtctgaagacggaaggttgatttacactggaaacatggcacgggctgttttcggtgtcaaatgtttcagttacagcacaagcctcatcggattgacctttctcccatacatcttcacacaaaacaatgccatctccgagagtgtacctcttccaatccaaatcatcttctatgggatcatgggatcctttacggtgatcactcctgtgctgctgcatttcattaccaaaggctacgtgattcgtttgtatcatgaagctactacagatacgtacaaagctatcacctataatgcgatgctcgcagagacttctaccgtattccatcagaatgacgtaaagatcccagacgctaagcacgtgtttaccacattttatgccaagactaaatcgctcctggtaaaccccgtcctattcccgaacagggaggactacatccacctcatggggtatgataaagaggagtttatcctctatatggaggagacatctgaagaaaagcgccataaggacgataagtag

SEQ ID NO: 195456 - DNA, 2018 bp, Artificial Sequence
  derived and/or modified sequence
cgggtgggaagccgtgtctcgcagtcgtggactcgtgcagctggggcgtccgcagccgctcgtcacccgcgtgatgctgtttctggcgttgggcagcccgtgggcggtcgaactgcctctctgcggaaggaggactgcattgtgtgcggccgccgcgctccgaggtccccgggcctctgtctcccgggcgtcctccagcagcgggccttcggggccggtagccggctggagtacggggccttcgggagccgcgcgccttctccggcgtccgggtcgagcgcagatccctgtttattgggaaggatatgttcgattcttaaatacgccatctgacaaatcagaagatggaaggctaatttatactggcaatatggcccgagcagtgtttggtgtgaaatgtttctcttattctacgagtctgattggccttacatttctgccatacatttttacacaaaataatgctatttctgaaagtgtgcctctgcctattcaaatcatattctatggcatcatgggaagctttacggtgatcaccccagtgctgcttcactttattacaaaaggctatgtcattcgattgtaccatgaggccacaacagacacttataaagccattacctacaatgctatgcttgcagaaacgagtacagtgtttcaccagaatgatgtgaagattccagatgctaaacatgtatttaccacattttatgctaaaacaaaatcactgttagttaatccagtgctctttccaaaccgtgaagactatatccatctaatgggttatgacaaagaagaatttattttgtatatggaagaaaccagtgaagagaaacggcataaagatgacaaatgagcctatttgttagtgttcgtgctcaaatgtgatttacgttttaatgtataataataaaattgccttttgcattccgttagtgactgattgttaaaaataatttgaaattatcaaagcttttaatttccagagaatgatgtttgtttataataaaacaagctatgtttgaaaaccaaaatgtagtatctaccattcgtgttttagaaaggtatgtgaataaatatgttcatgctagtataagagttctgtgttactgtggttgactctaaactggggatctgatgtcagtagcaaatgggagagttgctttattctttgtgtatggatttttctaagtgtataaatattttccgacattaaaagacattttctctttgaggaagacacagtcataggtggtgcggagctgtggtccacctgctcctgctcctgactcactgctctttgctgttgcctgaggaccaagtctgtcaggaagctggctaggaagccttgcagcagccatggcttttaaacataccagaaaaacacccgtggagtcagaggtggcaattcaccgaattcatatcactctaacgagttgcaacgtaaaatccctggataaggtgtgtgctgacttgatctgaggagcaaaggaaaagaatcagtgaaaggaccagtttgaatgcctaccaagactttgagaatcactacaagaaaaacttacggtgaaggttctaaggcatgggatcgtttccagatgagaatccacaagcgactcattgacttgcgcagtcctcagatagttaagcagattacttccatcagtattgagccaggagttgagatggaagtcaccattgcaaatgcttaagtcaactgttttcataaattgattaccagttgttaaaaaattttcaaaaaaccgcaaaatttcaagaaattcacaaattatgggagcagttttaagtcttctttggttcagaacacaggtttttgcctaacccctggcatgattgcccataagaacatacatgtacagttgaactggtggttagctatacgggaaatggtaagtagtgttgtcttcagtatcttaatttgtttctgcaactgtgcactcctcccttggtggcaccctatgggtgtaggaaaaccactgttattaaacaggtgaaaaata

SEQ ID NO: 195457 - DNA, 617 bp, Artificial Sequence
  derived and/or modified sequence
gtcgggtgggaagccgtgtctcgcagtcgtggactcgtgcagctggggcgtccgcagccgctcgtcacccgcgtgatgctgtttctggcgttgggcagcccgtgggcggtcgaactgcctctctgcggaaggaggactgcattgtgtgcggccgccgcgctccgaggtccccgggcctctgtctcccgggcgtcctccagcagcgggccttcggggccggtagccggctggagtacggggccttcgggagccgcgcgccttctccggcgtccgggtcgagcgcagatccctgtttattgggaaggatatgttcgattcttaaatacgccatctgacaaatcagaagatggaaggctaatttatactggcaatatggcccgagcagtgtttggtaagtaattggaggtgtgaaatgtttctcttattctacgagtctgattggccttacatttctgccatacatttttacacaaaataatgctatttctgaaagtgtgcctctgcctattcaaatcatattctatggcatcatgggaagctttacggtgatcaccccagtgctgcttcactttattacaaaaggctatgtcattcgattgtaccatgaggccacaaca

SEQ ID NO: 195458 - protein, 346 aa, Artificial Sequence [sequence omitted]

SEQ ID NO: 195459 - DNA, 79 bp, Artificial Sequence
  derived and/or modified sequence
tacagaacacatgactcaacaacagcagaaagcatattcttttcaaatgcacatgaaacattatcatgatggaccaaat

SEQ ID NO: 195460 - DNA, 1041 bp, Artificial Sequence
  derived and/or modified sequence
atggtgggaggcgggggaaagcgccggccaggaggtgaggggccgcagtgcgaaaaaaccacggatgttaagaagtcaaagttttgtgaagccgatgtcagctcagacctgcggaaggaagtggaaaatcattacaagttatctttacctgaagacttttaccacttctggaaattctgtgaggagctggaccctgaaaagccgtctgactctctgagcgcatccctgggactccagctggtaggtccgtatgacattctagctggcaaacataaaaccaaaaaaaagtccaccggtctgaatttcaacctgcactggcgcttctactatgacccacctgaattccagactataataattggtgacaacaaaacgcaatatcacatgggatattttagagacagtcctgatgaattcccggtgtatgtgggcatcaacgaagccaagaaaaattgcatcatcgtgcctaacggcgataacgttttcgccgctgtcaagctgtttctcaccaagaaactacgggaaattaccgacaagaaaaagattaacctgctcaagaacatcgacgagaaacttactgaggcagctcgtgagctgggctacagcctagagcaacggaccgtgaagatgaagcagagagacaagaaagttgtgacaaagactttccacggtgctggtctggtggtgccagtggataagaatgatgttgggtacagggagctacccgagaccgacgcggacctcaaacggatttgcaaaacaattgtcgaggcggcatctgatgaagagcgcctaaaggcattcgcacctatccaggagatgatgacctttgtgcagttcgccaacgatgaatgcgattacgggatggggctggagttaggtatggacctcttttgctatggctctcattatttccacaaggtggctgggcaacttctccccctcgcttataatctcctgaaacgcaatctttttgccgaaatcatagaggagcatctcgcgaacaggtctcaggagaatattgaccagcttgcggcctag

SEQ ID NO: 195461 - DNA, 1041 bp, Artificial Sequence
  derived and/or modified sequence
atggtgggcggcggcggcaagaggaggcctggaggagagggcccccagtgtgagaagaccacagatgtgaagaagagcaagttctgtgaggctgatgtgtccagtgacctgaggaaggaggtggagaaccactacaagctgagcctgcctgaggacttctaccacttctggaagttctgtgaggagctggaccctgagaagcccagcgacagcctgagcgccagcctgggcctgcagctggtgggcccctatgacatcctggccggcaagcacaagaccaagaagaagagcacaggcctgaacttcaacctgcactggaggttctactatgaccccccagagttccagaccatcatcatcggggacaacaagacccagtaccacatgggctacttccgggacagcccagatgagttccctgtgtatgtgggcatcaatgaggccaagaagaactgcatcatcgtgcccaatggagacaacgtgtttgctgctgtgaagctgttcctgaccaagaagctgcgggagatcacagacaagaagaagatcaacctgctgaagaacattgatgagaagctgacagaagctgcccgggagctgggctacagcctggagcagaggacagtgaagatgaagcagagggacaagaaggtggtgaccaagaccttccatggagctggcctggtggtgcctgtggacaagaatgatgtgggctaccgggagctgcctgagacagatgctgacctgaagaggatctgcaagaccatcgtggaggccgccagtgatgaggagcggctgaaggcctttgcccccatccaggagatgatgacctttgtgcagtttgccaatgatgaatgtgactatggcatgggcctggagctgggcatggacctcttctgctacggcagccactacttccacaaggtggccggccagctgctgcccctggcctacaacctgctgaagaggaacctgtttgctgagatcatcgaggagcacctggccaacagaagccaggagaacatcgaccagctggccgcctag

SEQ ID NO: 195462 - DNA, 1041 bp, Artificial Sequence
  derived and/or modified sequence
atggtgggcggcggcggcaagcggcggcccggcggcgagggcccccagtgcgaaaaaactacagacgtcaaaaaatccaagttctgtgaggctgacgtcagttccgatcttcgcaaagaggtcgagaaccattacaagctaagtctcccagaggatttttaccatttctggaaattctgcgaggagcttgaccccgagaaaccgtccgactcactgtccgcttcactggggttgcagctggtgggtccctacgacatccttgccgggaaacacaagacaaagaagaaatcaacgggtctcaactttaatctgcactggcggttctactacgacccccctgagtttcagaccattatcatcggggacaacaaaacacagtaccacatggggtactttcgcgattcaccagatgaattcccagtgtatgtcggcatcaatgaggcaaagaaaaactgcattattgtgcccaatggtgataacgtcttcgcggcagtgaaactcttcctaactaagaaactccgggaaatcactgataaaaaaaaaatcaacctgctcaagaacattgacgaaaagttgactgaggccgcccgagagcttggatacagcttagagcagcgaacagtaaagatgaagcagcgggataaaaaggtagtgactaagacttttcacggagccgggctggtggtacccgtggacaaaaacgacgtgggctaccgggagttgcccgaaaccgatgccgacctaaaaaggatttgcaagaccatagtagaagcagcgtcggatgaagaacgcctcaaggctttcgccccaatccaggaaatgatgaccttcgtgcaatttgcaaatgatgagtgtgattacggcatgggcttagaactgggaatggacctgttttgttatgggtcccactactttcataaggtcgctggccaattgctcccattagcctataatctccttaagcggaacctctttgcagaaatcattgaggagcacttggccaaccgttcccaggagaatattgatcagttggccgcatag

SEQ ID NO: 195463 - DNA, 1041 bp, Artificial Sequence
  derived and/or modified sequence
atggtgggtgggggaggcaagagaagacctggaggagaaggtccccaatgcgaaaagactacagacgtcaagaaaagtaagttctgcgaggcagacgtaagctcggatctccggaaagaggtggagaaccactacaaactcagccttcccgaggatttctaccacttctggaagttctgcgaggaacttgatcctgagaaaccctccgattcactgagcgcctctctcggcctgcagcttgtgggtccttatgatatcttggcaggaaagcataagacaaagaagaaatcaacgggcctgaacttcaatctgcattggcggttctattacgatcctccagagtttcagacaattatcataggggataacaaaacacagtatcacatgggttacttcagggattctcccgatgaatttccagtgtacgttggtattaacgaagctaaaaaaaattgtatcatcgtgcctaacggggacaacgtgttcgcggcagtcaaattgtttctgacaaaaaaactgagggaaattactgacaagaagaagatcaatttgctaaaaaacattgatgagaagctgacagaggctgcgagggaactgggctactcactggaacagaggacagtgaagatgaaacaacgggataagaaggtggttactaaaaccttccacggcgctgggctcgtagtgccagttgataagaacgacgtaggttacagagaactgcccgagacagacgccgacctcaaacgaatatgtaagacaatcgtggaggccgcatcggatgaggagagacttaaagcttttgctccaatccaggagatgatgacctttgtccagtttgccaacgatgaatgtgactacggtatgggtcttgagctcggaatggatcttttttgttacggttcccattatttccacaaggtcgcagggcagcttctgcctttagcctacaacttgctcaaaagaaatctctttgcagagatcattgaagaacatctcgctaataggtcacaagaaaacatcgatcagctggctgcctag

SEQ ID NO: 195464 - DNA, 1230 bp, Artificial Sequence
  derived and/or modified sequence
tttgaacccggaagcggttggcggcgctcggaagcggccgcggatcggggaattctgctggcgctgcagctgcagaatggtcggcggtggcgggaagcgcaggcccggcggagaggggccgcagtgtgaaaaaacaactgatgtgaagaaaagtaaattctgtgaagctgatgtctccagtgaccttcgaaaagaagtagaaaatcattataagctttctttacctgaagatttctatcacttctggaagttctgtgaagaacttgatcctgaaaagccatctgattcactttctgcaagccttggacttcaattagttggtccttatgatatccttgctggaaaacataaaacgaagaaaaaatcaacaggcctgaattttaaccttcactggaggttttactatgatcctcctgagttccagaccattattattggagataataaaactcagtaccacatggggtatttcagggattctcctgatgaatttcctgtatatgttggtataaatgaagcaaagaaaaattgtataattgttccaaatggagataatgtatttgctgcagtcaaattatttttgacgaaaaaacttagagaaataacggataaaaagaaaatcaatctcttgaaaaacatagatgaaaaactcacagaagcagccagagaattggggtactcgcttgaacagagaaccgtgaagatgaaacagagagataagaaagttgtgacaaagacctttcatggtgcaggcttggttgttccagtagataaaaatgatgttgggtaccgagagctccctgaaacagatgctgacctcaagagaatttgcaagacaatagttgaggctgcaagtgatgaggagagactaaaagcttttgctcccattcaggaaatgatgacttttgtgcagtttgctaatgatgaatgtgattatggcatggggcttgaattgggaatggatctcttttgctatggctcacattattttcataaagttgctggccagcttttacctcttgcatataatctgttgaagaggaatctgtttgcagaaattattgaggagcatctggcaaacagaagtcaagagaacatagaccaacttgctgcatgagtaaggtggctttgattggtgtacagtatttcaaaggactagtattaaacttgtgatttttgttttgtttttaaggaatacaaaaaataaacatttactaaaaacgtttataa

SEQ ID NO: 195465 - DNA, 1041 bp, Artificial Sequence
  derived and/or modified sequence
atggtgggcggcggcggcaagagaagacccggcggcgagggcccccagtgcgagaagaccaccgacgtgaagaagagcaagttctgcgaggccgacgtgagcagcgacctgagaaaggaggtggagaaccactacaagctgagcctgcccgaggacttctaccacttctggaagttctgcgaggagctggaccccgagaagcccagcgacagcctgagcgccagcctgggcctgcagctggtgggcccctacgacatcctggccggcaagcacaagaccaagaagaagagcaccggcctgaacttcaacctgcactggagattctactacgacccccccgagttccagaccatcatcatcggcgacaacaagacccagtaccacatgggctacttcagagacagccccgacgagttccccgtgtacgtgggcatcaacgaggccaagaagaactgcatcatcgtgcccaacggcgacaacgtgttcgccgccgtgaagctgttcctgaccaagaagctgagagagatcaccgacaagaagaagatcaacctgctgaagaacatcgacgagaagctgaccgaggccgccagagagctgggctacagcctggagcagagaaccgtgaagatgaagcagagagacaagaaggtggtgaccaagaccttccacggcgccggcctggtggtgcccgtggacaagaacgacgtgggctacagagagctgcccgagaccgacgccgacctgaagagaatctgcaagaccatcgtggaggccgccagcgacgaggagagactgaaggccttcgcccccatccaggagatgatgaccttcgtgcagttcgccaacgacgagtgcgactacggcatgggcctggagctgggcatggacctgttctgctacggcagccactacttccacaaggtggccggccagctgctgcccctggcctacaacctgctgaagagaaacctgttcgccgagatcatcgaggagcacctggccaacagaagccaggagaacatcgaccagctggccgcctag

SEQ ID NO: 195466 - protein, 705 aa, Artificial Sequence
  derived and/or modified sequence
MDADKEKDLQKFLKNVDEISNLIQEMNSDDPVVQQKAVLETEKRLLLMEEDQEEDECRTTLNKTMISPPQTAMKSAEEINSEAFLASVEKDAKERAKRRRENKVLADALKEKGNEAFAEGNYETAILRYSEGLEKLKDMKVLYTNRAQAYMKLEDYEKALVDCEWALKCDEKCTKAYFHMGKANLALKNYSVSRECYKKILEINPKLQTQVKGYLNQVDLQEKADLQEKEAHELLDSGKNTAVTTKNLLETLSKPDQIPLFYAGGIEILTEMINECTEQTLFRMHNGFSIISDNEVIRRCFSTAGNDAVEEMVCVSVLKLWQAVCSRNEENQRVLVIHHDRARLLAALLSSKVLAIRQQSFALLLHLAQTESGRSLIINHLDLTRLLEALVSFLDFSDKEANTAMGLFTDLALEERFQVWFQANLPGVLPALTGVLKTDPKVSSSSALCQCIAIMGNLSAEPTTRRHMAACEEFGDGCLSLLARCEEDVDLFREVIYTLLGLMMNLCLQAPFVSEVWAVEVSRRCLSLLNSQDGGILTRAAGVLSRTLSSSLKIVEEALRAGVVKKMMKFLKTGGETASRYAIKILAICTNSYHEAREEVIRLDKKLSVMMKLLSSEDEVLVGNAALCLGNCMEVPNVASSLLKTDLLQVLLKLAGSDTQKTAVQVNAGIALGKLCTAEPRFAAQLRKLHGLEILNSTMKYISDS

SEQ ID NO: 195467 - DNA, 2118 bp, Artificial Sequence
  derived and/or modified sequence
atggacgccgacaaggagaaggacctgcagaagttcctgaagaacgtggacgagatcagcaacctgatccaggagatgaacagcgacgaccccgtggtgcagcagaaggccgtgctggagaccgagaagagactgctgctgatggaggaggaccaggaggaggacgagtgcagaaccaccctgaacaagaccatgatcagccccccccagaccgccatgaagagcgccgaggagatcaacagcgaggccttcctggccagcgtggagaaggacgccaaggagagagccaagagaagaagagagaacaaggtgctggccgacgccctgaaggagaagggcaacgaggccttcgccgagggcaactacgagaccgccatcctgagatacagcgagggcctggagaagctgaaggacatgaaggtgctgtacaccaacagagcccaggcctacatgaagctggaggactacgagaaggccctggtggactgcgagtgggccctgaagtgcgacgagaagtgcaccaaggcctacttccacatgggcaaggccaacctggccctgaagaactacagcgtgagcagagagtgctacaagaagatcctggagatcaaccccaagctgcagacccaggtgaagggctacctgaaccaggtggacctgcaggagaaggccgacctgcaggagaaggaggcccacgagctgctggacagcggcaagaacaccgccgtgaccaccaagaacctgctggagaccctgagcaagcccgaccagatccccctgttctacgccggcggcatcgagatcctgaccgagatgatcaacgagtgcaccgagcagaccctgttcagaatgcacaacggcttcagcatcatcagcgacaacgaggtgatcagaagatgcttcagcaccgccggcaacgacgccgtggaggagatggtgtgcgtgagcgtgctgaagctgtggcaggccgtgtgcagcagaaacgaggagaaccagagagtgctggtgatccaccacgacagagccagactgctggccgccctgctgagcagcaaggtgctggccatcagacagcagagcttcgccctgctgctgcacctggcccagaccgagagcggcagaagcctgatcatcaaccacctggacctgaccagactgctggaggccctggtgagcttcctggacttcagcgacaaggaggccaacaccgccatgggcctgttcaccgacctggccctggaggagagattccaggtgtggttccaggccaacctgcccggcgtgctgcccgccctgaccggcgtgctgaagaccgaccccaaggtgagcagcagcagcgccctgtgccagtgcatcgccatcatgggcaacctgagcgccgagcccaccaccagaagacacatggccgcctgcgaggagttcggcgacggctgcctgagcctgctggccagatgcgaggaggacgtggacctgttcagagaggtgatctacaccctgctgggcctgatgatgaacctgtgcctgcaggcccccttcgtgagcgaggtgtgggccgtggaggtgagcagaagatgcctgagcctgctgaacagccaggacggcggcatcctgaccagagccgccggcgtgctgagcagaaccctgagcagcagcctgaagatcgtggaggaggccctgagagccggcgtggtgaagaagatgatgaagttcctgaagaccggcggcgagaccgccagcagatacgccatcaagatcctggccatctgcaccaacagctaccacgaggccagagaggaggtgatcagactggacaagaagctgagcgtgatgatgaagctgctgagcagcgaggacgaggtgctggtgggcaacgccgccctgtgcctgggcaactgcatggaggtgcccaacgtggccagcagcctgctgaagaccgacctgctgcaggtgctgctgaagctggccggcagcgacacccagaagaccgccgtgcaggtgaacgccggcatcgccctgggcaagctgtgcaccgccgagcccagattcgccgcccagctgagaaagctgcacggcctggagatcctgaacagcaccatgaagtacatcagcgacagctag

SEQ ID NO: 195468 - DNA, 2118 bp, Artificial Sequence
  derived and/or modified sequence
atggatgccgacaaagagaaggatctgcagaagtttctaaaaaacgttgatgagatctccaacttgatccaggagatgaacagtgatgatcccgttgtccaacagaaggctgtgctagaaacagagaagcgattactattaatggaggaggaccaggaagaggatgagtgcaggacgactctaaataaaaccatgatcagtccgcctcagaccgcaatgaagagtgcagaagagattaactcagaggccttcctggcctccgtggaaaaggatgctaaggaacgagccaaacgccgcagagaaaataaggttttagcggatgcgctcaaagaaaagggaaacgaggccttcgctgaaggaaattacgaaactgccatcctcaggtatagcgaggggcttgaaaagttgaaggatatgaaagtgctttacactaaccgcgcccaggcttatatgaagctggaagactacgaaaaggccctagtggattgtgaatgggcccttaagtgtgacgaaaagtgcactaaggcctacttccacatgggaaaagctaacctggctcttaagaactactctgtctctcgagaatgctataagaaaatcttggagatcaaccccaaattgcagacgcaggttaaaggctatctcaatcaagttgacttgcaggagaaagctgacttgcaggagaaggaggcccacgagctgttagacagcggaaaaaacacagcagttacaactaagaacctgcttgaaacactgtctaaaccggatcagatcccactcttctacgccggcggtatcgaaattttgaccgagatgatcaatgaatgcacagagcaaaccctttttcggatgcacaacggcttttccatcatatctgacaacgaagtgattcggcggtgcttctctacggctggaaatgatgccgtagaagaaatggtgtgtgtgtcggtacttaagctctggcaggccgtctgttccagaaacgaagagaatcagcgggtgttggtgatccatcatgaccgagctaggctgctagcagccctcctgagctcaaaggtcctggccatccggcagcagagcttcgccctgctgctgcatctagctcagacggagagcgggcgctctctgatcataaatcatcttgacctgacgaggctgttggaagctctggtgtcatttctggacttctctgataaggaagctaacactgcaatgggccttttcacagatctggctctcgaggagcgcttccaggtttggtttcaggcgaatcttccaggagtacttccggctttgactggagtgttgaagaccgaccctaaggtttctagcagctccgctctatgtcagtgtatcgccatcatgggcaatttgtccgccgagcctactacgcgtcgacacatggccgcctgtgaggagtttggagatggctgcctcagcctcctggccaggtgtgaagaggatgtagacctcttccgcgaagtgatatacaccttactcggactgatgatgaacctgtgcctgcaagcgcctttcgtttcagaggtgtgggccgtggaggtcagtagaagatgcctgtcccttctgaacagtcaggatgggggtattctgacccgagcagccggggtactcagccgcacattaagctcaagcttaaaaatcgtggaagaagccctcagagctggcgtggtgaaaaaaatgatgaagttccttaaaacaggaggggaaaccgcttctcgttatgcaataaaaatcctggctatttgcacaaacagctaccacgaagctcgcgaagaggtgattaggctcgataagaaactaagcgttatgatgaagctcctgtcctctgaggatgaagtgcttgtcggcaacgcagcattgtgcctagggaactgcatggaggtcccaaacgtggccagcagcctcctaaaaacagacctgttgcaggttctcctaaagctggcaggttctgatacccaaaaaaccgccgttcaggtgaatgctggcatcgccctgggaaaactgtgcacagccgagcctaggtttgccgcccagctgcgcaagctccatggcctggaaattctgaatagcacaatgaagtacatctctgatagctag

SEQ ID NO: 195469 - DNA, 2118 bp, Artificial Sequence
  derived and/or modified sequence
atggatgctgacaaggagaaggacctgcagaagttcctgaagaatgtggatgagatcagcaacctgatccaggagatgaacagtgatgatcctgtggtgcagcagaaggctgtgctggagacagagaagaggctgctgctgatggaggaggaccaggaggaggatgagtgcaggaccaccctgaacaagaccatgatcagccccccccagacagccatgaagtctgctgaggagatcaacagcgaggccttcctggcctctgtggagaaggatgccaaggagcgggccaagagaagaagagagaacaaggtgctggctgatgccctgaaggagaagggaaatgaggcctttgctgagggcaactatgaaacagccatcctgcgctacagcgagggcctggagaagctgaaggacatgaaggtgctgtacaccaacagagcccaggcctacatgaagctggaggactatgagaaggccctggtggactgtgagtgggccctgaagtgtgatgagaagtgcaccaaggcctacttccacatgggcaaggccaacctggccctgaagaactacagcgtgtcccgggagtgctacaagaagatcctggagatcaaccccaagctgcagacccaggtgaagggctacctgaaccaggtggacctgcaggagaaggctgacctgcaggagaaggaggcccacgagctgctggacagcggcaagaacacagctgtgaccaccaagaacctgctggagaccctgagcaagccagaccagatccccctcttctacgccggcggcatcgagatcctgacagagatgatcaatgaatgtacagagcagaccctcttcaggatgcacaacggcttcagcatcatcagtgacaatgaggtgatccgccgctgcttcagcacagctggaaatgatgctgtggaggagatggtgtgtgtgtctgtgctgaagctgtggcaggccgtgtgcagcagaaatgaggagaaccagagggtgctggtgatccaccacgaccgggcccggctgctggccgccctgctgagcagcaaggtgctggccatccggcagcagagctttgccctgctgctgcacctggcccagacagagagcggccgcagcctcatcatcaaccacctggacctgacccggctgctggaggccctggtgtccttcctggacttcagtgacaaggaggccaacacagccatgggcctcttcacagacctggccctggaggagcgcttccaggtgtggttccaggccaacctgcccggggtgctgcctgccctgactggagtgctgaagacagaccccaaggtgagcagcagcagcgccctgtgccagtgcatcgccatcatgggcaacctgtctgctgagcccaccaccaggaggcacatggccgcctgtgaggagtttggagatggctgcctgagcctgctggcccgctgtgaagaagatgtggacctcttccgggaggtgatctacaccctgctgggcctgatgatgaacctgtgcctgcaggccccctttgtgtctgaggtgtgggccgtggaggtgtcccggcgctgcctgagcctgctgaacagccaggacggcggcatcctgaccagggctgctggggtgctgagcaggaccctgagcagcagcctgaagatcgtggaggaggccctgcgggccggcgtggtgaagaagatgatgaagttcctgaagacaggaggagaaacagccagccgctatgccatcaagatcctggccatctgcaccaacagctaccacgaggcccgggaggaggtgatccggctggacaagaagctgtctgtgatgatgaagctgctgagcagtgaagatgaggtgctggtgggcaatgctgccctgtgcctgggcaactgcatggaggtgcccaacgtggccagcagcctgctgaagacagacctgctgcaggtgctgctgaagctggccggcagtgacacccagaagacagctgtgcaggtgaatgccggcatcgccctgggcaagctgtgcacagctgagcccaggtttgctgcccagctgaggaagctgcacggcctggagatcctgaacagcaccatgaagtacatcagtgacagctag

SEQ ID NO: 195470 - DNA, 2118 bp, Artificial Sequence
  derived and/or modified sequence
atggacgccgacaaggagaaggacctgcagaagttcctgaagaacgtcgacgagatctccaatctcatccaggagatgaactcagatgatccagtggtgcagcagaaggccgtgcttgagaccgagaagcggttgctgcttatggaggaggatcaggaagaagacgaatgccgaacgaccttgaacaaaaccatgatttcacctccccagactgctatgaagagtgccgaagagattaactccgaagcgttcctagctagtgtcgagaaggacgctaaagagagggccaagcgacgtcgggaaaataaggtgctagctgacgccttaaaagaaaagggcaacgaggccttcgcagaaggcaactatgagactgccattctcaggtacagcgaggggctggagaaactcaaggatatgaaagtgctgtacacaaacagggcacaggcttacatgaagcttgaggactatgagaaggccctggtggactgcgaatgggctttaaaatgcgacgaaaaatgtacaaaggcctatttccatatgggtaaagcaaacttggctttaaaaaactactctgtcagccgcgagtgctacaagaagattctggagataaaccccaagttacagactcaggtgaagggctacttgaaccaagtagatctacaggagaaggctgacctccaggaaaaggaagcccatgaactgctagactctggaaaaaataccgccgttacaacaaaaaatctactggagacactgtcaaaacctgaccagatccccttattttacgcaggggggatagagatcctgaccgaaatgatcaacgaatgtactgaacagaccctgttcaggatgcacaacggatttagcataattagcgataacgaggtcattaggagatgtttcagcacagcaggaaatgatgcagtggaggagatggtgtgcgtatctgtactcaagctctggcaggccgtctgttccaggaacgaggagaaccagcgcgtattagttattcatcatgatagagccaggctgctggctgccctgttgagttctaaggtgctcgcaatccgccagcagagctttgccctcttactgcacttggctcaaaccgagtccggacggtcactaatcatcaatcatctggatctcacgcgcctcctggaggccctcgtgtccttcctcgacttctcagacaaggaagccaatactgctatggggttgtttactgatctggccctggaggagaggttccaggtatggtttcaggctaatttgcctggcgtgctgccggccttaactggcgtgttgaagaccgaccctaaggtgtcatcttcttctgcactctgccaatgtatcgccattatgggcaacttatcggctgagcccacaacacgtcgccacatggccgcctgtgaggagttcggggatggatgcctctctctcctcgcgaggtgtgaagaggacgtcgatcttttccgagaagtaatttacacactcctcggcttgatgatgaatttgtgtctccaggctccattcgtttccgaggtctgggctgtggaagtttctcgcagatgcctgtcactgttgaatagccaggacggaggtatcctgacaagagctgccggcgtcctttccaggaccctgtccagcagcttaaagatagttgaggaagccttgcgggccggagtggtgaaaaagatgatgaaattcctgaagaccggcggcgagactgcctctaggtacgctataaaaatcctggccatttgcaccaacagctaccacgaggcaagagaggaagtgatcagattggacaaaaagctgtctgtaatgatgaagctgctgtcctctgaggatgaggtgctggtaggcaacgccgccctctgccttgggaattgcatggaagtaccaaatgtcgccagcagccttcttaagactgaccttctgcaggtgctcctgaagttggccggaagcgacacacagaagaccgcggtgcaggtgaatgcaggtatagcactgggtaagctgtgcactgccgagcctagattcgctgctcaactgagaaagctgcacggattagagatcttgaacagcacaatgaagtatatcagtgattcatag

SEQ ID NO: 195471 - DNA, 2118 bp, Artificial Sequence
  derived and/or modified sequence
atggacgccgataaagagaaggatttgcaaaagttcttaaagaacgtggacgagatctccaatctcatccaggaaatgaatagtgatgatcctgtcgtgcagcagaaagcagttctggaaaccgagaaacgactgctgttaatggaggaagaccaggaggaggatgagtgcagaactacactaaataaaaccatgatctctccaccccagacagccatgaagagcgccgaggagatcaacagcgaggcttttttagcctcggtggagaaagatgcaaaggagagggccaagagacgcagagagaacaaggtcctggctgatgccctgaaagagaaaggcaatgaggcctttgcggagggcaattacgagactgcgattttaaggtacagtgaaggcctggagaaactcaaggatatgaaggtcctgtataccaatagggcacaggcttacatgaaattggaggattatgagaaagctctcgtggattgcgagtgggctttaaagtgtgatgagaagtgcacaaaggcgtatttccatatggggaaggctaatctcgccctcaaaaactattccgttagcagagagtgttacaaaaaaattcttgagattaacccgaagctgcaaacccaagtaaagggttacctgaatcaggtggacctgcaggagaaagctgacttacaagagaaggaggcacacgagttgctggacagcgggaagaatacagccgtaacgactaagaatctcttggagaccttatctaagcctgatcagattccacttttctatgctggagggatcgagatactgacggagatgattaatgagtgcaccgaacagaccctgttccgaatgcataacggattcagcattatcagtgacaacgaagtcattcggaggtgcttctcaactgccggaaacgacgccgtggaggaaatggtgtgtgtctccgtacttaagctgtggcaggcagtgtgcagccggaatgaagagaaccagcgtgtcctagtaatacaccatgatcgggcaagactcctcgccgctctgttatcttccaaggttctggccatcaggcagcaatcattcgcactgctgctgcatctggcccagacagagagtggcagatctctcattattaatcacctggatttaacccgcttgcttgaggccctcgttagctttctcgactttagcgataaggaggccaatactgcaatgggcctgttcactgacctggctctagaggagcgcttccaggtctggttccaggccaatctgcccggtgtgctgccagcactgacgggagtactcaagacagaccccaaagtaagcagctcctccgccttgtgccagtgcatagccataatggggaatctcagcgccgagcccaccacgagacggcacatggccgcatgcgaggagttcggagatggatgcttgtccctactcgccaggtgtgaggaagatgtcgaccttttccgcgaagtaatctacacactgctcggactgatgatgaacctctgtctgcaggcaccatttgtgtccgaggtctgggcagttgaggtctcacgtagatgtttgtcactgctgaactctcaagatggaggcatcttaactagggcagcaggggttctcagccgcacactatcttcttccctaaaaattgtcgaagaagctcttcgtgctggcgtggtgaaaaagatgatgaaattcctcaagacaggaggtgagaccgcctcacgatacgctattaagattcttgcaatatgcactaacagttatcacgaggcaagagaggaggtcatacggctcgacaagaagttatctgttatgatgaagttgctttcatcggaagacgaggtactagtcggcaacgctgctctctgtctcggcaattgcatggaagtccccaacgtggcgtcctctcttctcaagactgacctgttgcaggttctgctgaaactggcaggctcggacacccagaaaacggctgtccaggtgaacgccggaatcgcccttggaaaactgtgtaccgccgaacccaggttcgccgcacagctcagaaaactgcacggactcgaaattttgaatagcacaatgaaatacatatccgattcctag

SEQ ID NO: 195472 - DNA, 2315 bp, Artificial Sequence
  derived and/or modified sequence
cttggtcccgccccgggcccctggctcctggccccgccccagcccaggcaggtcactgcgccatttcctgtccaaagctgggcgaatcagggattccggttcacaatggatgctgataaagagaaagatttgcagaaatttcttaaaaatgtggatgaaatctccaatttaattcaggagatgaattctgatgacccagttgtgcaacagaaagctgtcctggagacagaaaagagactactgcttatggaggaagaccaggaggaggatgaatgcaggaccaccttgaacaagactatgatcagtcctccacaaactgctatgaagagtgcagaagaaataaactcagaggccttcttggcatctgtggagaaggatgcaaaggaacgagccaagagaagaagggaaaacaaagtcttggcggatgccctaaaagaaaaagggaatgaagcatttgctgaaggcaattatgaaacagctatcctgcgctacagtgagggtttggagaagctgaaggacatgaaagtgctgtacaccaaccgagcccaggcttatatgaaacttgaggactatgagaaggcactggtggattgtgagtgggctctcaagtgtgatgaaaaatgcacaaaagcatattttcacatgggaaaagccaacctggccctgaagaactacagtgtgtctagagagtgttataagaagatcttagaaataaaccccaagctgcaaacccaggtgaaaggttacctgaatcaagtagatcttcaggaaaaagcagaccttcaagaaaaggaagcccacgaactgctggattcaggaaagaacacagccgtgaccaccaagaacctcctggagaccctttccaagcctgaccagatccccttgttctatgctggggggattgagatcctgactgaaatgataaatgagtgcacagaacaaactttattcagaatgcacaatggatttagtatcatcagtgacaacgaggtcataagaaggtgtttttccacagcaggaaatgatgcagttgaagaaatggtctgtgtgtctgttctcaagctctggcaagcagtgtgcagcaggaacgaggaaaaccagcgtgtgctagtgatacaccatgacagggccaggctgttggccgccctcttgtcctccaaggtcctggccatccggcagcagagctttgccctgctgctgcatctcgcccagactgagagcggacggagcctgatcatcaaccaccttgacctgaccagattattggaagcgctggtgtcatttcttgatttctcggataaggaggccaacactgctatgggactgttcacagacttggctctggaagaaagattccaagtctggttccaggccaaccttccaggtgttctccctgcactcacaggcgttctgaagacagatcccaaggtaagcagctcctcggctctgtgccagtgcattgccatcatgggaaacctcagtgctgagcccactacccgaagacacatggcggcctgtgaggaatttggggatggctgcttgagcctcctggccaggtgtgaggaggatgtggacctgttcagagaggttatctacacactcctgggactcatgatgaacctgtgtcttcaggctccctttgtctctgaggtttgggctgtggaggtgagcagaaggtgcctgtctttactaaacagccaggatggaggaatcctgacaagagctgctggtgttctgagccggaccctttcttcctctctgaaaattgttgaggaggccttgcgagcaggagtggtaaagaaaatgatgaaattcctgaagacaggaggtgagactgcatcacgttatgctataaagatactagctatctgcacgaatagttatcatgaagctcgggaagaagtaataagactggataaaaagttgagcgttatgatgaagctgctcagctcggaggatgaggttctggtgggcaacgctgccctctgccttggtaactgcatggaggtgcccaacgttgcgtcttccctgctaaagacggaccttttgcaggtcttgttaaagcttgcaggcagtgacacacagaagacggccgtgcaggtgaacgcaggcattgctctggggaagctgtgcacagctgagcccagatttgctgctcaactgagaaagcttcatggcctagaaattctcaactctacgatgaaatacatcagtgattcttgagagagacagggtttgtgtgcatttggggaacacacagatgcacaccgtgtgttgttcctatgctaataaagacctttgatgtatccacttca

SEQ ID NO: 195473 - protein, 465 aa, Artificial Sequence
  derived and/or modified sequence
MMSEHDLADVVQIAVEDLSPDHPVVLENHVVTDEDEPALKRQRLEINCQDPSIKSFLYSINQTICLRLDSIEAKLQALEATCKSLEEKLDLVTNKQHSPIQVPMVAGSPLGATQTCNAVPGRRQNTIVVKVPGQEDSHHEDGESGSEASDSVSSCGQAGSQSIGSNVTLITLNSEEDYPNGTWLGDENNPEMRVRCAIIPSDMLHISTNCRTAEKMALTLLDYLFHREVQAVSNLSGQGKHGKKQLDPLTIYGIRCHLFYKFGITESDWYRIKQSIDSKCRTAWRRKQRGQSLAVKSFSRRTPNSSSYCPSEPMMSTPPPASELPQPQPQPQALHYALANAQQVQIHQIGEDGQVQVIPQGHLHIAQVPQGEQVQITQDSEGNLQIHHVGQDGQVLQGAQLIAVASSDPAAAGVDGSPLQGSDIQVQYVQLAPVSDHTAGAQTAEALQPTLQPEMQLEHGAIQIQ

SEQ ID NO: 195474 - protein, 469 aa, Artificial Sequence
  derived and/or modified sequence
MMSEHDLADVVQIAVEDLSPDHPVVLENHVVTDEDEPALKRQRLEINCQDPSIKSFLYSINQTICLRLDSIEAKLQALEATCKSLEEKLDLVTNKQHSPIQVPMVAGSPLGATQTCNKVRCAVPGRRQNTIVVKVPGQEDSHHEDGESGSEASDSVSSCGQAGSQSIGSNVTLITLNSEEDYPNGTWLGDENNPEMRVRCAIIPSDMLHISTNCRTAEKMALTLLDYLFHREVQAVSNLSGQGKHGKKQLDPLTIYGIRCHLFYKFGITESDWYRIKQSIDSKCRTAWRRKQRGQSLAVKSFSRRTPNSSSYCPSEPMMSTPPPASELPQPQPQPQALHYALANAQQVQIHQIGEDGQVQVIPQGHLHIAQVPQGEQVQITQDSEGNLQIHHVGQDGQVLQGAQLIAVASSDPAAAGVDGSPLQGSDIQVQYVQLAPVSDHTAGAQTAEALQPTLQPEMQLEHGAIQIQ

SEQ ID NO: 195475 - DNA, 2230 bp, Artificial Sequence
  derived and/or modified sequence
gcagagcggcggcttctctcgcgaggacggacgccattatcgcatctccccgacaaacaccacgagaattccgcagcccacacggtgaccaaaagccagccccactgtgagttgaactctttcgtgttgaccggccactctccgtgctctggatgatgtcggaacacgacctggccgatgtggttcagattgcagtggaagacctgagccctgaccacccagttgttttggagaatcatgtagtgacagatgaagacgaacctgctttgaaacgccagcgactagaaatcaattgccaggatccatctataaagtcattcctgtattccatcaaccagacaatctgcttgcggttggatagcattgaagccaaattgcaagccctggaggctacttgtaaatccttagaagaaaagctggatctggtcacgaacaagcagcacagccccatccaggtccccatggtggccggctcccctctcggggcaacccagacgtgcaacaaagtgcgatgcgctgtgcctgggcgtcggcagaacaccattgtggtgaaggtgccgggccaagaagacagccaccacgaggacggggagagcggctcggaggccagcgactctgtgtccagctgtgggcaggcgggcagtcagagcatcgggagcaacgtcacgctcatcaccctgaactcggaagaggactaccccaatggcacctggctgggcgacgagaacaaccccgagatgcgggtacgctgcgccatcatcccctccgacatgctgcacatcagcaccaactgccgcacggccgagaagatggcgctcacgctgctggactacctcttccaccgcgaggtgcaggctgtgtccaacctctcggggcagggcaagcacgggaagaagcagctggacccgctcaccatctacggcatccggtgtcaccttttctataaatttggcatcacagaatccgactggtaccgaatcaagcagagcatcgactccaagtgccgcacggcgtggcggcgcaagcagcggggccagagcctggcggtcaagagcttctcgcggagaacgcccaactcgtcctcctactgcccttcagagccgatgatgagcaccccacctcctgccagcgagctcccgcagccacagccgcagccgcaggccctgcactacgcgctggccaacgcacagcaggtgcagatccaccagatcggagaagacggacaggtgcaagtaatcccacagggacacctccacatcgcccaggtgccgcagggggagcaagtccagatcacgcaggacagcgagggcaacctccagatccatcacgtggggcaggacggtcaggtgctgcagggtgcacagctgatcgccgtggcctcctcggaccccgcggcggcgggcgtggatgggtcgccactccagggcagcgacatccaggttcagtacgtgcagctggcgccagtgagtgaccacacggccggggcacagacggccgaagccctgcagcccacgctacagccggagatgcagctcgagcacggggccatccagattcagtgagcggtgcccatggcaccaggagcccctcgccggctccgcctacggcccggcccccacgcgccctgctctcacggcctcggcacaggcagcggctgcacgtgttctgctgaagtgcgtctgaaggccgctgcctccgcggggaacagcatcctatcaactgaaagagcagccgccgccgcccccagccggagacccctttcgtttgagtcctgctgttggtgtcggagcacgaggggaggcacggtgcggagagcgtcgcatatgcgcgggaaatcaagaactatgatatttttctgtttaaacagctttttttaatttgctatggtgtttataacaaaaaagaaaatttgaaaaaaaaaatcccaggggagtagcaggagccctttgctgtgtgctctgtccagtgtcatgagacgggagccctttgctgtgtgctctgtccagtgtcatgagacgggagccctttgctgtgtgctctgtccagtgtcatgagacgggagccctttgctgtgtgctctgtccagtgtcatgaggcaggtgtttgcaaagccagctctcggttccgatggggtattgctgacctacttttctaggggaaatgctcttaaacactgtaattatgcatttctaatgaaataaaatgtatttatgaccacaaaaaaaaaaaa

SEQ ID NO: 195476 - DNA, 1398 bp, Artificial Sequence
  derived and/or modified sequence
atgatgtcagagcacgatcttgccgacgttgtgcagattgccgtggaggacctgtcacctgatcatcctgtggttttagaaaaccatgtggtgaccgacgaggatgaacctgcgctcaagcggcagcgtcttgaaataaattgtcaagatccctccataaaatcgtttctatattcgatcaatcagacaatttgcctaagactggattctatcgaggccaagcttcaggcgctcgaggcaacctgcaagagccttgaggagaagctcgatttagtgacaaacaaacaacattctccaatccaggtgcccatggtggctggatccccgctgggggcgacccagacatgcaatgccgtgccaggccggcgtcagaacacaatcgtggtgaaggtgcccggtcaggaggactcccaccacgaagacggggaatcaggaagtgaggcatcagattccgtgtcctcatgcggtcaggctggatcgcagagtatcggatctaatgttaccctcatcaccttgaatagtgaggaggattatcctaatggcacatggctgggtgacgagaataaccctgagatgcgagtcaggtgcgctatcattccctcagatatgttacacatatctactaattgccgaaccgccgagaagatggccctgaccctcctcgattacttgttccatagagaggtgcaggccgttagtaatcttagtggacaaggtaaacacggcaaaaagcagttagatccgctaaccatctacgggatccgctgccacttgttttacaagtttggcattaccgaatctgactggtacagaatcaagcagtccatcgatagtaagtgcaggaccgcctggcggcggaaacagcgcggacaatccttggcggtgaagtccttttcaagacgcacacctaactcgtcatcctattgtccatcagagccgatgatgtcaacacctcctccggcttccgagcttcctcagccgcagccacagcctcaggcactgcactacgcgctggccaatgcccagcaggtgcagatacatcagattggagaggatgggcaggttcaagtgatcccccagggccacttgcacatcgcccaggtgcctcagggtgagcaggtccagataactcaggacagcgaggggaatctccaaatacaccatgtagggcaggacggccaagtcctccagggagcccagctgattgctgtggcatcatcagaccctgccgctgctggggtggacggcagtccgctgcagggcagcgacatccaggtacaatatgtgcaacttgcacctgtttcagaccacacagctggagcacagaccgcagaagccttacaacccaccttgcagccggagatgcaactagagcacggggccatacaaattcagtag

SEQ ID NO: 195477 - DNA, 1410 bp, Artificial Sequence
  derived and/or modified sequence
atgatgagcgagcatgaccttgccgatgtggtgcagatcgccgttgaggatctcagtcctgatcacccggtcgtcttggaaaatcatgtggtaactgatgaagatgagcccgcgctgaagcggcaaagactagagataaattgccaggacccctccattaagtctttcttgtacagcattaaccagaccatatgtctaagactggactccattgaagccaagttgcaggccctcgaggcaacttgcaagtccctagaggaaaagcttgacctcgttacaaataaacagcatagtccaatacaggttccgatggtcgctggttcacccctgggagcaacccagacctgcaacaaagtgcggtgtgctgtgcccgggcgccgccagaatacgattgtggtgaaggtccctgggcaggaagactcccatcacgaagatggagagagcggtagcgaggcttctgatagtgtgagtagctgcggtcaagccggctctcagagtattgggagtaatgtaacacttatcacattaaattccgaagaggattatccgaatggtacttggctcggggatgaaaataatccagaaatgcgcgtgaggtgcgcgattattcctagtgacatgctccatatcagcactaattgccgaaccgccgagaagatggccctcactctgttggactatctgtttcaccgggaggtccaggccgtatcaaacctgtcggggcaggggaagcacgggaagaaacaactcgatccactcaccatctacggcataagatgccacctcttttataagtttgggataacagagtcggattggtatcgtatcaagcagtctattgactctaaatgtaggactgcctggagacgaaaacagcgcggacaaagcctagccgtaaagagtttttcccgccgcacgcccaactctagcagctattgtcctagtgaaccaatgatgagcactccaccccctgccagcgagctcccgcagccgcaaccacagccccaggccctccactacgctctagctaatgcccagcaggttcagattcaccagattggcgaggatggccaagtccaagtgattcctcagggccatttgcacattgcacaggtcccacagggagaacaggttcaaataacacaggattcggagggaaacttgcagattcaccacgtgggccaggacggacaggtgttgcaaggagctcagctcattgctgtggcttcctccgatccggcggcagcaggagtggacggcagtcccttgcagggaagtgacattcaggtgcaatacgtgcagctcgcccctgtcagcgaccatactgctggggcacaaacagccgaagccctgcagccaactctgcagcccgagatgcagcttgaacatggcgcgatacaaatacagtag

SEQ ID NO: 195478 - DNA, 1398 bp, Artificial Sequence
  derived and/or modified sequence
atgatgtctgaacatgacctggctgatgtggtgcagattgctgtggaggacctgagcccagaccaccctgtggtgctggagaaccacgtggtgacagatgaagatgagcccgccctgaagaggcagaggctggagatcaactgccaggaccccagcatcaagagcttcctgtacagcatcaaccagaccatctgcctgcggctggacagcattgaggccaagctgcaggccctggaggccacctgcaagagcctggaggagaagctggacctggtgaccaacaagcagcacagccccatccaggtgcccatggtggccggcagccccctgggcgccacccagacctgcaatgctgtgcccggccggcggcagaacaccatcgtggtgaaggtgcccggccaggaggacagccaccatgaagatggagagagcggcagcgaggccagtgacagcgtgagcagctgtggccaggccggcagccagagcatcggcagcaatgtgaccctcatcaccctgaacagcgaggaggactaccccaacggcacctggctgggagatgagaacaaccctgagatgagggtgcgctgtgccatcatccccagcgacatgctgcacatcagcaccaactgcaggacagctgagaagatggccctgaccctgctggactacctgttccaccgggaggtgcaggccgtgagcaacctgagcggccagggcaagcacggcaagaagcagctggaccccctgaccatctacggcatccgctgccacctgttctacaagtttggcatcacagaaagtgactggtaccgcatcaagcagagcattgacagcaaatgtagaacagcctggaggaggaagcagaggggccagagcctggccgtgaagagcttcagcaggaggacccccaacagcagcagctactgccccagcgagcccatgatgagcaccccacctccagccagcgagctgccccagccccagccccagccccaggccctgcactacgccctggccaatgcccagcaggtgcagatccaccagattggagaagatggccaggtgcaggtgatcccccagggccacctgcacatcgcccaggtgccccagggcgagcaggtgcagatcacccaggacagcgagggcaacctgcagatccaccacgtgggccaggacggccaggtgctgcagggcgcccagctgattgctgtggccagcagtgaccctgctgctgctggggtggatggcagccccctgcagggcagtgacatccaggtgcagtatgtgcagctggcccctgtgtctgaccacacagctggggcccagacagctgaggccctgcagcccaccctgcagcctgagatgcagctggagcacggggccatccagatccagtag

SEQ ID NO: 195479 - DNA, 1410 bp, Artificial Sequence
  derived and/or modified sequence
atgatgtctgaacatgacctggctgatgtggtgcagattgctgtggaggacctgagcccagaccaccctgtggtgctggagaaccacgtggtgacagatgaagatgagcccgccctgaagaggcagaggctggagatcaactgccaggaccccagcatcaagagcttcctgtacagcatcaaccagaccatctgcctgcggctggacagcattgaggccaagctgcaggccctggaggccacctgcaagagcctggaggagaagctggacctggtgaccaacaagcagcacagccccatccaggtgcccatggtggccggcagccccctgggcgccacccagacctgcaacaaggtgcgctgtgctgtgcccggccggcggcagaacaccatcgtggtgaaggtgcccggccaggaggacagccaccatgaagatggagagagcggcagcgaggccagtgacagcgtgagcagctgtggccaggccggcagccagagcatcggcagcaatgtgaccctcatcaccctgaacagcgaggaggactaccccaacggcacctggctgggagatgagaacaaccctgagatgagggtgcgctgtgccatcatccccagcgacatgctgcacatcagcaccaactgcaggacagctgagaagatggccctgaccctgctggactacctgttccaccgggaggtgcaggccgtgagcaacctgagcggccagggcaagcacggcaagaagcagctggaccccctgaccatctacggcatccgctgccacctgttctacaagtttggcatcacagaaagtgactggtaccgcatcaagcagagcattgacagcaaatgtagaacagcctggaggaggaagcagaggggccagagcctggccgtgaagagcttcagcaggaggacccccaacagcagcagctactgccccagcgagcccatgatgagcaccccacctccagccagcgagctgccccagccccagccccagccccaggccctgcactacgccctggccaatgcccagcaggtgcagatccaccagattggagaagatggccaggtgcaggtgatcccccagggccacctgcacatcgcccaggtgccccagggcgagcaggtgcagatcacccaggacagcgagggcaacctgcagatccaccacgtgggccaggacggccaggtgctgcagggcgcccagctgattgctgtggccagcagtgaccctgctgctgctggggtggatggcagccccctgcagggcagtgacatccaggtgcagtatgtgcagctggcccctgtgtctgaccacacagctggggcccagacagctgaggccctgcagcccaccctgcagcctgagatgcagctggagcacggggccatccagatccagtag

SEQ ID NO: 195480 - DNA, 1398 bp, Artificial Sequence
  derived and/or modified sequence
atgatgagcgagcacgacctggccgacgtggtgcagatcgccgtggaggatttaagccccgatcaccccgttgtgctggaaaaccacgtggtcacagatgaggatgaacctgccctgaaacggcaacggctagaaatcaactgtcaagatcccagtattaagagctttctgtattcaataaaccaaacaatttgtcttaggctggattcaattgaagccaagttgcaagctttagaggctacatgcaagagcctcgaagaaaagctggatcttgttacgaataagcagcacagccccattcaagtgcccatggtggcaggatcacctctcggagcaactcagacttgcaatgcggtgcccggacgcagacaaaacactatcgtggtgaaggttccaggccaggaagactctcaccatgaagacggcgagtccggcagtgaagcatccgatagcgtgtcttcttgcggtcaagcgggttcccaatcgatcgggtcaaatgtcactcttatcactttgaattccgaggaggattaccccaatggcacatggttaggtgatgaaaataacccggaaatgcgagtgagatgtgccattatcccgtcagatatgttgcacatttctacgaattgtagaaccgctgagaaaatggcccttaccttgcttgactatctgttccatcgagaggtgcaggccgtcagcaatctcagcggacagggcaagcacgggaaaaaacagctggaccctttgactatctacgggataaggtgtcaccttttctataaatttggcattacagagagtgattggtacaggatcaaacaatccattgacagcaaatgcagaacagcctggcgtcgcaaacagcgtggccagagccttgccgtgaagtctttctcccgccggacccctaatagttcatcctactgtccgtcagagccgatgatgagcacaccaccacccgcaagtgagctgcctcaaccacaaccgcagcctcaagctctccattatgctctggctaacgctcagcaggtccaaatacaccagatcggagaggatggacaggtccaggtgattccacagggccacctccacattgcgcaggtcccccagggggagcaagtgcaaatcacacaagacagcgaggggaacttgcaaattcatcacgtgggacaggacgggcaggtgctccagggtgcgcaactcattgcggtcgcttccagcgacccagccgcagcaggagtcgatggctccccactgcagggctcagatatccaggtgcagtatgttcagctggctccggttagcgaccatacagccggtgctcagacagccgaagcgcttcagccaactttacagccggagatgcagctggagcacggagccatccagattcagtag

SEQ ID NO: 195481 - DNA, 1410 bp, Artificial Sequence
  derived and/or modified sequence
atgatgagcgagcacgacctggccgacgtggtgcagatcgccgtggaagatctatcacccgaccacccagttgtactggagaatcatgtagtaaccgacgaagacgagcctgcccttaagaggcagagactcgagattaattgccaagacccctctatcaagtcttttctatacagtattaaccagaccatttgcctcaggcttgatagtatagaggcgaaacttcaggccctcgaagccacctgtaaaagtctggaggaaaagctggacctggtcactaacaagcagcattcccctatacaagtcccaatggtagcgggctcccctctgggggccacccagacatgcaacaaagtaaggtgtgctgtgccaggcaggcgacagaacacaatagtagttaaagttcctggccaggaggattcccaccatgaagacggagagtcagggtctgaggcatctgactccgtgtccagttgtggacaagcgggatcccagagtattgggtccaatgtcaccttgatcacccttaacagcgaggaggactatcctaacgggacctggctgggcgacgaaaacaacccggagatgagagtccgttgcgcaatcattccatccgacatgctacacatcagcaccaattgtcgtactgcggagaaaatggccctgacccttctagactacttattccacagggaggtccaagctgtgtccaatttgtccggccagggaaagcatggaaaaaagcagctagatccccttactatttacgggataaggtgtcacctcttttacaaattcggcatcacagagtccgattggtatcggattaagcagagcatcgatagtaagtgccggacggcttggcgccgcaaacagcggggtcagtccttggctgtcaagtctttctcacggcgaacccccaactctagttcatattgcccttccgaaccgatgatgtcaactccgccaccggcgagcgaactacctcaacctcagccacagcctcaggccctgcattacgcgcttgcgaatgcacagcaggtccagatccaccagattggggaagatggtcaggtccaggtgatcccccagggccatctccatatcgcccaagtgccgcagggcgagcaggtgcagattacccaggattctgaaggaaatcttcagatccaccacgtgggacaggatggacaggtgctccagggagctcaactgatcgccgtggcatcgtccgaccccgcggctgctggcgtggatggttccccactgcagggatccgacatacaggtgcagtacgtgcagctggcacctgtgagcgatcatacagcgggcgcccaaaccgcagaggccctccagcctacgcttcagcctgaaatgcaattagagcatggtgccattcagatacaatag

SEQ ID NO: 195482 - DNA, 1398 bp, Artificial Sequence
  derived and/or modified sequence
atgatgagcgagcatgatctggctgacgtggtgcagattgccgtggaggatctgagccctgaccaccctgtcgtactggaaaaccatgtcgtcaccgatgaggatgaacccgctctgaagcggcagaggctagaaattaattgccaggaccctagtatcaaaagttttctctactccatcaatcaaactatctgcctgagactggacagcatagaggcaaaactgcaagccctggaagccacctgcaaatccctcgaagagaagctggacttggtgacaaacaagcaacattctcccatccaagttccgatggttgctgggagcccccttggggcaacccaaacctgcaacgctgtgcctggaaggaggcagaacactatcgtggtaaaggtgccaggacaggaagattctcaccacgaagatggagagagtgggtccgaagcatccgatagcgtcagtagttgtgggcaggcaggctcacaaagcattggcagcaacgttacactgataactctgaactccgaggaggattatccgaatggcacttggctgggggatgaaaacaaccctgaaatgagagtgaggtgcgccataattccctcagatatgttgcacatctccacaaactgtaggacagccgaaaagatggcactgacgcttctggactatctcttccaccgggaggtacaggccgtatctaatctgtccggtcaaggcaagcatgggaaaaagcagcttgatccactgacaatctacgggatccgttgccacctattctacaagttcggtatcactgaaagcgattggtaccgaatcaagcagagcatcgatagcaagtgccggactgcatggaggcgtaaacagcgcggacagagcctggcagtgaaaagcttctctcgcaggacacctaattcatcttcgtattgccctagcgaaccgatgatgagcaccccaccccctgcttctgaattgccacagccgcagccccagccacaggcactgcactatgcccttgcaaacgcacagcaggtgcagattcaccaaatcggagaagatggacaggtgcaggtgatccctcaaggccacctccacattgctcaagtaccccagggcgagcaggtccagataacacaagacagcgagggtaacctccagatccatcatgtgggtcaggatggccaagtattgcagggagcccagcttatagcagtggcctcgtcagaccctgctgccgcaggagttgacggctctcccttgcagggttctgatattcaggtgcagtatgtccagctagccccagtctcagatcacaccgccggtgctcagacagcggaggctctgcagccaacccttcagcctgagatgcagctggagcacggagccatccaaattcagtag

SEQ ID NO: 195483 - DNA, 1410 bp, Artificial Sequence
  derived and/or modified sequence
atgatgtccgagcatgatctcgcggatgtggtgcagatcgcagtggaggatctgagccccgaccatcctgttgtgctggaaaatcatgtggtgaccgacgaggacgagcccgctctgaaacggcagagacttgagatcaattgtcaggacccatccatcaaatcttttctttattccataaatcagaccatctgtttgagactggattccattgaggcaaaactgcaggcactggaagccacctgcaagtccctagaagaaaaactggaccttgtgactaataaacaacacagccccatccaagtgcctatggttgccggatcgcctctcggggcaacccagacgtgtaacaaagtcagatgcgccgtccccggtcggcgtcaaaataccattgtggttaaggtgcccggacaggaagacagccaccacgaggacggagaaagcgggagtgaggcctcagactccgtgtccagctgcggccaagctggaagccaatccattggcagtaacgtgaccttgatcacactgaactcggaagaagattaccccaacggcacctggctcggagacgagaataaccctgagatgcgagtgcggtgtgcaatcattccctcagatatgttacacattagcactaactgtcggaccgctgagaagatggccttgaccctgctagactacctgttccaccgagaagttcaggcagtatccaacttatccggccagggtaagcacggcaaaaagcagctggaccccttgaccatctatggtattcggtgccaccttttctataaattcgggatcactgaaagtgactggtaccgaattaagcagagcattgatagcaagtgccgtaccgcgtggcgcaggaagcagagaggccagtctctggctgttaagtcattcagtcgcagaaccccaaatagtagcagctactgcccctcagaaccaatgatgtcaacaccaccacctgcatcagaattgccccagcctcagccccaaccccaggccctgcattatgctctggccaacgcacaacaggtccagattcaccagattggcgaggatggccaggttcaggttatcccccagggacacctacacatagcacaggtcccacagggtgaacaggtacagattacacaggatagcgaaggtaatttgcagatccatcatgtgggccaagacggtcaggtgcttcagggtgcccagctaatagctgttgcctcaagcgaccccgctgctgccggagtggacggatccccactccagggctcagacattcaggtgcagtacgtgcagttggctcctgtgtctgaccatactgccggagctcagaccgccgaggctcttcagcccactcttcaacctgagatgcagctggagcatggggctatccagatccagtag

SEQ ID NO: 195484 - DNA, 2124 bp, Artificial Sequence
  derived and/or modified sequence
gcagagcggcggcttctctcgcgaggacggacgccattatcgcatctccccgacaaacaccacgagaattccgcagcccacacggtgaccaaaagccagccccactgtgagttgaactctttcgtgttgaccggccactctccgtgctctggatgatgtcggaacacgacctggccgatgtggttcagattgcagtggaagacctgagccctgaccacccagttgttttggagaatcatgtagtgacagatgaagacgaacctgctttgaaacgccagcgactagaaatcaattgccaggatccatctataaagtcattcctgtattccatcaaccagacaatctgcttgcggttggatagcattgaagccaaattgcaagccctggaggctacttgtaaatccttagaagaaaagctggatctggtcacgaacaagcagcacagccccatccaggtccccatggtggccggctcccctctcggggcaacccagacgtgcaacgctgtgcctgggcgtcggcagaacaccattgtggtgaaggtgccgggccaagaagacagccaccacgaggacggggagagcggctcggaggccagcgactctgtgtccagctgtgggcaggcgggcagtcagagcatcgggagcaacgtcacgctcatcaccctgaactcggaagaggactaccccaatggcacctggctgggcgacgagaacaaccccgagatgcgggtacgctgcgccatcatcccctccgacatgctgcacatcagcaccaactgccgcacggccgagaagatggcgctcacgctgctggactacctcttccaccgcgaggtgcaggctgtgtccaacctctcggggcagggcaagcacgggaagaagcagctggacccgctcaccatctacggcatccggtgtcaccttttctataaatttggcatcacagaatccgactggtaccgaatcaagcagagcatcgactccaagtgccgcacggcgtggcggcgcaagcagcggggccagagcctggcggtcaagagcttctcgcggagaacgcccaactcgtcctcctactgcccttcagagccgatgatgagcaccccacctcctgccagcgagctcccgcagccacagccgcagccgcaggccctgcactacgcgctggccaacgcacagcaggtgcagatccaccagatcggagaagacggacaggtgcaagtaatcccacagggacacctccacatcgcccaggtgccgcagggggagcaagtccagatcacgcaggacagcgagggcaacctccagatccatcacgtggggcaggacggtcaggtgctgcagggtgcacagctgatcgccgtggcctcctcggaccccgcggcggcgggcgtggatgggtcgccactccagggcagcgacatccaggttcagtacgtgcagctggcgccagtgagtgaccacacggccggggcacagacggccgaagccctgcagcccacgctacagccggagatgcagctcgagcacggggccatccagattcagtgagcggtgcccatggcaccaggagcccctcgccggctccgcctacggcccggcccccacgcgccctgctctcacggcctcggcacaggcagcggctgcacgtgttctgctgaagtgcgtctgaaggccgctgcctccgcggggaacagcatcctatcaactgaaagagcagccgccgccgcccccagccggagacccctttcgtttgagtcctgctgttggtgtcggagcacgaggggaggcacggtgcggagagcgtcgcatatgcgcgggaaatcaagaactatgatatttttctgtttaaacagctttttttaatttgctatggtgtttataacaaaaaagaaaatttgaaaaaaaaaatcccaggggagtagcaggagccctttgctgtgtgctctgtccagtgtcatgagacgggagccctttgctgtgtgctctgtccagtgtcatgaggcaggtgtttgcaaagccagctctcggttccgatggggtattgctgacctacttttctaggggaaatgctcttaaacactgtaattatgcatttctaatgaaataaaatgtatttatgacc

SEQ ID NO: 195485 - DNA, 2164 bp, Artificial Sequence
  derived and/or modified sequence
aacaccacgagaattccgcagcccacacggtgaccaaaagccagccccactgtgagttgaactctttcgtgttgaccggccactctccgtgctctggatgatgtcggaacacgacctggccgatgtggttcagattgcagtggaagacctgagccctgaccacccagttgttttggagaatcatgtagtgacagatgaagacgaacctgctttgaaacgccagcgactagaaatcaattgccaggatccatctataaagtcattcctgtattccatcaaccagacaatctgcttgcggttggatagcattgaagccaaattgcaagccctggaggctacttgtaaatccttagaagaaaagctggatctggtcacgaacaagcagcacagccccatccaggtccccatggtggccggctcccctctcggggcaacccagacgtgcaacaaagtgcgatgcgctgtgcctgggcgtcggcagaacaccattgtggtgaaggtgccgggccaagaagacagccaccacgaggacggggagagcggctcggaggccagcgactctgtgtccagctgtgggcaggcgggcagtcagagcatcgggagcaacgtcacgctcatcaccctgaactcggaagaggactaccccaatggcacctggctgggcgacgagaacaaccccgagatgcgggtacgctgcgccatcatcccctccgacatgctgcacatcagcaccaactgccgcacggccgagaagatggcgctcacgctgctggactacctcttccaccgcgaggtgcaggctgtgtccaacctctcggggcagggcaagcacgggaagaagcagctggacccgctcaccatctacggcatccggtgtcaccttttctataaatttggcatcacagaatccgactggtaccgaatcaagcagagcatcgactccaagtgccgcacggcgtggcggcgcaagcagcggggccagagcctggcggtcaagagcttctcgcggagaacgcccaactcgtcctcctactgcccttcagagccgatgatgagcaccccacctcctgccagcgagctcccgcagccacagccgcagccgcaggccctgcactacgcgctggccaacgcacagcaggtgcagatccaccagatcggagaagacggacaggtgcaagtaatcccacagggacacctccacatcgcccaggtgccgcagggggagcaagtccagatcacgcaggacagcgagggcaacctccagatccatcacgtggggcaggacggtcaggtgctgcagggtgcacagctgatcgccgtggcctcctcggaccccgcggcggcgggcgtggatgggtcgccactccagggcagcgacatccaggttcagtacgtgcagctggcgccagtgagtgaccacacggccggggcacagacggccgaagccctgcagcccacgctacagccggagatgcagctcgagcacggggccatccagattcagtgagcggtgcccatggcaccaggagcccctcgccggctccgcctacggcccggcccccacgcgccctgctctcacggcctcggcacaggcagcggctgcacgtgttctgctgaagtgcgtctgaaggccgctgcctccgcggggaacagcatcctatcaactgaaagagcagccgccgccgcccccagccggagacccctttcgtttgagtcctgctgttggtgtcggagcacgaggggaggcacggtgcggagagcgtcgcatatgcgcgggaaatcaagaactatgatatttttctgtttaaacagctttttttaatttgctatggtgtttataacaaaaaagaaaatttgaaaaaaaaaatcccaggggagtagcaggagccctttgctgtgtgctctgtccagtgtcatgagacgggagccctttgctgtgtgctctgtccagtgtcatgagacgggagccctttgctgtgtgctctgtccagtgtcatgagacgggagccctttgctgtgtgctctgtccagtgtcatgaggcaggtgtttgcaaagccagctctcggttccgatggggtattgctgacctacttttctaggggaaatgctcttaaacactgtaattatgcatttctaatgaaataaaatgtatttatgaccaca

SEQ ID NO: 195486 - DNA, 1398 bp, Artificial Sequence
  derived and/or modified sequence
atgatgagcgagcacgacctggccgacgtggtgcagatcgccgtggaggacctgagccccgaccaccccgtggtgctggagaaccacgtggtgaccgacgaggacgagcccgccctgaagagacagagactggagatcaactgccaggaccccagcatcaagagcttcctgtacagcatcaaccagaccatctgcctgagactggacagcatcgaggccaagctgcaggccctggaggccacctgcaagagcctggaggagaagctggacctggtgaccaacaagcagcacagccccatccaggtgcccatggtggccggcagccccctgggcgccacccagacctgcaacgccgtgcccggcagaagacagaacaccatcgtggtgaaggtgcccggccaggaggacagccaccacgaggacggcgagagcggcagcgaggccagcgacagcgtgagcagctgcggccaggccggcagccagagcatcggcagcaacgtgaccctgatcaccctgaacagcgaggaggactaccccaacggcacctggctgggcgacgagaacaaccccgagatgagagtgagatgcgccatcatccccagcgacatgctgcacatcagcaccaactgcagaaccgccgagaagatggccctgaccctgctggactacctgttccacagagaggtgcaggccgtgagcaacctgagcggccagggcaagcacggcaagaagcagctggaccccctgaccatctacggcatcagatgccacctgttctacaagttcggcatcaccgagagcgactggtacagaatcaagcagagcatcgacagcaagtgcagaaccgcctggagaagaaagcagagaggccagagcctggccgtgaagagcttcagcagaagaacccccaacagcagcagctactgccccagcgagcccatgatgagcacccccccccccgccagcgagctgccccagccccagccccagccccaggccctgcactacgccctggccaacgcccagcaggtgcagatccaccagatcggcgaggacggccaggtgcaggtgatcccccagggccacctgcacatcgcccaggtgccccagggcgagcaggtgcagatcacccaggacagcgagggcaacctgcagatccaccacgtgggccaggacggccaggtgctgcagggcgcccagctgatcgccgtggccagcagcgaccccgccgccgccggcgtggacggcagccccctgcagggcagcgacatccaggtgcagtacgtgcagctggcccccgtgagcgaccacaccgccggcgcccagaccgccgaggccctgcagcccaccctgcagcccgagatgcagctggagcacggcgccatccagatccagtag

SEQ ID NO: 195487 - DNA, 1410 bp, Artificial Sequence
  derived and/or modified sequence
atgatgagcgagcacgacctggccgacgtggtgcagatcgccgtggaggacctgagccccgaccaccccgtggtgctggagaaccacgtggtgaccgacgaggacgagcccgccctgaagagacagagactggagatcaactgccaggaccccagcatcaagagcttcctgtacagcatcaaccagaccatctgcctgagactggacagcatcgaggccaagctgcaggccctggaggccacctgcaagagcctggaggagaagctggacctggtgaccaacaagcagcacagccccatccaggtgcccatggtggccggcagccccctgggcgccacccagacctgcaacaaggtgagatgcgccgtgcccggcagaagacagaacaccatcgtggtgaaggtgcccggccaggaggacagccaccacgaggacggcgagagcggcagcgaggccagcgacagcgtgagcagctgcggccaggccggcagccagagcatcggcagcaacgtgaccctgatcaccctgaacagcgaggaggactaccccaacggcacctggctgggcgacgagaacaaccccgagatgagagtgagatgcgccatcatccccagcgacatgctgcacatcagcaccaactgcagaaccgccgagaagatggccctgaccctgctggactacctgttccacagagaggtgcaggccgtgagcaacctgagcggccagggcaagcacggcaagaagcagctggaccccctgaccatctacggcatcagatgccacctgttctacaagttcggcatcaccgagagcgactggtacagaatcaagcagagcatcgacagcaagtgcagaaccgcctggagaagaaagcagagaggccagagcctggccgtgaagagcttcagcagaagaacccccaacagcagcagctactgccccagcgagcccatgatgagcacccccccccccgccagcgagctgccccagccccagccccagccccaggccctgcactacgccctggccaacgcccagcaggtgcagatccaccagatcggcgaggacggccaggtgcaggtgatcccccagggccacctgcacatcgcccaggtgccccagggcgagcaggtgcagatcacccaggacagcgagggcaacctgcagatccaccacgtgggccaggacggccaggtgctgcagggcgcccagctgatcgccgtggccagcagcgaccccgccgccgccggcgtggacggcagccccctgcagggcagcgacatccaggtgcagtacgtgcagctggcccccgtgagcgaccacaccgccggcgcccagaccgccgaggccctgcagcccaccctgcagcccgagatgcagctggagcacggcgccatccagatccagtag

SEQ ID NO: 195488 - protein, 1024 aa, Artificial Sequence
  derived and/or modified sequence
MCARMAGRTTAAPRGPYGPWLCLLVALALDVVRVDCGQAPLDPVYLPAALELLDAPEHFRVQQVGHYPPANSSLSSRSETFLLLQPWPRAQPLLRASYPPFATQQVVPPRVTEPHQRPVPWDVRAVSVEAAVTPAEPYARVLFHLKGQDWPPGSGSLPCARLHATHPAGTAHQACRFQPSLGACVVELELPSHWFSQASTTRAELAYTLEPAAEGPGGCGSGEENDPGEQALPVGGVELRPADPPQYQEVPLDEAVTLRVPDMPVRPGQLFSATLLLRHNFTASLLTLRIKVKKGLHVTAARPAQPTLWTAKLDRFKGSRHHTTLITCHRAGLTEPDSSSPLELSEFLWVDFVVENSTGGGVAVTRPVTWQLEYPGQAPEAEKDKMVWEILVSERDIRALIPLAKAEELVNTAPLTGVPQHVPVRLVTVDGGGALVEVTEHVGCESANTQVLQVSEACDAVFVAGKESRGARGVRVDFWWRRLRASLRLTVWAPLLPLRIELTDTTLEQVRGWRVPGPAEGPAEPAAEASDEAERRARGCHLQYQRAGVRFLAPFAAHPLDGGRRLTHLLGPDWLLDVSHLVAPHARVLDSRVASLEGGRVVVGREPGVTSIEVRSPLSDSILGEQALAVTDDKVSVLELRVQPVMGISLTLSRGTAHPGEVTATCWAQSALPAPKQEVALSLWLSFSDHTVAPAELYDRRDLGLSVSAEEPGAILPAEEQGAQLGVVVSGAGAEGLPLHVALHPPEPCRRGRHRVPLASGTAWLGLPPASTPAPALPSSPAWSPPATEATMGGKRQVAGSVGGNTGVRGKFERAEEEARKEETEAREEEEEEEEEMVPAPQHVTELELGMYALLGVFCVAIFIFLVNGVVFVLRYQRKEPPDSATDPTSPQPHNWVWLGTDQEELSRQLDRQSPGPPKGEGSCPCESGGGGEAPTLAPGPPGGTTSSSSTLARKEAGGRRKRVEFVTFAPAPPAQSPEEPVGAPAVQSILVAGEEDIRWVCEDMGLKDPEELRNYMERIRGSS

SEQ ID NO: 195489 - DNA, 3075 bp, Artificial Sequence
  derived and/or modified sequence
atgtgcgccagaatggccggcagaaccaccgccgcccccagaggcccctacggcccctggctgtgcctgctggtggccctggccctggacgtggtgagagtggactgcggccaggcccccctggaccccgtgtacctgcccgccgccctggagctgctggacgcccccgagcacttcagagtgcagcaggtgggccactacccccccgccaacagcagcctgagcagcagaagcgagaccttcctgctgctgcagccctggcccagagcccagcccctgctgagagccagctacccccccttcgccacccagcaggtggtgccccccagagtgaccgagccccaccagagacccgtgccctgggacgtgagagccgtgagcgtggaggccgccgtgacccccgccgagccctacgccagagtgctgttccacctgaagggccaggactggccccccggcagcggcagcctgccctgcgccagactgcacgccacccaccccgccggcaccgcccaccaggcctgcagattccagcccagcctgggcgcctgcgtggtggagctggagctgcccagccactggttcagccaggccagcaccaccagagccgagctggcctacaccctggagcccgccgccgagggccccggcggctgcggcagcggcgaggagaacgaccccggcgagcaggccctgcccgtgggcggcgtggagctgagacccgccgaccccccccagtaccaggaggtgcccctggacgaggccgtgaccctgagagtgcccgacatgcccgtgagacccggccagctgttcagcgccaccctgctgctgagacacaacttcaccgccagcctgctgaccctgagaatcaaggtgaagaagggcctgcacgtgaccgccgccagacccgcccagcccaccctgtggaccgccaagctggacagattcaagggcagcagacaccacaccaccctgatcacctgccacagagccggcctgaccgagcccgacagcagcagccccctggagctgagcgagttcctgtgggtggacttcgtggtggagaacagcaccggcggcggcgtggccgtgaccagacccgtgacctggcagctggagtaccccggccaggcccccgaggccgagaaggacaagatggtgtgggagatcctggtgagcgagagagacatcagagccctgatccccctggccaaggccgaggagctggtgaacaccgcccccctgaccggcgtgccccagcacgtgcccgtgagactggtgaccgtggacggcggcggcgccctggtggaggtgaccgagcacgtgggctgcgagagcgccaacacccaggtgctgcaggtgagcgaggcctgcgacgccgtgttcgtggccggcaaggagagcagaggcgccagaggcgtgagagtggacttctggtggagaagactgagagccagcctgagactgaccgtgtgggcccccctgctgcccctgagaatcgagctgaccgacaccaccctggagcaggtgagaggctggagagtgcccggccccgccgagggccccgccgagcccgccgccgaggccagcgacgaggccgagagaagagccagaggctgccacctgcagtaccagagagccggcgtgagattcctggcccccttcgccgcccaccccctggacggcggcagaagactgacccacctgctgggccccgactggctgctggacgtgagccacctggtggccccccacgccagagtgctggacagcagagtggccagcctggagggcggcagagtggtggtgggcagagagcccggcgtgaccagcatcgaggtgagaagccccctgagcgacagcatcctgggcgagcaggccctggccgtgaccgacgacaaggtgagcgtgctggagctgagagtgcagcccgtgatgggcatcagcctgaccctgagcagaggcaccgcccaccccggcgaggtgaccgccacctgctgggcccagagcgccctgcccgcccccaagcaggaggtggccctgagcctgtggctgagcttcagcgaccacaccgtggcccccgccgagctgtacgacagaagagacctgggcctgagcgtgagcgccgaggagcccggcgccatcctgcccgccgaggagcagggcgcccagctgggcgtggtggtgagcggcgccggcgccgagggcctgcccctgcacgtggccctgcacccccccgagccctgcagaagaggcagacacagagtgcccctggccagcggcaccgcctggctgggcctgccccccgccagcacccccgcccccgccctgcccagcagccccgcctggagcccccccgccaccgaggccaccatgggcggcaagagacaggtggccggcagcgtgggcggcaacaccggcgtgagaggcaagttcgagagagccgaggaggaggccagaaaggaggagaccgaggccagagaggaggaggaggaggaggaggaggagatggtgcccgccccccagcacgtgaccgagctggagctgggcatgtacgccctgctgggcgtgttctgcgtggccatcttcatcttcctggtgaacggcgtggtgttcgtgctgagataccagagaaaggagccccccgacagcgccaccgaccccaccagcccccagccccacaactgggtgtggctgggcaccgaccaggaggagctgagcagacagctggacagacagagccccggcccccccaagggcgagggcagctgcccctgcgagagcggcggcggcggcgaggcccccaccctggcccccggcccccccggcggcaccaccagcagcagcagcaccctggccagaaaggaggccggcggcagaagaaagagagtggagttcgtgaccttcgcccccgccccccccgcccagagccccgaggagcccgtgggcgcccccgccgtgcagagcatcctggtggccggcgaggaggacatcagatgggtgtgcgaggacatgggcctgaaggaccccgaggagctgagaaactacatggagagaatcagaggcagcagctag

SEQ ID NO: 195490 - DNA, 3075 bp, Artificial Sequence
  derived and/or modified sequence
atgtgtgccaggatggcgggcaggacaacagccgcaccccggggaccttatggcccgtggctttgccttctggtcgccttggcacttgacgttgtcagggtagactgcggccaggcaccgttagatccggtgtatttgccggctgctctggaattattagatgcacctgagcattttcgcgtccaacaggttggccattacccacccgctaacagctccctttccagtcggtctgaaacttttctccttttgcaaccttggcctcgtgcgcagcctctacttcgagccagttacccaccttttgcgacccaacaagttgtgcctcccagggtcaccgaaccccaccaacgccccgtaccttgggacgttcgtgcagtgtccgttgaagctgccgtgacccctgccgagccctatgcccgggttctgttccacttgaagggacaagactggccccctggcagcgggtcactcccatgcgcgaggctccatgccacacacccagcaggaactgcacaccaggcctgccgcttccagccatcgctcggagcctgtgtcgtggagctggagcttccctctcattggttctctcaggctagcacgactcgggccgagctggcatacacgttggaacccgctgccgagggaccggggggctgcgggtccggcgaagagaacgacccgggcgagcaggcactgcctgtgggaggagttgagttacgccccgccgacccgccccagtaccaggaggtgccactggatgaggctgtgactctcagagtcccagatatgccagtacgccctggccagcttttctcagccaccctcttgttgaggcataatttcactgcctcacttctcactctgaggataaaagttaagaaaggtttgcacgttacggcagccaggccagcccagccaaccttgtggactgctaagcttgatcggttcaaggggtcccgccaccataccactctgatcacctgccaccgcgctggactgaccgagccagactcctctagcccgcttgaactgagcgagtttctgtgggtagattttgttgttgaaaatagcaccgggggtggagtggctgtgactcggcctgtgacctggcagctggaataccccggccaagccccagaggcggagaaggacaagatggtgtgggaaatcctcgtcagcgaacgagatatcagagcactcatacccctggctaaggcagaagaactggtcaataccgcccctcttacaggcgttccacagcacgtgcctgtgcgcttggtcaccgttgacggtggtggcgccctagtcgaggtgactgagcacgtgggctgtgagtccgcgaatacacaggttttgcaggtcagtgaagcatgcgatgcagtctttgtagcaggcaaggagagcaggggtgcccgaggggtccgagttgacttttggtggcgcagactcagggcaagcctgaggctgaccgtttgggcccctcttttaccactacgtatcgagctgaccgatacaacactagagcaagtcagaggttggagggtccctggccccgcagagggaccggcagaaccggccgctgaagcgtccgacgaagcggagcggcgcgctaggggttgtcacttgcaatatcagagagctggagtccgtttcctcgccccattcgccgctcacccactggatggcggtcgccggctcacacacctgctgggacccgattggttgctggatgtgtcccatcttgtcgcccctcacgccagagtcctcgacagtagagtcgcaagcttggagggaggccgggttgtcgtgggtagggagcccggcgttacctccatcgaggtgcgctctcccctgagtgactctattctaggtgagcaggccctggccgtgacggacgacaaggtcagtgtgttagaactccgggtacagccagtcatgggcattagcttaacactgagtcgcggaacagctcacccaggagaggtgacggccacttgctgggcacaaagcgctttacctgcacctaagcaggaggtggctctcagcctgtggctgtcctttagtgaccacacggtagccccggcggaactgtacgaccggcgagacttgggcctttcggtgtccgctgaagagcccggggctatcctccctgcggaggaacagggggcgcaattgggcgtggttgtctcaggtgcgggtgccgaagggctgcccctacacgtggctctccatcctcctgaaccttgccgcaggggtcggcacagagtgcctctcgccagcgggaccgcttggttgggtctgcccccggcaagcaccccagcccccgctctcccatcaagcccggcttggagtcctccagccactgaggccaccatgggcggcaaacgacaggttgcaggttcagtgggtgggaacacaggggtgcgtggcaagttcgagagggcagaggaagaagccagaaaagaagagactgaagccagggaagaggaggaagaggaagaggaggagatggttcctgcgcctcagcacgtcaccgaactggagcttggcatgtatgccctgttgggagtgttctgcgtcgcaatattcatctttttagtaaatggcgttgtatttgtcttgagataccagcgcaaggagcctcccgattccgcaacggaccctacctctccccagccacacaattgggtgtggttgggtaccgaccaagaagaactcagtcggcagcttgatcgacagagtccggggccccccaaaggggagggaagttgtccttgtgaatcggggggcgggggggaggcaccgactctagctccaggccctccaggcggaactacgagctcctcctccaccctagcccggaaggaggccggagggagacgtaagagagtggagtttgtcactttcgcgcctgcgccgcctgcccaatcaccagaagagccagttggagcccctgcggttcagtcgatcctggtggctggtgaagaggatatccgctgggtgtgtgaagacatggggttaaaggaccctgaggaactgcgcaattacatggagcgaatccgcgggtcgagttag

SEQ ID NO: 195491 - DNA, 3075 bp, Artificial Sequence
  derived and/or modified sequence
atgtgtgccaggatggccggccgcaccacagctgccccccggggcccctacggcccctggctgtgcctgctggtggccctggccctggatgtggtgcgggtggactgtggccaggcccccctggaccctgtgtacctgcctgctgccctggagctgctggatgcccctgagcacttccgggtgcagcaggtgggccactaccccccagccaacagcagcctgagcagccgctctgagaccttcctgctgctgcagccctggccccgggcccagcccctgctgcgggccagctaccccccatttgccacccagcaggtggtgcccccccgggtgacagagccccaccagaggcctgtgccctgggatgtgcgggctgtgtctgtggaggccgctgtgaccccagctgagccctatgcccgggtgctcttccacctgaagggccaggactggcccccaggcagcggcagcctgccctgtgcccggctgcacgccacccaccctgctggaacagcccaccaggcctgccgcttccagcccagcctgggcgcctgtgtggtggagctggagctgcccagccactggttcagccaggccagcaccaccagggctgagctggcctacaccctggagcctgctgctgagggccctgggggctgcggcagcggggaggagaatgaccctggagagcaggccctgcctgtgggcggcgtggagctgcggcctgctgaccccccccagtaccaggaggtgcccctggatgaagctgtgaccctgcgggtgcctgacatgcctgtgcggcccggccagctgttcagcgccaccctgctgctgcggcacaacttcaccgccagcctgctgaccctgcgcatcaaggtgaagaagggcctgcacgtgacagctgcccggcctgcccagcccaccctgtggacagccaagctggaccgcttcaagggcagccgccaccacaccaccctcatcacctgccacagagctggcctgacagagccagacagcagcagccccctggagctgtctgagttcctgtgggtggactttgtggtggagaacagcactggaggaggagtggccgtgaccaggcctgtgacctggcagctggagtacccaggccaggcccctgaggccgagaaggacaagatggtgtgggagatcctggtgtctgagcgggacatccgggccctgatccccctggccaaggccgaggagctggtgaacacagcccccctgactggagtgccccagcacgtgcctgtgcggctggtgacagtggatggcggcggggccctggtggaggtgacagaacatgtgggctgtgagagcgccaacacccaggtgctgcaggtgtctgaggcctgtgatgctgtgtttgtggccggcaaggagagcagaggagcccggggcgtgcgggtggacttctggtggaggcggctgcgggccagcctgcggctgactgtgtgggcccccctgctgcccctgcgcatcgagctgacagacaccaccctggagcaggtgcggggctggagggtgcccggccctgctgagggccctgctgagcctgctgctgaggccagtgatgaagctgagcggcgggcccggggctgccacctgcagtaccagagagctggggtgcgcttcctggccccctttgctgcccaccccctggatggcggccggcggctgacccacctgctgggccctgactggctgctggatgtgagccacctggtggcccctcatgcccgggtgctggacagccgggtggccagcctggagggcggccgggtggtggtgggccgggagcccggggtgaccagcattgaggtgcgcagccccctgagtgacagcatcctgggggagcaggccctggccgtgacagatgacaaggtgtctgtgctggagctgcgggtgcagcctgtgatgggcatcagcctgaccctgagccggggcacagcccaccctggagaggtgacagccacctgctgggcccagagcgccctgcctgcccccaagcaggaggtggccctgagcctgtggctgtccttcagtgaccacacagtggccccagctgagctgtatgaccggcgggacctgggcctgtctgtgtctgctgaggagcccggggccatcctgcctgctgaggagcagggcgcccagctgggcgtggtggtgtctggggccggggctgagggcctgcccctgcacgtggccctgcaccccccagagccctgccggcggggccgccaccgggtgcccctggccagcggcacagcctggctgggcctgcccccagccagcaccccagccccagccctgcccagcagccctgcctggagccccccagccacagaggccaccatgggcggcaagaggcaggtggccggctctgtgggcggcaacacaggagtgcggggcaagtttgaaagagctgaggaggaggccaggaaggaggagacagaggcccgggaggaggaggaggaggaggaggaggagatggtgcctgccccccagcacgtgacagagctggagctgggcatgtatgccctgctgggcgtcttctgtgtggccatcttcatcttcctggtgaatggagtggtgtttgtgctgcgctaccagaggaaggagcccccagacagcgccacagaccccaccagcccccagccccacaactgggtgtggctgggcacagaccaggaggagctgagccggcagctggaccggcagagccctggcccccccaagggggagggcagctgcccctgtgagagcggcggcggcggggaggcccccaccctggcccctggccccccaggcggcaccaccagcagcagcagcaccctggccaggaaggaggccggcggccgcaggaagagggtggagtttgtgacctttgccccagcccccccagcccagagccctgaggagcctgtgggcgccccagctgtgcagagcatcctggtggccggggaggaggacatccgctgggtgtgtgaggacatgggcctgaaggaccctgaggagctgaggaactacatggagcgcatccggggcagcagctag

SEQ ID NO: 195492 - DNA, 3075 bp, Artificial Sequence
  derived and/or modified sequence
atgtgcgcccggatggccggccggaccaccgccgccccccggggcccatatggcccttggctgtgcctccttgtggcactcgcccttgatgtggttcgtgtggattgcggtcaggcgccgcttgatccagtttatttgccggcggccttggagttgctggacgcccctgaacacttcagggtgcagcaggtgggacactatcccccagctaacagctctctgtccagcaggagcgagacctttctccttctacaaccctggcctagggcgcagcccctgctgcgagcgtcctaccccccctttgccacccagcaggtcgtgccacctcgagtcacagagcctcaccagcggccagtgccctgggacgtgcgagctgtgtccgttgaggcggctgtcaccccagccgaaccctacgccagggtgctcttccatctgaagggccaagactggcccccgggatccgggtccttgccttgcgcacggttacacgcaacacaccccgccggaacagctcaccaggcatgcaggtttcagccaagtctgggtgcttgcgtggtcgagttggaactgccaagccactggttcagccaagccagcactacaagggccgaactggcttacactctggaacctgccgctgaaggacctggaggttgcggatccggtgaagagaacgaccctggagagcaagcgcttcctgtcgggggagtggaactgagaccagctgatcctccgcagtaccaggaagttccacttgatgaggcagttaccttgcgtgtgcccgatatgcccgtccggccaggacagctcttcagcgccacattgctcctgagacacaattttaccgcttctctgctaacactgcgtattaaagttaagaaaggtcttcacgttaccgctgccaggcccgcccagccaaccctctggaccgccaagctggataggtttaaaggcagccgacatcacacaacattgatcacctgccacagagcaggtctgactgagccagactctagctcaccattagaactcagcgagtttctgtgggtggacttcgtggtggagaattccactggcggcggtgtggcagtcacacggccggtgacttggcaattagagtacccgggtcaggctcccgaagccgaaaaagataagatggtgtgggagatcctcgtgtccgagagagatattcgggcacttattcctctggctaaagctgaggaactggtgaatactgctcccctgacaggcgtgccccagcatgtgccagtcaggttagtcacagttgatggaggaggggccctggtcgaggtgactgagcatgttggatgtgagagcgcaaatacccaggtactccaagtttcagaggcttgcgatgccgtgttcgtggccggaaaagagtcaaggggcgctagaggggttcgagtggatttttggtggcgcaggctgcgtgcttcccttcgtctgaccgtgtgggcccctctactccccctccgcattgagttgactgacactactcttgagcaggtcagggggtggcgggtgccaggccctgcagagggcccagccgaacccgccgccgaagcctcggatgaggctgaacgtcgggccaggggttgtcacctgcaataccagagggccggtgtgaggttcctggcaccattcgctgctcatcctctggacggaggtcggcggcttacccatctactgggaccagattggttgttggacgtaagccacctcgtagcccctcatgccagggtgttggattcacgggtagcctcactggagggcggacgggtcgttgttggccgcgaacctggtgtgactagcattgaagtccggagccctctcagtgattccattctgggggagcaggccctagccgtgaccgacgataaagtatccgtccttgaacttagggtgcagccagtgatgggaatttcccttactttaagcagaggaactgctcacccaggagaggttacagccacctgttgggcccagtctgcgttacctgcacctaaacaggaggtcgctctgtctctctggctgtccttttctgaccacactgtggcccccgctgaactttatgatagaagggacttgggcctgagtgtgtcagctgaagaaccaggagccatactgcccgcagaggagcagggggcccagctcggcgttgttgtttctggggcaggggccgagggactacctttacacgttgctttacatccaccggagccgtgtcgccgcggcaggcatcgggtgcctctggcttcaggaaccgcgtggctgggcttacctcccgcatccactcccgcccccgctctgccatcctctccagcctggtccccacccgctacagaggccactatgggcggaaagcggcaggtcgcgggaagcgttggggggaacacgggagtgagaggcaaattcgaacgggccgaggaagaggctcgcaaggaggaaacggaagctagggaagaagaagaggaggaagaggaggagatggttccggctccacagcacgtcacggagctggaactcggaatgtacgcactgctcggagtattttgtgtggctatctttatcttcctagtgaacggggtggtgttcgtgctgaggtaccagcgtaaagagccccctgatagcgccaccgatccaacatcaccacagcctcacaattgggtgtggctggggacggatcaagaggagctgtcacgccagttggaccgtcagagtcccgggccaccgaagggcgagggcagttgtccatgtgagtcagggggggggggagaagcccccactttggctcctggacctccgggcggaacaacatccagctccagcacccttgccagaaaagaagccggcggaagacgcaagagggtcgagttcgtaaccttcgctccagcccccccggctcaatctccggaggaacctgtaggtgctccagccgtgcagtcaatactggtggcgggcgaggaggatattcgatgggtgtgtgaagatatgggtctgaaagaccccgaagaactgcgcaattatatggagcgcatcagaggcagtagctag

SEQ ID NO: 195493 - DNA, 3075 bp, Artificial Sequence
  derived and/or modified sequence
atgtgtgctcgcatggcaggtagaacaactgctgcccctcgtggaccctatggcccttggttgtgcctgctggtcgccctcgcactggacgtggtgcgggtggattgcgggcaggcccctctcgaccctgtgtatttacctgcagcactcgagctgctggacgccccagaacatttcagggttcagcaggtgggccattatccccctgctaactctagcctcagttctaggagtgaaaccttcctgctgctccagccgtggccacgagcacagcccctgctcagagccagttatcctcctttcgcaacccaacaagtggtacctcctcgcgtgactgaaccgcaccaaaggcctgtcccctgggatgtacgggctgtgtctgttgaggcagctgtgaccccggctgaaccatacgctcgggtgctgtttcacctcaaaggacaggattggcctcccggtagcggttcattgccgtgtgcacgactccatgcaacacaccctgctggcactgcccatcaggcatgtaggtttcagccatcactcggcgcttgcgtggtggagttggagcttccctctcattggttctctcaagcttcaaccacgagggcggagctcgcttacactctggaacccgcagctgaggggcctggaggatgcggctcaggagaagagaatgaccccggtgaacaagccctcccagttgggggagtggaattgaggcctgccgatcctccgcagtatcaggaagtccccctcgatgaagcggtgaccctccgcgtcccagacatgccagtgaggcctggccagctttttagcgccaccctcctgctccgtcacaactttaccgcttctcttttgaccttgcgtattaaggtgaaaaagggactgcacgtgactgcagccaggcccgctcagccaaccttgtggaccgcgaagctcgacaggtttaaaggttctcgacaccacactaccctcataacttgccatagggccggactaacagaaccagactcctcaagtcctctggagttgagtgaattcctctgggtggatttcgtggtggagaatagtacagggggaggtgtcgccgtgacacgccctgtgacgtggcaattagaatatcctgggcaggctcccgaagctgaaaaggacaaaatggtctgggaaattctcgtgagtgagagagatatccgggcactgatccctcttgccaaagctgaggagcttgtaaataccgcgcctctgacaggggtaccccagcacgtccccgttagactggtcaccgtggatggtggtggggcactggtcgaagtgaccgagcacgtaggctgcgagagcgctaacacacaagtgctgcaggtgagcgaagcgtgtgacgctgtttttgtcgcgggtaaggagtctcgaggcgctcgcggagtgagggttgatttctggtggcgtaggctccgggcaagcctgcgcctgactgtgtgggcgcctctgcttccattgagaattgagctcaccgacacaactcttgaacaagtgagaggttggagggtgccgggtccagccgagggaccagccgagcccgcagctgaggccagtgacgaagctgagaggcgtgcccgaggctgtcatctccagtaccaaagggcaggcgttcggttcctggccccttttgccgcacatcccctcgacgggggaaggcgactgacccacctgctcggcccagactggctccttgatgtatcccacctagtcgctccccatgcccgagtgcttgactcccgcgtggctagcttggagggaggcagagtcgtggtcggacgtgagcctggagtcacctctatcgaggtgcgcagcccactgagcgatagcattctcggcgagcaagcgctggccgtcaccgacgataaagtatcagttctggagctgagggtgcagccagtgatgggtatcagtctgacactctctcgcggtaccgcccatccgggagaagtaactgctacttgctgggctcagtcagcactgcctgctcctaagcaagaggtggccttgtctctctggctgtccttcagcgatcacaccgtagccccagctgagctctacgatcgccgagacctgggactgtcggttagcgccgaagagcccggtgcaattttaccagccgaggagcaaggcgcacagctaggagttgtggttagtggggctggggctgaaggccttccgctacatgtcgctttacatcctccggagccatgcagacgaggccgtcatcgggtcccactggcatccggaactgcctggctgggcctgcctcctgcttcaacaccagccccagcattaccgagtagtccagcctggtctccgcctgctaccgaggcaaccatgggtgggaagaggcaagtggctggaagcgtcggtggcaacacgggcgtccggggaaaatttgaacgggcagaggaggaggccagaaaggaggagacggaggctcgggaagaggaagaggaggaggaagaagagatggtacccgcacctcaacatgtcaccgagcttgagctcgggatgtatgcgcttcttggagtcttttgtgtcgctatttttatatttctagtgaacggcgtggttttcgttctgaggtaccagcggaaggagccacccgactccgccactgatccaacctccccacagccccacaattgggtctggctgggcactgatcaggaagagttgagcaggcaacttgaccgccaaagcccaggcccacccaaaggcgagggcagctgtccttgcgaatctggcggaggcggagaggctcccaccctggcacccggtccgccaggaggcactacttcttccagcagtacgttggctcgaaaggaggctgggggacgaagaaagcgagtggagttcgtgaccttcgctcctgcccctccagcccaatcacctgaagagccagtgggggcaccagctgtccagagtatcctcgtggccggtgaggaggatattcgttgggtctgtgaggatatgggattgaaagaccctgaagagttgcgcaactacatggagaggatccgaggctccagttag

SEQ ID NO: 195494 - DNA, 3075 bp, Artificial Sequence
  derived and/or modified sequence
atgtgtgcaagaatggctgggaggactacggcagccccccgaggtccctacgggccttggttgtgcctactggtggcgttggcattagacgttgtaagagtggactgcggacaggctcccctggatcccgtttacctgcctgccgcattggagttactggacgcccccgaacacttcagggtgcagcaggtgggccattatccccccgctaacagctccctttcttctcgcagtgaaacattcctgcttttgcagccgtggccacgggctcagccccttctgagagcctcttatcctccttttgccacccagcaagtcgtgcccccccgagtgactgagcctcaccagcgccccgtaccttgggacgtgcgcgccgtcagcgtggaggccgcagtaacccctgctgaaccttacgcgagggttctatttcatcttaaggggcaagactggccccctggatcaggaagcttaccctgcgcgaggttacacgctacccaccctgctggaacagcgcaccaggcctgccgcttccaaccttccctcggcgcctgcgtagttgaactcgaattaccatctcattggttctcacaggcttctaccacacgcgctgagctggcctatactctagagcccgccgcagaagggcccgggggatgtggaagcggagaagagaatgatcctggtgagcaagccttgcccgtggggggggtggagttgaggccagccgacccaccccagtaccaggaagtcccattagacgaggccgtaacgctgagagtgcctgatatgcctgttcgacctggccagctgttcagcgctactctgctcctgaggcacaacttcacagcttccctgttgaccctgcgcattaaagtcaagaagggactgcacgtgactgccgctcggccagcccagcccaccctatggaccgctaagctggaccgatttaagggctcaaggcaccatactacccttataacatgccacagggccggcctgaccgaacccgatagcagctcaccattagagctttccgaattcctgtgggttgatttcgtggtggaaaatagtactggaggcggggtagcagtaactcgtccagttacctggcagctcgagtatcccggacaggctcccgaggccgaaaaagacaagatggtctgggaaattcttgtgagcgagagggatattagagccctgatcccactagctaaggcagaggaactcgttaataccgctccactgaccggggtaccacaacatgtgccagtgcgactcgtgacagtggacggtgggggtgcgctagtcgaagtgactgaacacgtaggttgtgagagtgcaaacacgcaagtgctccaagtgagtgaggcttgtgacgcagtctttgtggcaggaaaggaatcccgaggagcgcgcggcgtaagagtcgacttttggtggagacgcctgcgggcttctctcaggttgaccgtctgggcccccttactccccctaaggatcgaattgactgacactaccttggagcaggtgcgtggctggagggtaccgggccctgcagaaggccctgctgaacccgccgctgaggcctctgatgaagccgaacgccgcgcacgtggatgtcatttgcagtaccagcgcgcaggcgtgcgatttctagcccccttcgcggcccacccacttgacggtggcaggagactgactcatcttctcgggcccgattggcttttggacgtgagccatttggttgcacctcatgcgagggtcctcgatagccgggttgcctcattagaaggcggtagagtcgttgtgggaagagaaccaggggtgacctccatcgaggtccggagccccctgtctgacagtatcttaggtgaacaggcattggcggttactgatgataaagtgtctgtcctagaactgcgggtgcagccagtcatgggcatttcgctcaccctttcacgtggaactgcccaccctggagaggtaacagcaacctgctgggcgcagtccgctctgccagcccctaaacaggaagtcgccctgtccctctggctcagcttcagtgaccacactgttgcgcccgccgaactgtatgatagacgggacctgggcctctccgttagtgccgaagaacctggcgccatccttcccgcagaagaacagggggctcagctgggcgtggtagtgtctggtgcgggagccgaaggattaccgctgcatgtggctcttcatccgcctgaaccatgtagacgtgggcgccatcgggtgcccctcgcttcaggtacagcctggctcgggctacctccagcaagcacaccggcaccagccctgccctcttccccggcttggagcccgcccgcgacagaagcgacaatgggcggcaagagacaagtggccgggtctgtggggggtaacactggggttaggggaaagtttgaacgtgctgaagaggaagcacgaaaggaagaaaccgaagcccgcgaggaagaggaggaggaggaagaagagatggtacccgcaccccagcatgtcactgaattagagctgggtatgtatgcactgttgggggttttctgcgttgctatctttattttcctagttaacggagtggtgttcgttctcagatatcagcggaaagaaccccctgactccgccacggaccccaccagccctcagcctcataactgggtatggttaggtacggatcaagaagagctaagcagacaattagaccgacaatcacctgggcctccaaaaggagagggcagttgtccatgtgaatcaggcggcgggggcgaggcccctacactggcgcctggacccccaggcgggactacctcctcgtcttctaccctagctcgcaaagaagcaggcgggaggcgaaagagagtcgagtttgtcaccttcgcaccagcacctcccgcacagtcgccggaggagcccgttggcgctcctgccgtgcagtcaatccttgtggccggggaggaagacatacgctgggtttgtgaagatatgggactgaaggaccccgaagagttaaggaattacatggaaagaatccgaggatcgtcctag

SEQ ID NO: 195495 - DNA, 3075 bp, Artificial Sequence
  derived and/or modified sequence
atgtgtgccagaatggccggacgaaccactgctgctccaagagggccatatggtccctggttgtgtcttcttgtggcattagctcttgacgttgtacgggtcgattgcggccaagcccccctggaccccgtatacctgcctgccgcccttgagctgctggatgcccctgagcattttagagtgcaacaagtgggccattaccctccggccaattcttccctgtcttctagatctgagacttttctgttgctacaaccatggccaagagcccagcccctgctcagggcctcttacccacctttcgccacccagcaggtggtgcctccccgtgttaccgaaccgcatcagagacctgtaccctgggacgtccgggcagtatcagttgaagctgcagttacacctgccgaaccatacgccagagttttattccacctgaagggtcaagattggccacctgggtctgggagtcttccttgcgccagacttcatgcgacacacccggctggaaccgcacaccaggcctgtcgttttcagccatcactgggcgcctgcgtggtggagctcgagcttccctctcattggttctcccaggcatccaccacaagggctgaactcgcctacactctcgagccagccgctgagggaccgggagggtgcggtagcggcgaagagaacgacccaggggagcaggccttacctgtcggaggggttgaactacgacccgcagacccccctcagtatcaggaggtcccacttgatgaagccgtgaccctccgcgtccccgacatgcccgtccgcccaggtcaattgttctctgccactttgttgttaagacataatttcactgcttctttactcacattgagaattaaagtgaagaaaggactgcacgtgactgccgctaggccagcacaacccaccctgtggaccgctaaacttgatcgctttaaaggttcacgccaccacactacactgattacatgccatcgggcagggcttacagaacctgatagctcttctcctctggaactatctgaattcttatgggtggacttcgtagtggaaaatagtaccgggggcggggtggctgttactaggccagtaacgtggcaactggaatatccgggacaggcccctgaggctgagaaagacaagatggtttgggaaatcttggtttctgaacgcgatatcagagccctgatcccgttggcgaaggctgaagaattggtgaacacagcaccactgaccggcgtcccccaacatgtgcctgtaagactagttacagtagacgggggtggggcactcgtcgaggtgactgagcatgtaggctgcgagagcgccaatacccaagtgcttcaagtgtcggaggcatgcgatgctgtttttgtggccggcaaggaaagccgcggcgcacgcggagtccgtgttgatttttggtggagacgtctgcgcgcaagccttaggctgacagtttgggcccccttattaccccttaggatcgaattgactgacacaacactcgagcaggttcgaggctggcgtgtgccggggcccgctgagggccctgcagaacccgcagcagaggccagtgatgaggcagaacgcagagcgcgcggctgtcaccttcagtatcagagagccggagtgaggtttctagcaccgttcgccgcccaccctctggacgggggtagacgtctgacccaccttctcggaccagactggcttctggacgttagccacctagtcgcaccgcatgccagagttcttgactcccgggttgcttcgttggaaggaggtagagtggtggtcggtagagaacctggcgtgacgtccatcgaagttcggagccccttgtctgatagcattttgggagaacaggctctcgccgttactgatgataaagttagcgttcttgagctgcgcgtgcagcctgtcatgggtatttccctcaccctgtctcgtggcactgcccacccaggggaagtgacagcaacttgctgggcccagtctgccctcccggcgcccaagcaagaagtcgcactgagtctgtggctttctttctcagaccacaccgtcgcccctgcagaactgtacgaccggcgagatctaggtctgtcagtgtcagccgaagaacccggcgcaatcctgcctgccgaagaacagggcgcgcagctgggggtcgtggtcagtggagccggggcagaggggcttccattacacgtcgccttacatccacctgagccttgtcgacgcgggcggcacagggtgcctctagcatcaggaacagcatggttaggcctgcccccagccagcactcccgcccccgcattgccaagttcaccggcctggtctccccccgccaccgaagcaactatgggcgggaaaagacaagtggcagggtcggttggaggaaacacaggagtgagaggaaaattcgagcgagcggaagaggaggcccgaaaagaagagaccgaggcacgggaagaagaagaggaagaggaagaagagatggtccccgctccacagcacgttaccgaactcgagctgggcatgtacgcactgctaggagtgttttgcgttgccatattcatatttctggttaatggggtggtgtttgtgctgcgttaccaaagaaaagagccacccgattctgctactgaccccacatcccctcaaccccacaactgggtgtggctgggcacggatcaagaagaacttagccggcagctggatcgacagtcaccaggcccgcctaagggtgaaggcagttgtccttgtgagtctggaggaggcggagaggccccaaccctggcccctggcccacctgggggtacaactagtagttcctcaactctcgcacgcaaagaggccggtgggaggaggaaaagagtagagtttgttacttttgcccctgcaccccctgctcagagtccagaagagcctgtgggagctcccgctgtgcaaagtatcctggtggcaggagaggaggatattaggtgggtgtgcgaggacatggggctcaaagatccagaagaattgcggaactacatggaaagaatacgaggaagtagctag

SEQ ID NO: 195496 - DNA, 3480 bp, Artificial Sequence
  derived and/or modified sequence
gggaattgcagccgcggggcgggcggcggcggcggcggcggcggccgggacccagcgggccaggtggggacggcgcggagcgggtgcgggagatgccgtgcgggactggggccacctgagccgcccgcctcgtccccgccttctgtgggaaggatgtgcgcgcggatggccggtcgcacaacagcggcccctcgggggccctacggcccctggctctgcctcctggtggccctcgccctggacgtcgtgagagtggactgtggccaggctcccctggaccctgtctacctgccggcagccctggagctcctagacgcccctgaacacttccgtgtgcagcaggtgggccactacccacctgccaactcctctctgagctcccgatctgagacctttctgctcctacagccctggcccagggcccagccacttctccgggcctcctacccaccttttgccactcagcaggtggtcccccctcgagtcactgagccccaccaacggccagtcccatgggacgtgcgggccgtttcagtggaagcggctgtgactccagcagagccctacgcccgggttctcttccacctcaaagggcaggattggccaccagggtctggcagcctgccctgtgcccggctccatgccacacaccctgccggcactgctcaccaagcctgccgcttccagccatccctgggcgcctgcgtggtggagctggagcttccctcgcactggttctcacaggcctccaccacacgggccgagctggcctacacgcttgagcctgcagctgagggccctgggggctgtggctccggcgaggagaacgaccctggggagcaggccctcccagtggggggtgtggagctgcgcccagcagaccccccgcagtaccaggaggtacctctggacgaggctgtgactctgcgggtgcctgacatgccagtgcggcccggccagctctttagtgctaccctcctgcttcggcacaacttcacagccagcctcctgaccctgcggatcaaggtgaagaaggggctgcatgtgacagccgcccgcccagcccagcccacactctggactgccaagctggaccgcttcaagggctccaggcaccacaccaccctcatcacctgccaccgtgctgggctcacagagccagattccagcagtccccttgaactgtctgagttcctatgggtggactttgtggtggagaatagcactggtgggggcgtagcggtcactcgccccgtcacgtggcagctggagtacccaggccaggcccctgaagcagagaaggacaaaatggtgtgggaaatcctggtgtctgagcgggacatcagagcccttatcccactggccaaggctgaggagctggtgaatacagcaccactgactggagtgccccagcatgtccccgtgcgccttgtcactgtggacggcgggggggccttggtggaggtgacagagcatgtcggctgcgagtctgccaacacacaggtcctgcaggtgtctgaggcctgtgatgccgtgttcgtggctggcaaggagagccggggcgcccggggggtgcgagtggacttctggtggcgccggctccgcgcctcgctgcggctgaccgtgtgggcccccctgctaccgctgcgtatcgagctcaccgacaccaccctcgagcaggtccgcggctggagggtacctggccctgctgaagggcctgcggaacccgctgcagaggcgtcggatgaggccgagcggcgcgcccgtggctgccacctgcagtaccagcgggccggtgtgcgcttcctcgcccccttcgcggcccacccgctggacggcggccgccgcctcacgcacctgcttggccccgactggctgctagacgtgtcccacctcgtggcgccacacgcccgcgtgctggactcgcgtgtagcctctctggagggtggccgtgtcgtggtgggccgggagcccggtgtcacctccattgaggtgcgttccccactgtctgactccatcctgggggagcaggcgctggctgtgacggacgacaaggtctcagtgctggagctgagggtgcagccagtgatgggcatctcgctgaccttgagccggggcactgcccaccccggggaggtcacagctacgtgctgggcacagtcagcccttcccgccccaaagcaggaggtggccctctccctatggctgtccttctctgatcacactgtggccccagctgagctctacgaccgccgtgacctgggactgtccgtctcagccgaggagcctggtgccatcctgccagctgaggagcagggtgcccagctcggggtggtggtgagtggggcaggcgccgaggggctgccgctgcatgtggctctgcacccgcccgagccctgccgccggggccgccaccgtgtgcctctggcctctggcaccgcctggctggggctgccccctgcctccactccagcccctgctctcccatccagccctgcttggagcccaccagccacagaagccaccatgggtggtaaacggcaggtggcaggcagtgtcgggggcaacacaggtgtgaggggcaagtttgagcgggcagaggaggaggccaggaaggaggagaccgaagccagggaggaggaggaggaagaggaggaggagatggtccctgcccctcagcatgtcactgagctagagctgggcatgtacgccctgctgggagtcttctgcgtggccatcttcatcttcttggtcaatggtgtggtcttcgtcctgcgctatcagcgcaaagaacctcccgacagtgccactgaccccacctccccccagccccacaactgggtctggctgggcactgaccaggaggaactgagccgccagctggaccggcagtcccctggcccgcccaagggggaggggagctgcccctgtgagagtgggggaggaggggaggcccctaccctggcccctggccctcctgggggcaccaccagctcctcaagcaccctggcccgaaaggaggctggggggcggcggaagcgagtagagtttgtgacatttgcgccagcccctccagcccagtcacctgaggagcctgtaggggcccctgctgtgcagtccatccttgtggcaggcgaggaggacatccgctgggtgtgtgaggacatggggctgaaggaccctgaggagcttcgcaactacatggagaggatccggggcagctcctgaccctccacagccacctggtcagccaccagctggggcaacgagggtggaggtcccactgagcctctcgcctgcccccgccactcgtctggtgcttgttgatccaagtcccctgcctggtcccccacaaggactcccatccaggccccctctgccctgccccttgtcatggaccatggtcgtgaggaagggctcatgccccttatttatgggaaccatttcattctaacagaataaaccgagaaggaaaccaga

SEQ ID NO: 195497 - RNA, 3075 nt, Artificial Sequence
  derived and/or modified sequence
augugugcaagaauggcugggaggacuacggcagccccccgaggucccuacgggccuugguugugccuacugguggcguuggcauuagacguuguaagaguggacugcggacaggcuccccuggaucccguuuaccugccugccgcauuggaguuacuggacgcccccgaacacuucagggugcagcaggugggccauuauccccccgcuaacagcucccuuucuucucgcagugaaacauuccugcuuuugcagccguggccacgggcucagccccuucugagagccucuuauccuccuuuugccacccagcaagucgugcccccccgagugacugagccucaccagcgccccguaccuugggacgugcgcgccgucagcguggaggccgcaguaaccccugcugaaccuuacgcgaggguucuauuucaucuuaaggggcaagacuggcccccuggaucaggaagcuuacccugcgcgagguuacacgcuacccacccugcuggaacagcgcaccaggccugccgcuuccaaccuucccucggcgccugcguaguugaacucgaauuaccaucucauugguucucacaggcuucuaccacacgcgcugagcuggccuauacucuagagcccgccgcagaagggcccgggggauguggaagcggagaagagaaugauccuggugagcaagccuugcccgugggggggguggaguugaggccagccgacccaccccaguaccaggaagucccauuagacgaggccguaacgcugagagugccugauaugccuguucgaccuggccagcuguucagcgcuacucugcuccugaggcacaacuucacagcuucccuguugacccugcgcauuaaagucaagaagggacugcacgugacugccgcucggccagcccagcccacccuauggaccgcuaagcuggaccgauuuaagggcucaaggcaccauacuacccuuauaacaugccacagggccggccugaccgaacccgauagcagcucaccauuagagcuuuccgaauuccuguggguugauuucgugguggaaaauaguacuggaggcgggguagcaguaacucguccaguuaccuggcagcucgaguaucccggacaggcucccgaggccgaaaaagacaagauggucugggaaauucuugugagcgagagggauauuagagcccugaucccacuagcuaaggcagaggaacucguuaauaccgcuccacugaccgggguaccacaacaugugccagugcgacucgugacaguggacggugggggugcgcuagucgaagugacugaacacguagguugugagagugcaaacacgcaagugcuccaagugagugaggcuugugacgcagucuuuguggcaggaaaggaaucccgaggagcgcgcggcguaagagucgacuuuugguggagacgccugcgggcuucucucagguugaccgucugggcccccuuacucccccuaaggaucgaauugacugacacuaccuuggagcaggugcguggcuggaggguaccgggcccugcagaaggcccugcugaacccgccgcugaggccucugaugaagccgaacgccgcgcacguggaugucauuugcaguaccagcgcgcaggcgugcgauuucuagcccccuucgcggcccacccacuugacgguggcaggagacugacucaucuucucgggcccgauuggcuuuuggacgugagccauuugguugcaccucaugcgaggguccucgauagccggguugccucauuagaaggcgguagagucguugugggaagagaaccaggggugaccuccaucgagguccggagcccccugucugacaguaucuuaggugaacaggcauuggcgguuacugaugauaaagugucuguccuagaacugcgggugcagccagucaugggcauuucgcucacccuuucacguggaacugcccacccuggagagguaacagcaaccugcugggcgcaguccgcucugccagccccuaaacaggaagucgcccugucccucuggcucagcuucagugaccacacuguugcgcccgccgaacuguaugauagacgggaccugggccucuccguuagugccgaagaaccuggcgccauccuucccgcagaagaacagggggcucagcugggcgugguagugucuggugcgggagccgaaggauuaccgcugcauguggcucuucauccgccugaaccauguagacgugggcgccaucgggugccccucgcuucagguacagccuggcucgggcuaccuccagcaagcacaccggcaccagcccugcccucuuccccggcuuggagcccgcccgcgacagaagcgacaaugggcggcaagagacaaguggccgggucugugggggguaacacugggguuaggggaaaguuugaacgugcugaagaggaagcacgaaaggaagaaaccgaagcccgcgaggaagaggaggaggaggaagaagagaugguacccgcaccccagcaugucacugaauuagagcuggguauguaugcacuguuggggguuuucugcguugcuaucuuuauuuuccuaguuaacggagugguguucguucucagauaucagcggaaagaacccccugacuccgccacggaccccaccagcccucagccucauaacuggguaugguuagguacggaucaagaagagcuaagcagacaauuagaccgacaaucaccugggccuccaaaaggagagggcaguuguccaugugaaucaggcggcgggggcgaggccccuacacuggcgccuggacccccaggcgggacuaccuccucgucuucuacccuagcucgcaaagaagcaggcgggaggcgaaagagagucgaguuugucaccuucgcaccagcaccucccgcacagucgccggaggagcccguuggcgcuccugccgugcagucaauccuuguggccggggaggaagacauacgcuggguuugugaagauaugggacugaaggaccccgaagaguuaaggaauuacauggaaagaauccgaggaucguccuag

SEQ ID NO: 195498 - RNA, 3075 nt, Artificial Sequence
  derived and/or modified sequence
augugugccagaauggccggacgaaccacugcugcuccaagagggccauauggucccugguugugucuucuuguggcauuagcucuugacguuguacgggucgauugcggccaagccccccuggaccccguauaccugccugccgcccuugagcugcuggaugccccugagcauuuuagagugcaacaagugggccauuacccuccggccaauucuucccugucuucuagaucugagacuuuucuguugcuacaaccauggccaagagcccagccccugcucagggccucuuacccaccuuucgccacccagcagguggugccuccccguguuaccgaaccgcaucagagaccuguacccugggacguccgggcaguaucaguugaagcugcaguuacaccugccgaaccauacgccagaguuuuauuccaccugaagggucaagauuggccaccugggucugggagucuuccuugcgccagacuucaugcgacacacccggcuggaaccgcacaccaggccugucguuuucagccaucacugggcgccugcgugguggagcucgagcuucccucucauugguucucccaggcauccaccacaagggcugaacucgccuacacucucgagccagccgcugagggaccgggagggugcgguagcggcgaagagaacgacccaggggagcaggccuuaccugucggagggguugaacuacgacccgcagaccccccucaguaucaggaggucccacuugaugaagccgugacccuccgcguccccgacaugcccguccgcccaggucaauuguucucugccacuuuguuguuaagacauaauuucacugcuucuuuacucacauugagaauuaaagugaagaaaggacugcacgugacugccgcuaggccagcacaacccacccuguggaccgcuaaacuugaucgcuuuaaagguucacgccaccacacuacacugauuacaugccaucgggcagggcuuacagaaccugauagcucuucuccucuggaacuaucugaauucuuauggguggacuucguaguggaaaauaguaccgggggcgggguggcuguuacuaggccaguaacguggcaacuggaauauccgggacaggccccugaggcugagaaagacaagaugguuugggaaaucuugguuucugaacgcgauaucagagcccugaucccguuggcgaaggcugaagaauuggugaacacagcaccacugaccggcgucccccaacaugugccuguaagacuaguuacaguagacggggguggggcacucgucgaggugacugagcauguaggcugcgagagcgccaauacccaagugcuucaagugucggaggcaugcgaugcuguuuuuguggccggcaaggaaagccgcggcgcacgcggaguccguguugauuuuugguggagacgucugcgcgcaagccuuaggcugacaguuugggcccccuuauuaccccuuaggaucgaauugacugacacaacacucgagcagguucgaggcuggcgugugccggggcccgcugagggcccugcagaacccgcagcagaggccagugaugaggcagaacgcagagcgcgcggcugucaccuucaguaucagagagccggagugagguuucuagcaccguucgccgcccacccucuggacggggguagacgucugacccaccuucucggaccagacuggcuucuggacguuagccaccuagucgcaccgcaugccagaguucuugacucccggguugcuucguuggaaggagguagagugguggucgguagagaaccuggcgugacguccaucgaaguucggagccccuugucugauagcauuuugggagaacaggcucucgccguuacugaugauaaaguuagcguucuugagcugcgcgugcagccugucauggguauuucccucacccugucucguggcacugcccacccaggggaagugacagcaacuugcugggcccagucugcccucccggcgcccaagcaagaagucgcacugagucuguggcuuucuuucucagaccacaccgucgccccugcagaacuguacgaccggcgagaucuaggucugucagugucagccgaagaacccggcgcaauccugccugccgaagaacagggcgcgcagcugggggucguggucaguggagccggggcagaggggcuuccauuacacgucgccuuacauccaccugagccuugucgacgcgggcggcacagggugccucuagcaucaggaacagcaugguuaggccugcccccagccagcacucccgcccccgcauugccaaguucaccggccuggucuccccccgccaccgaagcaacuaugggcgggaaaagacaaguggcagggucgguuggaggaaacacaggagugagaggaaaauucgagcgagcggaagaggaggcccgaaaagaagagaccgaggcacgggaagaagaagaggaagaggaagaagagaugguccccgcuccacagcacguuaccgaacucgagcugggcauguacgcacugcuaggaguguuuugcguugccauauucauauuucugguuaauggggugguguuugugcugcguuaccaaagaaaagagccacccgauucugcuacugaccccacauccccucaaccccacaacuggguguggcugggcacggaucaagaagaacuuagccggcagcuggaucgacagucaccaggcccgccuaagggugaaggcaguuguccuugugagucuggaggaggcggagaggccccaacccuggccccuggcccaccuggggguacaacuaguaguuccucaacucucgcacgcaaagaggccggugggaggaggaaaagaguagaguuuguuacuuuugccccugcacccccugcucagaguccagaagagccugugggagcucccgcugugcaaaguauccugguggcaggagaggaggauauuaggugggugugcgaggacauggggcucaaagauccagaagaauugcggaacuacauggaaagaauacgaggaaguagcuag

SEQ ID NO: 195499 - protein, 298 aa, Artificial Sequence
  derived and/or modified sequence
MWGACKVKVHDSLATISITLRRYLRLGATMAKSKFEYVRDFEADDTCLAHCWVVVRLDGRNFHRFAEKHNFAKPNDSRALQLMTKCAQTVMEELEDIVIAYGQSDEYSFVFKRKTNWFKRRASKFMTHVASQFASSYVFYWRDYFEDQPLLYPPGFDGRVVVYPSNQTLKDYLSWRQADCHINNLYNTVFWALIQQSGLTPVQAQGRLQGTLAADKNEILFSEFNINYNNELPMYRKGTVLIWQKVDEVMTKEIKLPTEMEGKKMAVTRTRTKPVPLHCDIIGDAFWKEHPEILDEDS

SEQ ID NO: 195500 - protein, 173 aa, Artificial Sequence
  derived and/or modified sequence
MTHVASQFASSYVFYWRDYFEDQPLLYPPGFDGRVVVYPSNQTLKDYLSWRQADCHINNLYNTVFWALIQQSGLTPVQAQGRLQGTLAADKNEILFSEFNINYNNELPMYRKGTVLIWQKVDEVMTKEIKLPTEMEGKKMAVTRTRTKPVPLHCDIIGDAFWKEHPEILDEDS

SEQ ID NO: 195501 - DNA, 3107 bp, Artificial Sequence
  derived and/or modified sequence
aagaccagcagataaaaaataatttttaaaaacctcgtgagactgatttgccgcaggacgggaggaggaagaagcaagcgtggaaggtgctaacggaggaacctaaacctccatcctctttgcctgggaggttaagaactacagggagaggcgagagagactatgactgccctacggctagagtagccgcgaagagaacacttccggggcggggctatctggccctttcctttccgcgtgtagaatgtggggcgcctgtaaagttaaggttcacgattccttggccaccatttccatcactctgagacggtacctgagattgggggcgaccatggcaaaaagcaagttcgagtacgtgagggacttcgaggctgacgacacctgcctggcacactgctgggtggtagtgcggctggacggccggaatttccatcggtttgctgagaagcacaactttgcaaaacccaatgacagccgtgctctccagctgatgaccaaatgtgcgcagactgtgatggaagaactagaggatattgtgatcgcgtatggacagagtgatgagtacagctttgtgttcaagcggaaaaccaattggtttaaaagaagagccagtaagttcatgactcacgtggcctcccagtttgcctccagctatgtgttttattggcgggattactttgaggaccagccccttctgtatcccccaggctttgacggaagagtcgtggtgtatcccagcaaccagactttaaaggactacctcagctggcgacaagcagattgtcacatcaataatctttataatacagttttctgggcacttatacaacaatctggactaacaccagtacaagcccaagggagattacagggaactcttgcagcagacaagaatgagattttgttttctgaattcaacatcaactataataatgagctgccgatgtataggaaagggactgtgttgatatggcagaaggtggatgaagtgatgacaaaagaaattaagctgccaacagaaatggaaggaaaaaagatggcagtgacccggaccaggacaaagccagtgcccttgcactgcgatatcatcggggatgctttctggaaggaacatccagagattctagatgaagacagctgacccttttgcgcttcagttctggtgtgcttaaccatgcaagccctcccacctcccagggctccttgccttaggtggctgtagcatccctaccacccaggacactggtgcgaatgacacaactcaagttgggaggggaacagggaaggaagggatggatgggggtggtgtatcttactctgtttaagcagaacaccttgtttgcggtgttggaacatggttcctttggcagaagtgctttttttttaatcgcagtactatttttataaagcaagaactattccatgccttggagaatgaatcatttttagattgtgacataaatcttgtaaaaacctgtcagttattttcatctatgagagaagaggagcccaaactctcgcccacctgttcttaaccagaaaacccactgactttgaaaatctcacctctgccacccatctacttgcattcgtctttggcagacctcaagataaatatgggttaatgcctgcatgatgcctctgaattcaggaattgcagggaaaactcggggctttgtgccagtctctaagttggcaactttggctgaacaaatgagtagtggcttcagtgtccttgcgtacacattctgtggattgatttaatggagttgtcagcatgatcatcatcttctagccaggggcatagttgccaaggccatttacctctttctaagaagaaacagaattatgtgtatatatgagagaaagaaacaagaatgcgtgaatgaggatgaagaaacatttaccccatgtactcaagacatttcagttttaaaagtcactttcctattagacttcttgaaaaacattctcacatagcctctatgtaatcagacaaatgacatttgatttcaagagcagaggggtaaacatcctctgctaatcgacaggtagcaggtgtcagaggaggcataatattaatagcgccaccttctgttgggtcagtggagatgggtgaggaacagcacagagcagcagggatcatcacatgcagccaaacttggcctctgaagggggaaggtagtgggaataggtggtgagagaactcacatttttctcttgtcctggttttatatttcggagggaaaggattatttggccccattaagaattaagaggctgggtgcggtggctcacgtctgtaatcccagcaccttgggaggcccaggcaggcagatcacctgaggtcgggagttcgagaccagcgtgaccaacgtggagaaacccccgtctctactaaaaatacaaaaaattagctgggcatggtggtgcatgcctgtgattccagctacttgggaggttgaggcaggagaatcatttgaactcaggaggcggaagttgcggtgagccaagattgtgccattgcactccagcctgggcaacgagcgaaactacatctcaaaaaaaaaaaaaaaagacatggctgggcatggtggctcacacctgtaatcccagcactttggggggctgaggcaggtagatcacttcaggccaggagtccaagaccagcacgtccaacatggcaaaacccagtctgtactaaaaatagaaaaattagctgggcgtggtggcgtgtgcctgcaataccagctactcagaaggctgaagcaggataattgcttgaacctggtaggtggaggttgcagtgagctgaaatcatgccactgcactccagcctgggtgacagagcaaaactgccttaaaaaaaaaaattaagagacagcccgtgtcccagtccctcgtcttgcactgcagaatttacatctaagaagaaaatgtatttttgaaagggtgatggctggcctcatccctcactaattgacaacccatctgtcgatgccattttttcccttcctgttctcactccacagaaagaggagatacggttcttgtttggtaattgctaaaatctctttgaggaaagaaataaagatgtcaactccttt

SEQ ID NO: 195502 - DNA, 897 bp, Artificial Sequence
  derived and/or modified sequence
atgtggggcgcctgcaaggtgaaggtgcacgacagcctggccaccatcagcatcaccctgagaagatacctgagactgggcgccaccatggccaagagcaagttcgagtacgtgagagacttcgaggccgacgacacctgcctggcccactgctgggtggtggtgagactggacggcagaaacttccacagattcgccgagaagcacaacttcgccaagcccaacgacagcagagccctgcagctgatgaccaagtgcgcccagaccgtgatggaggagctggaggacatcgtgatcgcctacggccagagcgacgagtacagcttcgtgttcaagagaaagaccaactggttcaagagaagagccagcaagttcatgacccacgtggccagccagttcgccagcagctacgtgttctactggagagactacttcgaggaccagcccctgctgtacccccccggcttcgacggcagagtggtggtgtaccccagcaaccagaccctgaaggactacctgagctggagacaggccgactgccacatcaacaacctgtacaacaccgtgttctgggccctgatccagcagagcggcctgacccccgtgcaggcccagggcagactgcagggcaccctggccgccgacaagaacgagatcctgttcagcgagttcaacatcaactacaacaacgagctgcccatgtacagaaagggcaccgtgctgatctggcagaaggtggacgaggtgatgaccaaggagatcaagctgcccaccgagatggagggcaagaagatggccgtgaccagaaccagaaccaagcccgtgcccctgcactgcgacatcatcggcgacgccttctggaaggagcaccccgagatcctggacgaggacagctag

SEQ ID NO: 195503 - DNA, 897 bp, Artificial Sequence
  derived and/or modified sequence
atgtggggggcctgcaaagttaaggtgcacgattctcttgccaccattagcattaccctccggcgatacctacgattgggcgcaacaatggcgaaatctaaattcgaatatgtgagagatttcgaggctgatgacacctgtctggcccattgttgggtcgttgtcagacttgatggcaggaattttcaccgatttgccgagaaacacaacttcgccaaacctaacgacagcagagctcttcagctgatgactaaatgtgcccagactgtgatggaggagctggaggacatagttatagcctacggacaatcagacgagtattcttttgtgttcaagcggaagaccaattggttcaagcgaagggcatccaaatttatgacccacgtcgcctcccagttcgccagcagttatgtcttctactggcgtgactattttgaagatcagccactcctgtatcccccagggttcgacggccgggtggtggtgtatccctcaaatcagacactcaaggattacctctcttggcgccaggctgattgccatatcaacaatttgtacaacaccgtattttgggccctcattcaacagagcggcctcaccccagttcaggcccagggtagactccagggtaccctggctgccgataagaatgagattctgttctctgagttcaacatcaactacaataacgaactacccatgtataggaaggggacagtgctgatttggcaaaaagtggacgaagtgatgactaaggaaatcaagctgcccaccgaaatggaaggtaaaaaaatggctgtgaccaggacacgcaccaagccagttcccctccactgtgatattattggggatgcgttttggaaggagcacccagagatacttgacgaagactcctag

SEQ ID NO: 195504 - DNA, 897 bp, Artificial Sequence
  derived and/or modified sequence
atgtggggcgcctgcaaggtgaaggtgcatgacagcctggccaccatcagcatcaccctgcggcgctacctgcggctgggcgccaccatggccaagagcaagtttgaatatgtgcgggactttgaagcagatgacacctgcctggcccactgctgggtggtggtgcggctggatggcaggaacttccacagatttgctgagaagcacaactttgccaagcccaatgacagccgggccctgcagctgatgaccaagtgtgcccagacagtgatggaggagctggaggacatcgtgattgcctacggccagagtgatgagtacagctttgtgttcaagaggaagaccaactggttcaagaggcgggccagcaagttcatgacccacgtggccagccagtttgccagcagctatgtgttctactggagggactactttgaggaccagcccctgctgtacccacctggctttgatggccgggtggtggtgtaccccagcaaccagaccctgaaggactacctgtcctggaggcaggccgactgccacatcaacaacctgtacaacacagtgttctgggccctgatccagcagagcggcctgacccctgtgcaggcccagggccgcctgcagggcaccctggccgctgacaagaatgagatcctcttcagcgagttcaacatcaactacaacaatgagctgcccatgtacagaaaaggaacagtgctgatctggcagaaggtggatgaggtgatgaccaaggagatcaagctgcccacagagatggagggcaagaagatggctgtgaccaggaccaggaccaagcctgtgcccctgcactgtgacatcattggagatgccttctggaaggagcaccctgagatcctggatgaggacagctag

SEQ ID NO: 195505 - DNA, 897 bp, Artificial Sequence
  derived and/or modified sequence
atgtggggcgcctgcaaggtgaaggtgcacgacagcctggccaccattagcattacgcttcggcgttatctacgactgggcgccacaatggccaagtccaaatttgagtacgtgcgagacttcgaggccgatgacacttgtctagcccactgttgggttgtggttagactcgacggccggaatttccataggttcgcagaaaaacacaatttcgctaagccgaatgacagtcgggccctccagctgatgaccaagtgtgctcagaccgtaatggaggaactggaagacattgtcattgcttatggacagtctgatgaatattccttcgtgtttaagcgcaagaccaactggttcaagcggagggctagcaaatttatgacccatgtcgcttctcagttcgcctcgtcgtatgtgttctactggagggattatttcgaagaccaacctctgctgtatccccccggattcgacggaagggttgtcgtgtatcctagcaaccagaccctgaaagattacctgtcctggcgacaagccgattgccatattaataatttgtacaatactgttttctgggcactgattcagcaaagcgggttaactccagttcaggcgcaggggagactgcaagggaccctggcagcagataaaaacgagatactgttcagtgaatttaatattaattacaacaacgagttacctatgtaccgcaaggggacagtcctgatctggcagaaagtggacgaagtcatgactaaggagatcaaacttccaaccgaaatggaagggaagaagatggcagttaccaggacaagaacaaagcccgttccactgcactgtgacattataggggacgctttttggaaagagcaccccgaaatccttgacgaggactcctag

SEQ ID NO: 195506 - DNA, 897 bp, Artificial Sequence
  derived and/or modified sequence
atgtggggcgcatgcaaagtgaaggtgcacgattcactggctaccataagcataacactgcgtcgttacctgcggttgggcgctaccatggcgaagagtaagttcgagtacgtgagagatttcgaagccgatgatacctgtctagctcattgttgggtagtggtgcggctggatggtagaaattttcatcggtttgccgagaaacacaacttcgccaagccgaacgacagtcgagcgctgcagctcatgacgaaatgtgcacaaaccgtgatggaagaactcgaggatatagtcatcgcctacggacagtccgatgagtatagctttgtgttcaagcggaagactaactggtttaaaagaagggcatcaaaatttatgacgcatgtggctagccagtttgcctcatcttacgtgttctattggcgggattattttgaggatcaacccctactttatccgcctggatttgacggaagagtagttgtctacccctctaaccagactctgaaagactatctgtcatggagacaggccgattgccatatcaacaatctgtataacaccgtgttctgggccttgatccagcagtcgggccttacccctgtacaagcccaggggagattacagggcaccctcgccgcagacaagaacgaaattctgtttagtgagttcaatatcaattacaacaatgaacttccaatgtaccgcaagggaacagtcttgatttggcagaaagtcgatgaagtaatgacaaaggaaatcaagttacctacggaaatggagggaaagaaaatggctgtaaccagaacacggaccaagcccgtcccattgcactgtgacattattggagatgctttctggaaggagcacccggagattttggacgaagactcatag

SEQ ID NO: 195507 - protein, 421 aa, Artificial Sequence
  derived and/or modified sequence
MPFLHGFRRIIFEYQPLVDAILGSLGIQDPERQESLDRPSYVASEESRILVLTELLERKAHSPFYQEGVSNALLKMAELGLTRAADVLLRHGANLNFEDPVTYYTALHIAVLRNQPDMVELLVHHGADVNRRDRIHESSPLDLASEEPERLPCLQRLLDLGADVNAADKHGKTALLHALASSDGVQIHNTENIRLLLEGGADVKATTKDGDTVFTCIIFLLGETVGGDKEEAQMINRFCFQVTRLLLAHGADPSECPAHESLTHICLKSFKLHFPLLRFLLESGAAYNCSLHGASCWSGFHIIFERLCSHPGCTEDESHADLLRKAETVLDLMVTNSQKLQLPENFDIHPVGSLAEKIQALHFSLRQLESYPPPLKHLCRVAIRLYLQPWPVDVKVKALPLPDRLKWYLLSEHSGSVEDDI

SEQ ID NO: 195508 - protein, 342 aa, Artificial Sequence
  derived and/or modified sequence
MRFWAPWGSRTPSGRSLWTDPVTYYTALHIAVLRNQPDMVELLVHHGADVNRRDRIHESSPLDLASEEPERLPCLQRLLDLGADVNAADKHGKTALLHALASSDGVQIHNTENIRLLLEGGADVKATTKDGDTVFTCIIFLLGETVGGDKEEAQMINRFCFQVTRLLLAHGADPSECPAHESLTHICLKSFKLHFPLLRFLLESGAAYNCSLHGASCWSGFHIIFERLCSHPGCTEDESHADLLRKAETVLDLMVTNSQKLQLPENFDIHPVGSLAEKIQALHFSLRQLESYPPPLKHLCRVAIRLYLQPWPVDVKVKALPLPDRLKWYLLSEHSGSVEDDI

SEQ ID NO: 195509 - DNA, 1029 bp, Artificial Sequence
  derived and/or modified sequence
atgagattctgggccccctggggcagcagaacccccagcggcagaagcctgtggaccgaccccgtgacctactacaccgccctgcacatcgccgtgctgagaaaccagcccgacatggtggagctgctggtgcaccacggcgccgacgtgaacagaagagacagaatccacgagagcagccccctggacctggccagcgaggagcccgagagactgccctgcctgcagagactgctggacctgggcgccgacgtgaacgccgccgacaagcacggcaagaccgccctgctgcacgccctggccagcagcgacggcgtgcagatccacaacaccgagaacatcagactgctgctggagggcggcgccgacgtgaaggccaccaccaaggacggcgacaccgtgttcacctgcatcatcttcctgctgggcgagaccgtgggcggcgacaaggaggaggcccagatgatcaacagattctgcttccaggtgaccagactgctgctggcccacggcgccgaccccagcgagtgccccgcccacgagagcctgacccacatctgcctgaagagcttcaagctgcacttccccctgctgagattcctgctggagagcggcgccgcctacaactgcagcctgcacggcgccagctgctggagcggcttccacatcatcttcgagagactgtgcagccaccccggctgcaccgaggacgagagccacgccgacctgctgagaaaggccgagaccgtgctggacctgatggtgaccaacagccagaagctgcagctgcccgagaacttcgacatccaccccgtgggcagcctggccgagaagatccaggccctgcacttcagcctgagacagctggagagctaccccccccccctgaagcacctgtgcagagtggccatcagactgtacctgcagccctggcccgtggacgtgaaggtgaaggccctgcccctgcccgacagactgaagtggtacctgctgagcgagcacagcggcagcgtggaggacgacatctag

SEQ ID NO: 195510 - DNA, 1266 bp, Artificial Sequence
  derived and/or modified sequence
atgccattcctccatggatttcggcgaattattttcgagtaccagcccctggtcgacgctatactcggcagcctgggaatccaagatcctgagcggcaagaaagcctggaccgcccatcatacgtggcgagcgaagaatccagaatcttggtattaaccgagctcctcgaacggaaagcccactccccattctaccaggaaggggtttcaaatgctttgctcaagatggccgagctcggcctgacacgagcagctgatgtgctgttgagacatggggcgaaccttaatttcgaggatcctgtgacctactacacagctctgcacatcgcagtccttaggaaccaacccgacatggtggaactgctggtgcaccacggcgcggacgtgaaccgcagagatagaattcatgagtcaagcccattggacctggcttccgaggagcctgagcggcttccatgtctgcagcggctgctagatctgggagcagacgtaaacgccgctgacaagcacggaaaaaccgctcttttgcacgcgctggcctcctccgatggcgtccaaatccataatacagaaaatatccgcttactgctagaaggaggcgcggacgtcaaagcgactacaaaagatggggatacagtctttacatgtattattttcctgttgggcgagacagtgggcggggataaggaggaagctcaaatgatcaaccggttctgctttcaggttaccagactgctcctggcacatggggccgacccctctgaatgccctgcacacgagagccttacccatatctgtttgaagagtttcaaactgcatttccctctgctccgcttcctcctggaatccggcgcagcctacaattgcagcttacacggcgcatcctgctggtctggcttccatattatattcgagaggctctgctcccaccccgggtgtactgaggacgagtcacatgccgatctgttgaggaaggcagaaacagtcttggacctgatggtgaccaattcccagaagctacaactgcctgagaatttcgatattcatcccgtgggttctttggccgaaaaaatccaggcactgcactttagcctacgccagttggagagctatcccccccccttgaagcacctgtgtagggtggcaattaggctgtatttgcagccatggccggtggacgtcaaggtgaaagccttgcccctgcccgatcgcctcaaatggtatctgctctcggagcactccggctctgtggaggacgatatctag

SEQ ID NO: 195511 - DNA, 1029 bp, Artificial Sequence
  derived and/or modified sequence
atgcgtttctgggctccttggggcagccgaactccttcaggacgcagtttgtggacagaccctgtcacttactataccgctctccacatagctgtgttaagaaatcagcctgacatggtggagttgttagtgcatcacggagcggacgtcaaccgaagagacaggatccatgaatcatccccactggacctggcttctgaggagcctgagcgattgccctgccttcaaaggcttctggatctgggagccgatgttaatgcggcagataagcacgggaaaactgcccttttgcatgcgctggctagcagcgacggagtccagatccacaacaccgagaatattaggttactactggagggtggcgcagatgtgaaagctacgactaaggatggcgatacagtgtttacctgtattatcttcctgttaggtgagacagtgggcggtgataaggaagaagctcaaatgattaaccgattctgctttcaggtgacacgtctgcttttggcccacggagccgatccatctgaatgcccagctcacgagagcctgacacacatctgcctgaagtccttcaaattgcactttcctctgctgcgctttttgctggagtctggagctgcctataattgtagcctacacggcgcttcatgttggtctgggttccacattatttttgagcgactgtgtagtcaccccggctgcacagaggatgagtctcacgcagacctgctgcgcaaagctgagacagttctggatttaatggtaaccaattcacagaaactccagttgccggagaatttcgacatccacccagttggctcactcgctgaaaagatacaagccctgcacttttcactgcggcagttagagagctacccacctcctctgaagcatttgtgcagagtagccattaggctatacctccagccctggcctgtagacgtgaaagttaaggcactgccactccctgataggttgaagtggtacctcttatcggaacactctggatcagttgaagacgacatttag

SEQ ID NO: 195512 - DNA, 1266 bp, Artificial Sequence
  derived and/or modified sequence
atgcccttcctgcacggcttccgccgcatcatctttgagtaccagcccctggtggatgccatcctgggcagcctgggcatccaggaccctgagcggcaggagagcctggaccggcccagctatgtggccagcgaggagagccgcatcctggtgctgacagagctgctggagaggaaggcccacagccccttctaccaggagggcgtgtccaatgccctgctgaagatggccgagctgggcctgaccagggctgctgatgtgctgctgcggcatggagccaacctgaactttgaggaccctgtgacctactacacagccctgcacatcgctgtgctgaggaaccagcctgacatggtggagctgctggtgcaccacggggctgatgtgaacagaagagaccgcatccacgagagcagccccctggacctggccagcgaggagcctgagcggctgccctgcctgcagaggctgctggacctgggcgcagatgtgaatgctgctgacaagcacggcaagacagccctgctgcacgccctggccagcagtgatggagtgcagatccacaacacagagaacatccggctgctgctggagggcggcgcagatgtgaaggccaccaccaaggatggagacaccgtcttcacctgcatcatcttcctgctgggggagaccgtgggcggggacaaggaggaggcccagatgatcaaccgcttctgcttccaggtgacccggctgctgctggcccatggagctgaccccagtgaatgtcctgcccacgagagcctgacccacatctgcctgaagagcttcaagctgcacttccccctgctgcgcttcctgctggagagcggggccgcctacaactgcagcctgcacggggccagctgctggagcggcttccacatcatctttgagcggctgtgcagccaccctggctgcacagaagatgagagccacgccgacctgctgaggaaggccgagaccgtgctggacctgatggtgaccaacagccagaagctgcagctgcctgagaactttgacatccaccctgtgggcagcctggccgagaagatccaggccctgcacttcagcctgcggcagctggagagctaccccccacccctgaagcacctgtgccgggtggccatccggctgtacctgcagccctggcctgtggatgtgaaggtgaaggccctgcccctgcctgaccggctgaagtggtacctgctgtctgagcacagcggctctgtggaggatgacatctag

SEQ ID NO: 195513 - DNA, 1029 bp, Artificial Sequence
  derived and/or modified sequence
atgaggttctgggccccctggggcagcaggaccccatctggccgcagcctgtggacagatcctgtgacctactacacagccctgcacatcgctgtgctgaggaaccagcctgacatggtggagctgctggtgcaccacggggctgatgtgaacagaagagaccgcatccacgagagcagccccctggacctggccagcgaggagcctgagcggctgccctgcctgcagaggctgctggacctgggcgcagatgtgaatgctgctgacaagcacggcaagacagccctgctgcacgccctggccagcagtgatggagtgcagatccacaacacagagaacatccggctgctgctggagggcggcgcagatgtgaaggccaccaccaaggatggagacacagtgttcacctgcatcatcttcctgctgggggagaccgtgggcggggacaaggaggaggcccagatgatcaaccgcttctgcttccaggtgacccggctgctgctggcccacggggctgaccccagcgagtgcccagcccacgagagcctgacccacatctgcctgaagagcttcaagctgcacttccccctgctgcgcttcctgctggagagcggggccgcctacaactgcagcctgcatggagccagctgctggagcggcttccacatcatctttgagcggctgtgcagccaccctggctgcacagaagatgagagccatgctgacctgctgaggaaggccgagaccgtgctggacctgatggtgaccaacagccagaagctgcagctgcctgaaaattttgacatccaccctgtgggcagcctggccgagaagatccaggccctgcacttcagcctgcggcagctggagagctaccccccacccctgaagcacctgtgccgggtggccatccggctgtacctgcagccctggcctgtggatgtgaaggtgaaggccctgcccctgcctgaccggctgaagtggtacctgctgtctgagcacagcggctctgtggaggatgacatctag

SEQ ID NO: 195514 - DNA, 1266 bp, Artificial Sequence
  derived and/or modified sequence
atgcccttcctgcacggcttccggcggatcatcttcgagtaccagccccttgtggacgccatcttggggtcgttgggaattcaagaccccgagcgccaggagtctctggaccgcccctcctacgtggctagcgaggagtcccgaatactcgtcctgacggagctgctggaacgcaaagcccattctccgttttaccaagagggagtgtccaacgcccttctgaagatggccgaattggggttaaccagggctgctgatgtcttgttacgtcacggagctaacctcaattttgaagacccagtgacttattataccgctctccatatcgctgtcctgcgtaaccagcccgatatggttgaattgctggtccaccacggagctgatgtgaacagaagggacagaatccatgagtcttctccccttgacctggcctccgaagagcctgagcgtcttccctgcttacagaggctgctggacctgggggcagatgtcaacgccgctgataagcacggcaaaacagctctgctgcacgcgttagctagcagcgatggggttcaaattcacaacaccgaaaatatacgacttctcctggaaggaggagccgacgtcaaagccacaacaaaagacggagacactgtctttacatgcattatcttcttactaggcgaaaccgttggcggcgataaagaagaagcgcagatgataaacagattctgcttccaagtgaccaggctcctgctggcacatggggccgatccatctgaatgccccgcacatgaatcgctgacacacatatgcctcaagagcttcaagctccactttccccttttgcgattccttctagagtcgggagcagcctacaactgctccctacacggcgcatcttgttggtctggcttccatatcatcttcgagagactgtgttcacaccccggatgtaccgaagacgaaagccacgctgacctgctgcggaaggctgagaccgtcctggatcttatggtgaccaacagccagaagctgcaattgcccgagaacttcgacatccaccccgtcggatctctcgctgaaaaaattcaggctttgcacttctccctccgtcagctggagtcgtacccaccccccttgaagcacttatgcagagtggctattagactgtatctccagccatggccagtggacgtgaaagttaaggccctgccgctgccagacaggctgaagtggtacctcttgtcagagcatagcggttcggttgaagacgatatctag

SEQ ID NO: 195515 - DNA, 1029 bp, Artificial Sequence
  derived and/or modified sequence
atgcggttctgggccccctggggcagccggacccccagcggccggtctctctggacagatccagttacctattacacagctctccatatcgctgtgctccgcaatcagcctgacatggtggagcttcttgtacaccacggagccgacgtaaacaggcgcgaccgcatccacgagtctagtcctctggatctggccagtgaagaacctgaaaggctgccatgtctccagagactattggatctcggcgccgacgtaaatgccgcagacaagcatgggaaaaccgcgttgctgcacgccctggccagttccgatggtgtgcagattcataacacagaaaacatccggctgctcctcgaaggaggtgccgacgtcaaagccaccacaaaagacggagatacagtgttcacttgtattatcttcttgctgggcgaaaccgtcggaggggacaaagaggaggcccagatgatcaacaggttctgtttccaagtgacccgcctactgctggcgcatggagctgacccctcagaatgtccagcccacgaatctttaacgcacatctgcctgaagagctttaaactacatttccccttgctgaggtttcttttggagagcggagctgcctacaattgctccctgcacggcgccagttgctggagcggctttcacattatttttgaacggctctgtagtcaccccggatgtactgaagatgaatcccatgcggatttacttcgaaaggcggaaaccgtgctagacctgatggtgactaattcccagaaactgcagctccctgaaaatttcgacattcaccctgtggggtctctggccgagaagattcaggctttacatttctctctgcgacaattggagagttacccgccaccgctcaagcatctatgtagagtggccataagactgtaccttcaaccctggcccgtagacgttaaggtgaaggctctgccactgcccgacaggcttaaatggtatcttcttagtgagcactcaggctccgtggaggatgacatatag

SEQ ID NO: 195516 - DNA, 1266 bp, Artificial Sequence
  derived and/or modified sequence
atgccattcctgcatggcttccgcagaatcatctttgagtaccagcccctggtggatgctattctgggctccttaggaatccaggacccagagcgtcaggaaagcttggataggccaagttatgttgcctcagaagagagtcggatcttggttctcaccgagctcctagagaggaaggctcatagtcctttttatcaggagggcgtatctaatgcactgctgaagatggccgagctcgggctaacacgagctgctgatgtgctgctgcggcatggtgcaaacctgaacttcgaagatcccgtaacatattacacagccttgcacatcgctgttctacgaaaccaaccagacatggtggagctccttgtccaccacggggctgatgtgaatcgaagagaccggattcatgagtcctccccattagacctcgcctctgaagagccagaacgcctcccttgtctccagagattgctcgatctaggcgctgacgtcaatgcggctgataagcacgggaaaacagcactcctgcacgccctggcttcatcagatggcgtacagatccataataccgagaatatccgcctgctgctggagggcggagccgacgtgaaggctaccactaaagacggcgacaccgttttcacatgcataatttttttgctgggtgagacagtcggaggggacaaagaggaagcccagatgataaacagattttgctttcaggttacacggctgctgctagcccacggggctgatccatcagagtgtcctgctcacgagtcacttactcacatctgtctgaagagtttcaagcttcattttcctctactcaggtttctcctggaatcaggtgctgcctataattgctcgctccacggcgcttcatgctggagcgggttccacattatctttgaaagactgtgctcccaccctggttgcactgaggacgagtcacatgccgatttgctgcggaaggctgaaactgttctggacctgatggtgacaaatagccagaagctccaattacctgagaatttcgatattcaccccgttggctccttagctgaaaagatccaggctctgcacttcagcctgcggcagttagaatcataccctccccctctgaagcatctatgccgcgtcgctatccggctatatctccagccgtggcctgttgacgtcaaggtgaaagctttgcccctgcccgacagactgaagtggtatctcctttccgagcatagcggatctgttgaggacgacatatag

SEQ ID NO: 195517 - DNA, 1029 bp, Artificial Sequence
  derived and/or modified sequence
atgcgattctgggccccttggggatctaggactccaagtggacggagtctgtggacggacccggtgacgtattatactgcccttcacatcgccgtccttagaaaccaacccgatatggtagaactgctggttcaccacggcgctgatgtgaatcggagagacagaatccatgagtcctcccctctggatctcgcctctgaagagccagagcgattaccttgcctgcagaggctgctggatcttggggcagatgtgaacgccgctgacaaacatggtaagactgcactcctgcacgccctagcctcctctgacggcgtgcagattcacaatacagagaatatacgcctgctactcgaaggaggcgcagatgtaaaagccacaacaaaggacggtgacactgtcttcacctgtataattttcctactgggagagacagtgggcggagacaaagaggaggcccagatgattaaccgtttttgcttccaggtgaccaggctcttgctagctcacggcgctgacccaagcgaatgccctgcgcatgagtctctcactcacatttgtctcaaaagctttaagctgcacttccctttattgaggttcttattagaaagcggcgctgcgtataactgctccctgcacggagcgagttgttggtctggattccacataattttcgaacggttgtgctcccatccaggctgtacagaagatgagtcgcacgcagacctgctgcggaaggcagaaaccgtcctcgacctcatggtgacaaacagtcagaagttacagctccccgagaatttcgatattcatccggtcggaagcctcgccgaaaaaattcaggctctacacttcagcctgagacagctagagagttatcctcccccactcaagcacctgtgccgcgtagccatcagattgtatctccagccatggcctgtcgacgtgaaggtgaaggcattgcctctccctgacagactgaagtggtatcttctgagcgagcacagcggatcagttgaggacgatatttag

SEQ ID NO: 195518 - DNA, 1353 bp, Artificial Sequence
  derived and/or modified sequence
ttggactgaggagcggacccggccgggcgcaggggctggactggcggagcaggtggggtccgcggccgccggagcgttccggtcggcgtctgggcatctcggcctcggcagaaagcgcgacggccctgctgcgcggggcccgcggcgatgccgttcctgcacggcttccggaggatcatcttcgagtaccagccgctggtggatgcgattctgggctccctggggatccaggaccccgagcggcaggagtctctggaccgacccagtcacctactacacggccttgcacatcgccgtcctgcggaaccagccggacatggtggagctgctggtgcatcacggggccgacgttaatcggagggaccggatccacgagagtagccccttggacctggccagcgaggagcctgagcgcctgccctgcctgcagcgcctcctggaccttggagctgatgtcaatgccgctgacaagcatggaaaaactgctctgctccatgctctggccagcagcgacggggtgcagatccacaatactgagaacattcgtctcttactggaaggaggggcagacgtcaaggccaccaccaaagatggggacacagtgttcacctgcatcatcttcctgcttggtgagaccgtgggaggggacaaagaggaggcccagatgatcaaccgcttctgcttccaagtcacacggctgctgctggcacacggggccgaccccagcgagtgcccagcccacgagtccctcacccacatctgcctgaagagctttaaactgcacttccctctcctgcgcttcctcctggagtccggagccgcctacaactgctccctgcacggtgcgtcctgctggtctggctttcacatcatctttgagaggctctgttcccacccaggctgcacggaagacgagagccatgcggacctcctgcgcaaagctgagactgtcctggatctcatggtgaccaactctcagaaactccagctgcccgaaaacttcgatatccaccctgtgggcagcctggcggaaaagatccaggccctccacttctccttgaggcagctggagagctatcccccgcccctcaagcacctgtgccgtgtggccatccggctctaccttcagccgtggcctgtggatgtgaaggtcaaagccctgcctctgcccgacaggctgaagtggtacctccttagcgagcacagtggctccgtggaagatgacatctgataggtctcaggctacaggaacgggggacacgggcagctcaggtcagcctgttggtagatgctgggacagcattagaagagggtctttttgatctgggagatgagacgggatccttcatgaga

SEQ ID NO: 195519 - DNA, 2330 bp, Artificial Sequence
  derived and/or modified sequence
cttccggcgggggcgcggcttggactgaggagcggacccggccgggcgcaggggctggactggcggagcaggtggggtccgcggccgccggagcgttccggtcggcgtctgggcatctcggcctcggcagaaagcgcgacggccctgctgcgcggggcccgcggcgatgccgttcctgcacggcttccggaggatcatcttcgagtaccagccgctggtggatgcgattctgggctccctggggatccaggaccccgagcggcaggagtctctggaccggcccagttatgtcgccagcgaggagagccgaatccttgttctcactgagctgctggagaggaaagcccactctcccttttaccaggaaggcgtgagcaacgccctgctcaagatggctgagctggggctgacgcgggcggccgacgttctcttgcggcatggggccaatctcaactttgaagacccagtcacctactacacggccttgcacatcgccgtcctgcggaaccagccggacatggtggagctgctggtgcatcacggggccgacgttaatcggagggaccggatccacgagagtagccccttggacctggccagcgaggagcctgagcgcctgccctgcctgcagcgcctcctggaccttggagctgatgtcaatgccgctgacaagcatggaaaaactgctctgctccatgctctggccagcagcgacggggtgcagatccacaatactgagaacattcgtctcttactggaaggaggggcagacgtcaaggccaccaccaaagatggggacacagtgttcacctgcatcatcttcctgcttggtgagaccgtgggaggggacaaagaggaggcccagatgatcaaccgcttctgcttccaagtcacacggctgctgctggcacacggggccgaccccagcgagtgcccagcccacgagtccctcacccacatctgcctgaagagctttaaactgcacttccctctcctgcgcttcctcctggagtccggagccgcctacaactgctccctgcacggtgcgtcctgctggtctggctttcacatcatctttgagaggctctgttcccacccaggctgcacggaagacgagagccatgcggacctcctgcgcaaagctgagactgtcctggatctcatggtgaccaactctcagaaactccagctgcccgaaaacttcgatatccaccctgtgggcagcctggcggaaaagatccaggccctccacttctccttgaggcagctggagagctatcccccgcccctcaagcacctgtgccgtgtggccatccggctctaccttcagccgtggcctgtggatgtgaaggtcaaagccctgcctctgcccgacaggctgaagtggtacctccttagcgagcacagtggctccgtggaagatgacatctgataggtctcaggctacaggaacgggggacacgggcagctcaggtcagcctgttggtagatgctgggacagcattagaagagggtctttttgatctgggagatgagacgggatccttcatgagaaaagccagccaggtagagcctgaagctgtgatcactccagtggtgaagggtgcagctctggttcttccagagagactgcccccttccctccagcggcactccaagtcccccccatgttggaaagaggaacagggcttggattgatgtttataccctctgaattggagggcagtgccagggcatttgcagaagctgggaaggaccaagcctcagcaccccagggctgcggggctcttgttggccgcacgtggcagtgcagctggagaggaagcctggggcacgtcctgtgcggtgccaccaaggccccacccctgccccttttccttccaggttctgttactcacagaagtgtttctggtgggctctgcgggagaagacactaagggccccacaggcttgtttcatggtgttgcaagccaagctggcccctgcctgttcctgtagctctggggccaggtcagccgtggccccacctaccagaactgtgctctgctggcagctgtgcttttgccaaacccagggcctcagcgaccatgacttctgctaaaaagcaatcatgagtgcgtggctggggacagacctctctgaagtgtctcctgttgtgaggggctcactttggagccactgaagagccgactgtgccacccacttgcgagcctcagtcccttccaagctgcactggtcattgggaattgtgtaaacacctctggggataagctgaggtgactaaatgatatatttatattataagattaaactgactttcttggccttaa

SEQ ID NO: 195520 - DNA, 2180 bp, Artificial Sequence
  derived and/or modified sequence
ccgggcgcaggggctggactggcggagcaggtggggtccgcggccgccggagcgttccggtcggcgtctgggcatctcggcctcggcagaaagcgcgacggccctgctgcgcggggcccgcggcgatgccgttcctgcacggcttccggaggatcatcttcgagtaccagccgctggtggatgcgattctgggctccctggggatccaggaccccgagcggcaggagtctctggaccggcccagttatgtcgccagcgaggagagccgaatccttgttctcactgagctgctggagaggaaagcccactctcccttttaccaggaaggcgtgagcaacgccctgctcaagatggctgagctggggctgacgcgggcggccgacgttctcttgcggcatggggccaatctcaactttgaagacccagtcacctactacacggccttgcacatcgccgtcctgcggaaccagccggacatggtggagctgctggtgcatcacggggccgacgttaatcggagggaccgggaaaaactgctctgctccatgctctggccagcagcgacggggtgcagatccacaatactgagaacattcgtctcttactggaaggaggggcagacgtcaaggccaccaccaaagatggggacacagtgttcacctgcatcatcttcctgcttggtgagaccgtgggaggggacaaagaggaggcccagatgatcaaccgcttctgcttccaagtcacacggctgctgctggcacacggggccgaccccagcgagtgcccagcccacgagtccctcacccacatctgcctgaagagctttaaactgcacttccctctcctgcgcttcctcctggagtccggagccgcctacaactgctccctgcacggtgcgtcctgctggtctggctttcacatcatctttgagaggctctgttcccacccaggctgcacggaagacgagagccatgcggacctcctgcgcaaagctgagactgtcctggatctcatggtgaccaactctcagaaactccagctgcccgaaaacttcgatatccaccctgtgggcagcctggcggaaaagatccaggccctccacttctccttgaggcagctggagagctatcccccgcccctcaagcacctgtgccgtgtggccatccggctctaccttcagccgtggcctgtggatgtgaaggtcaaagccctgcctctgcccgacaggctgaagtggtacctccttagcgagcacagtggctccgtggaagatgacatctgataggtctcaggctacaggaacgggggacacgggcagctcaggtcagcctgttggtagatgctgggacagcattagaagagggtctttttgatctgggagatgagacgggatccttcatgagaaaagccagccaggtagagcctgaagctgtgatcactccagtggtgaagggtgcagctctggttcttccagagagactgcccccttccctccagcggcactccaagtcccccccatgttggaaagaggaacagggcttggattgatgtttataccctctgaattggagggcagtgccagggcatttgcagaagctgggaaggaccaagcctcagcaccccagggctgcggggctcttgttggccgcacgtggcagtgcagctggagaggaagcctggggcacgtcctgtgcggtgccaccaaggccccacccctgccccttttccttccaggttctgttactcacagaagtgtttctggtgggctctgcgggagaagacactaagggccccacaggcttgtttcatggtgttgcaagccaagctggcccctgcctgttcctgtagctctggggccaggtcagccgtggccccacctaccagaactgtgctctgctggcagctgtgcttttgccaaacccagggcctcagcgaccatgacttctgctaaaaagcaatcatgagtgcgtggctggggacagacctctctgaagtgtctcctgttgtgaggggctcactttggagccactgaagagccgactgtgccacccacttgcgagcctcagtcccttccaagctgcactggtcattgggaattgtgtaaacacctctggggataagctgaggtgactaaatgatatatttatattataagattaaactgactttcttggccttaa

SEQ ID NO: 195521 - DNA, 1266 bp, Artificial Sequence
  derived and/or modified sequence
atgcccttcctgcacggcttcagaagaatcatcttcgagtaccagcccctggtggacgccatcctgggcagcctgggcatccaggaccccgagagacaggagagcctggacagacccagctacgtggccagcgaggagagcagaatcctggtgctgaccgagctgctggagagaaaggcccacagccccttctaccaggagggcgtgagcaacgccctgctgaagatggccgagctgggcctgaccagagccgccgacgtgctgctgagacacggcgccaacctgaacttcgaggaccccgtgacctactacaccgccctgcacatcgccgtgctgagaaaccagcccgacatggtggagctgctggtgcaccacggcgccgacgtgaacagaagagacagaatccacgagagcagccccctggacctggccagcgaggagcccgagagactgccctgcctgcagagactgctggacctgggcgccgacgtgaacgccgccgacaagcacggcaagaccgccctgctgcacgccctggccagcagcgacggcgtgcagatccacaacaccgagaacatcagactgctgctggagggcggcgccgacgtgaaggccaccaccaaggacggcgacaccgtgttcacctgcatcatcttcctgctgggcgagaccgtgggcggcgacaaggaggaggcccagatgatcaacagattctgcttccaggtgaccagactgctgctggcccacggcgccgaccccagcgagtgccccgcccacgagagcctgacccacatctgcctgaagagcttcaagctgcacttccccctgctgagattcctgctggagagcggcgccgcctacaactgcagcctgcacggcgccagctgctggagcggcttccacatcatcttcgagagactgtgcagccaccccggctgcaccgaggacgagagccacgccgacctgctgagaaaggccgagaccgtgctggacctgatggtgaccaacagccagaagctgcagctgcccgagaacttcgacatccaccccgtgggcagcctggccgagaagatccaggccctgcacttcagcctgagacagctggagagctaccccccccccctgaagcacctgtgcagagtggccatcagactgtacctgcagccctggcccgtggacgtgaaggtgaaggccctgcccctgcccgacagactgaagtggtacctgctgagcgagcacagcggcagcgtggaggacgacatctag

SEQ ID NO: 195522 - protein, 304 aa, Artificial Sequence
  derived and/or modified sequence
MIQNSRPSLLQPQDVGDTVETLMLHPVIKAFLCGSISGTCSTLLFQPLDLLKTRLQTLQPSDHGSRRVGMLAVLLKVVRTESLLGLWKGMSPSIVRCVPGVGIYFGTLYSLKQYFLRGHPPTALESVMLGVGSRSVAGVCMSPITVIKTRYESGKYGYESIYAALRSIYHSEGHRGLFSGLTATLLRDAPFSGIYLMFYNQTKNIVPHDQVDATLIPITNFSCGIFAGILASLVTQPADVIKTHMQLYPLKFQWIGQAVTLIFKDYGLRGFFQGGIPRALRRTLMAAMAWTVYEEMMAKMGLKS

SEQ ID NO: 195523 - DNA, 915 bp, Artificial Sequence
  derived and/or modified sequence
atgatccagaactctcgccctagcttacttcagccccaagacgttggggataccgtcgaaacgctaatgctgcatcccgtaataaaggcctttctgtgcggatctatctcggggacatgcagcaccctgctgttccagcctctagatctcctgaagacccgcctgcagacgttgcaacccagtgatcacggaagtcggcgggtgggaatgctggccgttctgctgaaggtggttcgcacagagtcattgctcgggctttggaagggtatgagcccttctatcgtgcgttgcgtgccgggtgtgggtatatatttcggaactttgtattctttgaagcagtatttcctcagagggcaccccccgactgcactcgagtcagtgatgctcggcgtgggttctcgtagcgtcgcaggtgtgtgcatgagccccattacagtgattaaaacaagatacgagtcggggaagtatggctatgaaagcatctatgcagccctaaggtctatctaccacagcgaggggcaccgggggcttttctctgggttgacagccactctgttgagggacgccccctttagtggaatttatctcatgttttacaatcagactaaaaacattgttcctcacgatcaggttgatgcaacactaatccccataacaaacttctcctgcgggattttcgccggcatcctggcctctctggttacccagcctgctgacgttatcaagacccacatgcagctgtaccccctgaaatttcaatggattggtcaggcagttactctgatcttcaaagattatggcctccggggttttttccaggggggcattccccgcgccctgcgtaggacccttatggcagcgatggcctggacagtttacgaggaaatgatggccaagatggggctaaagtcttag

SEQ ID NO: 195524 - DNA, 915 bp, Artificial Sequence
  derived and/or modified sequence
atgatccagaacagccggcccagcctgctgcagccccaggatgtgggggacacagtggagaccctgatgctgcaccctgtgatcaaggccttcctgtgtggcagcatcagcggcacctgcagcaccctgctcttccagcccctggacctgctgaagacccggctgcagaccctgcagcccagcgaccacggcagccggcgggtgggcatgctggccgtgctgctgaaggtggtgaggacagagagcctgctgggcctgtggaagggcatgagccccagcatcgtgcgctgtgtgcctggggtgggcatctacttcggcaccctgtacagcctgaagcagtacttcctgcggggccaccccccaacagccctggagagcgtgatgctgggcgtgggcagccgctctgtggccggcgtgtgcatgagccccatcaccgtcatcaagaccaggtatgaaagtggcaagtatggctatgagagcatctatgctgccctgcggagcatctaccacagcgagggccaccggggcctcttcagcggcctgacagccaccctgctgagagatgcccccttcagcggcatctacctgatgttctacaaccagaccaagaacatcgtgccccatgaccaggtggatgccaccctcatccccatcaccaacttcagctgtggcatctttgctggcatcctggccagcctggtgacccagcctgcagatgtgatcaagacccacatgcagctgtaccccctgaagttccagtggattggccaggccgtgaccctcatcttcaaggactatggcctgcggggcttcttccagggcggcatcccccgggccctgcggaggaccctgatggccgccatggcctggacagtgtatgaggagatgatggccaagatgggcctgaagagctag

SEQ ID NO: 195525 - DNA, 915 bp, Artificial Sequence
  derived and/or modified sequence
atgatccagaacagccggcccagcctgctgcagccccaggacgtgggggatacagtggagaccctcatgctgcacccagtcataaaagccttcctttgcggttcgatctctggtacctgcagcaccctgctgttccaacccttggatttgctgaaaacccggctgcagacactgcagccatctgatcacggatcgcggcgggtgggcatgctggcggtcctcctgaaagtggttcgtacagaatccctgctgggcctttggaaaggtatgagtccgtctatcgtaagatgcgtgcccggcgttggcatctactttggcactctctactccctcaaacaatacttcctgcgcggacaccctcccacagccctcgagagcgtgatgctcggcgtaggcagtagaagcgtcgcgggtgtgtgcatgagcccaattacagtaatcaaaactagatacgagtcgggcaagtacggttacgagagtatctatgccgcattgaggagcatctaccactcagaaggtcatagggggttattcagtgggttgaccgctacactactcagggacgcccctttctcaggcatctacctgatgttctataatcagacaaaaaatatcgtgccccacgatcaggtagacgcgactttgatccctatcaccaatttctcctgtggaatcttcgccggaattcttgcctcattggtcacccagcccgccgatgtaattaagactcacatgcagctgtatcctctgaagttccaatggatcggtcaggcagtaaccctgatctttaaggactacggattgagagggtttttccaggggggtataccccgggctctgcggcgcacgctgatggccgcgatggcctggaccgtctatgaggagatgatggccaagatggggctgaaatcttag

SEQ ID NO: 195526 - DNA, 915 bp, Artificial Sequence
  derived and/or modified sequence
atgatccaaaatagtcgaccttcactgctgcagccacaggacgtgggagacaccgttgaaacccttatgctgcatccagtgatcaaagcctttctgtgtgggagcatctccggaacatgcagcacacttctcttccagccactggatctgttaaagactcgattacaaacgctgcagccctcagatcacggcagccgcagagtgggaatgctagccgtattgctgaaggtggtgcgcaccgagtcactcctgggactgtggaaaggaatgagtcccagcattgttagatgcgtgcccggagtcgggatctactttggaactctgtattcccttaagcaatactttctgcggggtcatcctcccacagctttggagtctgtgatgcttggtgtaggcagtcggagcgtcgccggagtgtgcatgtcccctatcaccgttataaagactcgatatgagagcggcaagtatggctatgaaagtatctacgcggctctgcgctccatttaccactcggagggccacagagggctgttcagcggtcttacagccactctccttcgcgacgcgcctttctccggcatctacctaatgttctacaaccaaacgaaaaatatcgtgccgcatgatcaggttgatgctactttaatcccgatcacaaatttcagctgtgggatcttcgccggtatcttagcatccctagtgacacaacccgctgacgtgatcaagacccacatgcagctgtatccattaaaattccaatggattgggcaggctgtcactctgatttttaaagactatggtctgaggggatttttccagggtggaattccacgcgcattgagaaggacactaatggccgctatggcttggaccgtttatgaggaaatgatggcgaaaatgggacttaaaagttag

SEQ ID NO: 195527 - DNA, 1960 bp, Artificial Sequence
  derived and/or modified sequence
gaagcgaaatctccccttctacagagttcctccggcgcttcctccaccccgggatacacagaacctcatctcctacggtgctgaagcctgcagcagggcaggatgggcaggagagcagagccgcggagtctgcggcgcgggtgaagagcggcgcgtaattcccgcagcaagattgttccgcgcccgcagcccctggactagcaggatccgaaccccggcggctgcgtgcttataggcgcagacgtcagagagcccgcggcttaaagcgcgtcgcctggctagcgccaccccctagccttcttcaaggcctccagggctgggcccaagcgcccgtcgacggcaccctgggcccagaggactcgcgggcctcatctccaatgattcagaactcacgtccgtcgctgctgcaaccccaagatgtcggagacacggtggaaacgcttatgttacatccggtgatcaaggctttcctgtgtggctccatcagtgggacctgctctaccctccttttccaacctctggatctccttaaaacacgcctgcaaaccctccagccctcagatcatgggtctagacgtgttgggatgttggctgtactcttgaaggtggttcgcacggagagtcttttgggcctttggaaagggatgtccccttccattgtgagatgtgtccctggcgttggaatctactttggcactctctactctttgaagcagtatttcttgcgaggccatcccccaaccgccctggagtcagtcatgctgggggtgggctctcgctctgttgcaggggtctgtatgtcacctatcactgtaatcaagacgcgctatgagagtgggaaatatggctatgagagtatctacgctgccctgaggagcatctatcacagtgaggggcaccggggcctcttcagtggcctgacagcaactctccttcgagatgcgcccttctcaggaatctacctgatgttttacaaccagaccaaaaatatagtgcctcatgaccaggtggatgcaacccttattcctattacaaatttcagctgtgggatatttgctggtattctggcctcactggtaactcaacctgcggatgttatcaaaactcatatgcagctttatccactgaagtttcaatggattggccaagcagtgacacttattttcaaagactatggactacgtggcttcttccaaggtggcatcccccgagccctccgcagaactctaatggcagcaatggcgtggacggtgtatgaagagatgatggccaagatgggcctgaagtcctgaccaagagaggactgggaacgggtgaaatctgttgccctgcttggtttctgccaagggctgctgcttcttactattctgcagtaagatgaagtcctacctggaaaaccaggcagaaattgtgttgcctttgccttcagtaatccccttaaggagaaaatatatggacctgatttcagccttcagaatctccaaaagaggagtcatcaattcatagagcacactagggtgttaggagagagctttgcatactctgagaggctacttggaaaggcattttcccaggagagctctgtcaggtggctgcgcttcagccccacccctacaccacagggtctccttgggtatgttcttgggcaagcaatcacaaagccagagaagctgtaagctgcctgccgggcctgaggagctccaaccagggaagactggatgtgaggagaggagtcactgtcaccaggtcacagactgactgaggtgatggtaggatgaggaggaacagatgcccttctttaattggttctcagttaacttctcagaggctctggagaacgggacagtggctttctagcctctgaatgttccaaataaaattttttggtcttggcccctgtactgttttacctctaaattctggcatttttttttccctgcaattaaagtgctgtacttta

SEQ ID NO: 195528 - DNA, 915 bp, Artificial Sequence
  derived and/or modified sequence
atgatccagaacagcagacccagcctgctgcagccccaggacgtgggcgacaccgtggagaccctgatgctgcaccccgtgatcaaggccttcctgtgcggcagcatcagcggcacctgcagcaccctgctgttccagcccctggacctgctgaagaccagactgcagaccctgcagcccagcgaccacggcagcagaagagtgggcatgctggccgtgctgctgaaggtggtgagaaccgagagcctgctgggcctgtggaagggcatgagccccagcatcgtgagatgcgtgcccggcgtgggcatctacttcggcaccctgtacagcctgaagcagtacttcctgagaggccacccccccaccgccctggagagcgtgatgctgggcgtgggcagcagaagcgtggccggcgtgtgcatgagccccatcaccgtgatcaagaccagatacgagagcggcaagtacggctacgagagcatctacgccgccctgagaagcatctaccacagcgagggccacagaggcctgttcagcggcctgaccgccaccctgctgagagacgcccccttcagcggcatctacctgatgttctacaaccagaccaagaacatcgtgccccacgaccaggtggacgccaccctgatccccatcaccaacttcagctgcggcatcttcgccggcatcctggccagcctggtgacccagcccgccgacgtgatcaagacccacatgcagctgtaccccctgaagttccagtggatcggccaggccgtgaccctgatcttcaaggactacggcctgagaggcttcttccagggcggcatccccagagccctgagaagaaccctgatggccgccatggcctggaccgtgtacgaggagatgatggccaagatgggcctgaagagctag

SEQ ID NO: 195529 - protein, 371 aa, Artificial Sequence
  derived and/or modified sequence
MAWTKYQLFLAGLMLVTGSINTLSAKWADNFMAEGCGGSKEHSFQHPFLQAVGMFLGEFSCLAAFYLLRCRAAGQSDSSVDPQQPFNPLLFLPPALCDMTGTSLMYVALNMTSASSFQMLRGAVIIFTGLFSVAFLGRRLVLSQWLGILATIAGLVVVGLADLLSKHDSQHKLSEVITGDLLIIMAQIIVAIQMVLEEKFVYKHNVHPLRAVGTEGLFGFVILSLLLVPMYYIPAGSFSGNPRGTLEDALDAFCQVGQQPLIAVALLGNISSIAFFNFAGISVTKELSATTRMVLDSLRTVVIWALSLALGWEAFHALQILGFLILLIGTALYNGLHRPLLGRLSRGRPLAEESEQERLLGGTRTPINDAS

SEQ ID NO: 195530 - protein, 288 aa, Artificial Sequence
  derived and/or modified sequence
MGGQFHGRGLWREQGAQLPASLPPALNMTSASSFQMLRGAVIIFTGLFSVAFLGRRLVLSQWLGILATIAGLVVVGLADLLSKHDSQHKLSEVITGDLLIIMAQIIVAIQMVLEEKFVYKHNVHPLRAVGTEGLFGFVILSLLLVPMYYIPAGSFSGNPRGTLEDALDAFCQVGQQPLIAVALLGNISSIAFFNFAGISVTKELSATTRMVLDSLRTVVIWALSLALGWEAFHALQILGFLILLIGTALYNGLHRPLLGRLSRGRPLAEESEQERLLGGTRTPINDAS

SEQ ID NO: 195531 - DNA, 3898 bp, Artificial Sequence
  derived and/or modified sequence
aggagaccccgggtgacggggcccggcgccgctaactggagcgaaccccagcgtccgccgacatggcctggaccaagtaccagctgttcctggccgggctcatgcttgttaccggctccatcaacacgctctcggcaaaatgggcggacaatttcatggccgagggctgtggagggagcaaggagcacagcttccagcatcccttcctccaggcagtgggcatgttcctgggagaattctcctgcctggctgccttctacctcctccgatgcagagctgcagggcaatcagactccagcgtagacccccagcagcccttcaaccctcttcttttcctgcccccagcgctctgtgacatgacagggaccagcctcatgtatgtggctctgaacatgaccagtgcctccagcttccagatgctgcggggtgcagtgatcatattcactggcctgttctcggtggccttcctgggccggaggctggtgctgagccagtggctgggcatcctagccaccatcgcggggctggtggtcgtgggcctggctgacctcctgagcaagcacgacagtcagcacaagctcagcgaagtgatcacaggggacctgttgatcatcatggcccagatcatcgttgccatccagatggtgctagaggagaagttcgtctacaaacacaatgtgcacccactgcgggcagttggcactgagggcctctttggctttgtgatcctctccctgctgctggtgcccatgtactacatccccgccggctccttcagcggaaaccctcgtgggacactggaggatgcattggacgccttctgccaggtgggccagcagccgctcattgccgtggcactgctgggcaacatcagcagcattgccttcttcaacttcgcaggcatcagcgtcaccaaggaactgagcgccaccacccgcatggtgttggacagcttgcgcaccgttgtcatctgggcactgagcctggcactgggctgggaggccttccatgcactgcagatccttggcttcctcatactccttataggcactgccctctacaatgggctacaccgtccgctgctgggccgcctgtccaggggccggcccctggcagaggagagcgagcaggagagactgctgggtggcacccgcactcccatcaatgatgccagctgaggttccctggaggcttctactgccacccgggtgctccttctccctgagactgaggccacacaggctggtgggccccgaatgccctatccccaaggcctcaccctgtcccctccctgcagaacccccagggcagctgctgccacagaagataacaacacccaagtcctctttttctcactaccacctgcagggtggtgttacccagcccccacaagcctgagtgcagtggcagacctcagctctctggacccctcctacagcactagagctaaatcatgaagttgaattgtaggaatttaccaccgtagtgtatctgaatcataaactagattatcatagttatctagtttatgagtcataagctagatttgattcttcaaagaagaaaagtcagtgagcaaatttaaaccagaactaagcattatattttctttttttttttttgagacagagtctcgctctgtcgcccaggctggagtgcagtggcacgatctcggcggctcactacaacctctgcctcccaggttcaaatgattctcctgcctcagcctcccgagtagctgggattacaggtgcataacacacctgggtaacttttatagagatggggtttcaccatgttggccaggctggtctcaaactcctgacctcaggtgatctgcctgcctcggcctcccaaagtgctgggattacaggcgtgagacaccacacccagccataactaagcattatgttttctaaaacttctaagatcctccctaaacccgtctggagacatgggttttagcccagactctgcctcaaactcattgtagctcccagcacattacccagttgctctgggccttggtgttatgctctgggaagtagatgttgatgctgtggccttagtgccttctggccccagcattccatgggcctgtgatcttgaccaacctgagaaaacagtaacagcccatccactggaaatacccctctgcccacagcaccacccttctgtgctgttttttttgttgtttgtttgtttcttctttttgagacagagtcttgctctgttgccacgctggagtgcagtggtgtgatctcggctcactgcaacctcccgctcccaggttcaagcaagtcccctgagtagctgggactacaggcgtgtgccaccacatccggctaattttttgcattctttaatagagacggggttttgccatgttggccaggatggtctcaatctcctgacctcatgatccacctgcctcagcctcccaaagtgctggggttacaggcatgagccaccacgcccagccttttttttttttttttttttttcttgagagacagggtcttgctctgtcacccaggcacagcttactgcagccttgaactcctgggatcaatcagtcctcctgcctcagcctcccgagtagctaagactaacaggtatgtaccaccatgcctggtttattgttttatttttttggcagagatgggtctcactgtgttgcccaggctgatctcaaactcctggcctcaagcgatcctcccatctcagcctcccaaagtgctgggattacagacctgagccaccacacctgggcaacagagtgaaacctgtccctgttttcctgctcttactctcacctctgaggcctcctctgcctggaagagattacagggaaattccaggcagcccttgtcaattgtttttatgaattctttacctgttccttttaaagacaaggaaactgaggcccaaagttctaagttgtttggcaaatggagtctcctaccctcagctcctgcaaggacctgggggacccccaggtccagcagccacatgattctgcagcagacagggacctagagcacatctggatctcagccccacccctggcaacctgcctgcctagagaactcccaagatgacagactaagtaggattctgccatttagaataattctggtatcctgggcgttgcgttaagttgcttaactttcattctgtcttacgatagtcttcagaggtgggaacagatgaagaaaccatgccccagagaaggttaagtgacttcctctttatggagccagtgttccaacctaggtttgcctgataccagacctgtggccccacctcccatgcaggtctctgtggggtctttgggatggatctcctagggctgggctggaagcctcatgtactgttgtcttctaggtaaccaccctgaagagaaggggtggcatcaggaaccgcagggaaccaagcagcctttggtccagtgctgctccttggaacagttgagtgtggcctcaaaccattctcctgggtagctcagtcataaaacaccgaatgcctgcctcaaaatagcctctgagggaagggagctgttgacaagtgaagccctcaggttgtgtgggattccagcaggttattacagcttgtggggggagggagggtccattccaccagctttgaatcccagggtcccctcagcttcactgggccacagtgtctgtcccaggaagaagcaaatggacagtgaggatgatggagagactacagctgccttgtctaaaacctgggatcttaaaagtgttattttggcttttattttttaaaaaaagaaaaggaaaattggcaattgtattaatccattctcgaattgctgtaaagaaatacctgagactgggtaatttaatttataaagaaaagaggtttaattggc

SEQ ID NO: 195532 - DNA, 1365 bp, Artificial Sequence
  derived and/or modified sequence
ggagaccccgggtgacggggcccggcgccgctaactggagcgaaccccagcgtccgccgacatggcctggaccaagtaccagctgttcctggccgggctcatgcttgttaccggctccatcaacacgctctcggcaaaatgggcggacaatttcatggccgagggctgtggagggagcaaggagcacagcttccagcatcccttcctccagctctgaacatgaccagtgcctccagcttccagatgctgcggggtgcagtgatcatattcactggcctgttctcggtggccttcctgggccggaggctggtgctgagccagtggctgggcatcctagccaccatcgcggggctggtggtcgtgggcctggctgacctcctgagcaagcacgacagtcagcacaagctcagcgaagtgatcacaggggacctgttgatcatcatggcccagatcatcgttgccatccagatggtgctagaggagaagttcgtctacaaacacaatgtgcacccactgcgggcagttggcactgagggcctctttggctttgtgatcctctccctgctgctggtgcccatgtactacatccccgccggctccttcagcggaaaccctcgtgggacactggaggatgcattggacgccttctgccaggtgggccagcagccgctcattgccgtggcactgctgggcaacatcagcagcattgccttcttcaacttcgcaggcatcagcgtcaccaaggaactgagcgccaccacccgcatggtgttggacagcttgcgcaccgttgtcatctgggcactgagcctggcactgggctgggaggccttccatgcactgcagatccttggcttcctcatactccttataggcactgccctctacaatgggctacaccgtccgctgctgggccgcctgtccaggggccggcccctggcagaggagagcgagcaggagagactgctgggtggcacccgcactcccatcaatgatgccagctgaggttccctggaggcttctactgccacccgggtgctccttctccctgagactgaggccacacaggctggtgggccccgaatgccctatccccaaggcctcaccctgtcccctccctgcagaacccccagggcagctgctgccacagaagataacaacacccaagtcctctttttctcactaccacctgcagggtggtgttacccagcccccacaagcctgagtgcagtggcagacctcagctctctggacccctcctacagcactagagctaaatcatgaagttgaattgtaggaatttaccaccgtagtgtatctgaatcataaactagattatcatagttatctagtttatgagtcata

SEQ ID NO: 195533 - DNA, 1116 bp, Artificial Sequence
  derived and/or modified sequence
atggcctggaccaagtaccagctgttcctggccggcctgatgctggtgaccggcagcatcaacaccctgagcgccaagtgggccgacaacttcatggccgagggctgcggcggcagcaaggagcacagcttccagcaccccttcctgcaggccgtgggcatgttcctgggcgagttcagctgcctggccgccttctacctgctgagatgcagagccgccggccagagcgacagcagcgtggacccccagcagcccttcaaccccctgctgttcctgccccccgccctgtgcgacatgaccggcaccagcctgatgtacgtggccctgaacatgaccagcgccagcagcttccagatgctgagaggcgccgtgatcatcttcaccggcctgttcagcgtggccttcctgggcagaagactggtgctgagccagtggctgggcatcctggccaccatcgccggcctggtggtggtgggcctggccgacctgctgagcaagcacgacagccagcacaagctgagcgaggtgatcaccggcgacctgctgatcatcatggcccagatcatcgtggccatccagatggtgctggaggagaagttcgtgtacaagcacaacgtgcaccccctgagagccgtgggcaccgagggcctgttcggcttcgtgatcctgagcctgctgctggtgcccatgtactacatccccgccggcagcttcagcggcaaccccagaggcaccctggaggacgccctggacgccttctgccaggtgggccagcagcccctgatcgccgtggccctgctgggcaacatcagcagcatcgccttcttcaacttcgccggcatcagcgtgaccaaggagctgagcgccaccaccagaatggtgctggacagcctgagaaccgtggtgatctgggccctgagcctggccctgggctgggaggccttccacgccctgcagatcctgggcttcctgatcctgctgatcggcaccgccctgtacaacggcctgcacagacccctgctgggcagactgagcagaggcagacccctggccgaggagagcgagcaggagagactgctgggcggcaccagaacccccatcaacgacgccagctag

SEQ ID NO: 195534 - DNA, 867 bp, Artificial Sequence
  derived and/or modified sequence
atgggcggccagttccacggcagaggcctgtggagagagcagggcgcccagctgcccgccagcctgccccccgccctgaacatgaccagcgccagcagcttccagatgctgagaggcgccgtgatcatcttcaccggcctgttcagcgtggccttcctgggcagaagactggtgctgagccagtggctgggcatcctggccaccatcgccggcctggtggtggtgggcctggccgacctgctgagcaagcacgacagccagcacaagctgagcgaggtgatcaccggcgacctgctgatcatcatggcccagatcatcgtggccatccagatggtgctggaggagaagttcgtgtacaagcacaacgtgcaccccctgagagccgtgggcaccgagggcctgttcggcttcgtgatcctgagcctgctgctggtgcccatgtactacatccccgccggcagcttcagcggcaaccccagaggcaccctggaggacgccctggacgccttctgccaggtgggccagcagcccctgatcgccgtggccctgctgggcaacatcagcagcatcgccttcttcaacttcgccggcatcagcgtgaccaaggagctgagcgccaccaccagaatggtgctggacagcctgagaaccgtggtgatctgggccctgagcctggccctgggctgggaggccttccacgccctgcagatcctgggcttcctgatcctgctgatcggcaccgccctgtacaacggcctgcacagacccctgctgggcagactgagcagaggcagacccctggccgaggagagcgagcaggagagactgctgggcggcaccagaacccccatcaacgacgccagctag

SEQ ID NO: 195535 - DNA, 1116 bp, Artificial Sequence
  derived and/or modified sequence
atggcgtggactaagtaccaacttttcttggccgggctcatgctggtcacaggttccataaatactctgtcagcgaaatgggctgataatttcatggcagaaggatgcggtgggagcaaagagcactctttccaacacccgtttctgcaggctgtcggtatgttcttaggcgaatttagttgtctggccgcattctacctgctgaggtgtcgagctgctggacaatccgactctagtgtagatcctcaacagccattcaacccactgctgtttttgccacccgctctgtgcgacatgacaggcacatcccttatgtatgtagcactcaacatgacttcagcctcttcgttccagatgctgcggggggctgtgattatatttaccggattgttcagtgtggccttcctcggccggagactggtgctgagtcagtggctgggtattctcgccaccattgccggtttagttgtagtcggcctggcagaccttctgtcgaagcacgacagccagcataagttaagcgaggtgatcacaggcgatttgctcattatcatggcccagatcattgtggccatacagatggttttggaagaaaagtttgtttacaaacataacgtccaccccttgcgggcggtagggacagaagggctgtttgggttcgtaatcctgtcactactcctggtccctatgtattacatccctgctggaagtttttctggaaatccacgcggaacccttgaagacgctcttgacgcattttgccaagtcgggcagcaaccactgatcgccgtggcgctgctcggcaacatctcaagcatagcctttttcaattttgctggcatcagcgtcaccaaggaactcagcgctaccactaggatggtgctggacagtctcagaaccgtggtcatttgggcgctatctttggcattgggttgggaggcttttcacgcccttcagatattggggtttttgatactactcatcggaaccgccctgtataacgggctccatagaccactgcttggacggctgtcccgcggtcggccgctcgctgaggaaagcgaacaggagcgtctcctcggcgggacacgcaccccgataaacgatgcaagctag

SEQ ID NO: 195536 - DNA, 867 bp, Artificial Sequence
  derived and/or modified sequence
atgggggggcagttccatggccgtgggctatggcgcgaacagggggctcagctgcctgcctcactgccccctgccttgaacatgacctcagctagttcatttcagatgctcaggggagccgtgatcatcttcaccggcctctttagtgttgcattcctggggcgaaggctggtcctgtcacagtggctcggcattctcgccaccattgcaggactggtcgtggttggtctggctgacctccttagcaaacatgattctcaacataaactttccgaggttatcacaggagatctgctgattattatggcccagatcattgttgcgattcagatggttctggaggagaagtttgtgtataagcacaacgttcatccacttagggctgtgggcacagagggactctttgggtttgtgattctgagcctacttttggtgccgatgtattacattcctgctggatcattctccgggaaccctaggggcaccctcgaggatgcgctggacgctttttgccaggtgggccagcagccgcttattgccgtggcattactcggcaacattagtagcattgctttttttaattttgcaggcatcagcgtgaccaaggagttgagcgctaccactcgcatggtattggattctctacgaacggtcgtcatctgggcccttagtcttgccttagggtgggaggccttccacgccttgcaaatcctaggattccttattctccttattgggacagcattgtataacggccttcaccgccctttgctcgggcgcctctccaggggccgcccactggcagaagagtccgaacaggagcggctgctggggggtacgaggacacctattaatgatgcatcatag

SEQ ID NO: 195537 - DNA, 1116 bp, Artificial Sequence
  derived and/or modified sequence
atggcctggaccaagtaccagctgttcctggccggcctgatgctggtgacaggcagcatcaacaccctgagcgccaagtgggccgacaacttcatggccgagggctgcggcggcagcaaggagcacagcttccagcaccccttcctgcaggccgtgggcatgttcctgggggagttcagctgcctggccgccttctacctgctgcgctgcagagctgctggccagagcgacagctctgtggacccccagcagcccttcaaccccctgctcttcctgcccccagccctgtgtgacatgacaggcaccagcctgatgtatgtggccctgaacatgaccagcgccagcagcttccagatgctgcggggagctgtgatcatcttcaccggcctcttctctgtggccttcctgggccggcggctggtgctgagccagtggctgggcatcctggccaccatcgccggcctggtggtggtgggcctggccgacctgctgagcaagcatgacagccagcacaagctgtctgaggtgatcaccggggacctgctgatcatcatggcccagatcatcgtggccatccagatggtgctggaggagaagtttgtgtacaagcacaacgtgcaccccctgcgggctgtgggcacagagggcctgtttggcttcgtcatcctgagcctgctgctggtgcccatgtactacatcccagctggcagcttcagcggcaacccccggggcaccctggaggatgccctggatgccttctgccaggtgggccagcagcccctgattgctgtggccctgctgggcaacatcagcagcatcgccttcttcaactttgctggcatctctgtgaccaaggagctgagcgccaccaccaggatggtgctggacagcctgaggacagtggtgatctgggccctgagcctggccctgggctgggaggccttccacgccctgcagatcctgggcttcctgatcctgctgattggaacagccctgtacaacggcctgcaccggcccctgctgggccgcctgagccggggccggcccctggccgaggagagcgagcaggagcggctgctgggcggcaccaggacccccatcaatgatgccagctag

SEQ ID NO: 195538 - DNA, 867 bp, Artificial Sequence
  derived and/or modified sequence
atgggcggccagttccacggccggggcctgtggagggagcagggcgcccagctgcctgccagcctgcccccagccctgaacatgaccagcgccagcagcttccagatgctgcggggggccgtcatcatcttcaccggcctcttctctgtggccttcctgggccgccgcctggtgctgagccagtggctgggcatcctggccaccatcgccggcctggtggtggtgggcctggccgacctgctgagcaagcatgacagccagcacaagctgtctgaggtgatcactggagacctgctgatcatcatggcccagatcatcgtggccatccagatggtgctggaggagaagtttgtgtacaagcacaacgtgcaccccctgcgggctgtgggcacagagggcctgtttggatttgtgatcctgagcctgctgctggtgcccatgtactacatcccagctggcagcttcagcggcaacccccggggcaccctggaggatgccctggatgccttctgccaggtgggccagcagcccctgattgctgtggccctgctgggcaacatcagcagcatcgccttcttcaactttgctggcatctctgtgaccaaggagctgagcgccaccaccaggatggtgctggacagcctgaggacagtggtgatctgggccctgagcctggccctgggctgggaggccttccacgccctgcagatcctgggcttcctgatcctgctgattggaacagccctgtacaacggcctgcaccggcccctgctgggccgcctgagccggggccggcccctggccgaggagagcgagcaggagcggctgctgggcggcaccaggacccccatcaatgatgccagctag

SEQ ID NO: 195539 - DNA, 1116 bp, Artificial Sequence
  derived and/or modified sequence
atggcctggaccaagtaccagctgttcctggccggcctgatgctggtcaccgggtccatcaacacattgtccgcaaagtgggcagataactttatggcagagggctgcggagggagtaaagaacattctttccagcacccctttttgcaagccgtgggcatgtttctgggcgaattcagttgtttggctgccttctatctgttgaggtgccgcgctgcaggacagtccgattctagcgtggatccacagcagccatttaatcctcttctgtttctaccgcctgcgctgtgcgacatgacaggaacctcactgatgtacgtggctctgaacatgacttctgcttcctcctttcagatgcttcggggcgccgtgataatctttacaggactcttttccgtggcctttctggggaggcgactggtgctgtcccagtggctggggatcctggccacaatcgccggcctcgtcgtggtcgggctggcggacctcttgagtaagcacgatagccagcacaaactcagcgaagttatcactggcgatctactgatcattatggctcaaattatcgtggctattcagatggtcctcgaggagaagtttgtctataagcataacgttcaccctctgcgggctgttggaacagagggcctttttgggttcgtgattctcagccttctactggtgcccatgtactacatcccggcaggatcctttagtggcaaccctaggggaacactggaggatgcacttgatgctttctgtcaagttggacaacaaccactgattgctgtggctctactaggcaatattagctctattgcctttttcaattttgctggcatctcagtgactaaggagctgtctgcgaccactcgcatggttctagactctctgagaacagtggtcatttgggcattgtccttggctctcgggtgggaagcgtttcacgccctgcagatcctcggctttttgattctgctcattggaaccgcgctatataatgggctgcaccggccattgctggggcgcctttcccgggggagacccctagctgaggagtctgaacaagagcgcctgttgggagggacacgcacccctattaacgatgcaagctag

SEQ ID NO: 195540 - DNA, 867 bp, Artificial Sequence
  derived and/or modified sequence
atgggcggccagttccacggccggggcctgtggcgggagcagggcgcccagcttcctgccagtctgcctccagcattaaacatgacatccgcctcctcattccaaatgttaagaggtgcggtgatcatcttcactggactcttctctgtggcattcctggggagacgattagtgttgtcccagtggcttgggatcctggctaccatagctggactcgtcgttgtgggcctcgcagatctgctgtcaaagcatgattcccagcataagcttagtgaggttatcacaggcgaccttctcattatcatggcacagattatcgtggccatacagatggttctggaggaaaagttcgtgtacaaacataatgtgcaccccctccgcgctgttgggactgagggcctgtttggctttgtgatccttagtctgctattggtgccaatgtattatatacccgcaggttccttcagcggaaacccacggggcactctggaggatgccttagatgccttctgccaggtcgggcagcagccgttaattgctgtggcactgttgggcaacataagctccattgcgtttttcaattttgccgggattagtgtgactaaggagctgtctgccacaacgagaatggtgctggattccctacgaaccgtggtgatctgggccctgtcactcgctctaggatgggaggctttccacgccctgcagatcttgggattcctcatacttctgatcggcacggcactttacaatggcctccaccgccccctactgggacgccttagccgaggacgacccttagctgaggaaagtgagcaggagcgactgttgggcgggactaggacacctattaacgatgcttcctag

SEQ ID NO: 195541 - DNA, 1116 bp, Artificial Sequence
  derived and/or modified sequence
atggcgtggactaaataccagctctttctggccggactcatgctggttaccggatcgatcaacacactctccgctaaatgggcggataatttcatggccgagggctgtggtgggagcaaggagcatagtttccagcacccgttcctgcaggccgtgggaatgttcttaggtgaattctcatgtctggccgcattttacctgttgcgctgccgcgcagcaggccagtctgactcttctgtcgacccacaacagccctttaacccgttactctttttacctccagccctgtgcgatatgactggaactagcttaatgtacgtggctttaaatatgaccagcgcttcttctttccagatgttgcggggagcagtgatcatcttcacaggactgttcagcgtcgcttttttagggagaaggctggtgctgtcccagtggttagggatcttagctacgattgcgggtctggttgttgtgggccttgccgacctcctgagtaagcatgacagccagcacaaattgtctgaagtcataacaggagacctgctgatcataatggcccaaattattgtggccatacagatggtcctggaagagaaattcgtgtacaaacataatgtgcatccactccgcgcagtcggcactgagggcctcttcggcttcgtcatactgtcactgttgctcgtccctatgtattatattccagctgggagcttcagtgggaaccctcgcggaacacttgaagacgccctcgatgctttctgccaagtggggcagcaaccccttatcgcggttgccctgctggggaacatcagttccatagctttcttcaacttcgccggtataagtgtcacgaaagaactctccgcgacgacccgcatggttctcgacagcttgcgaacagtcgtcatttgggccctcagcctagccctggggtgggaggcctttcacgcattacaaatcttgggttttctgattctgctgatcggcactgccctgtacaatggcctccaccgaccactactgggccgactgtcgcggggtcgaccacttgctgaggagtccgaacaagagcgtcttctgggcggtaccagaacacctataaatgatgccagctag

SEQ ID NO: 195542 - DNA, 867 bp, Artificial Sequence
  derived and/or modified sequence
atgggcggacagtttcacggaaggggtctatggcgagagcagggcgctcagctgccagcttctctgcctcccgctcttaatatgacgagcgcgtcgtcttttcagatgctccggggtgccgtcattatatttaccggtcttttttcggtcgcctttcttggaagaaggctcgtgctctcacagtggcttggcatccttgctaccatcgccggtttggttgtggtcggcctagccgacctgttgtccaaacacgattcacaacataagctgagtgaagtcattaccggcgacctgctgatcattatggcccagattatagtcgccattcagatggtgctcgaggaaaaattcgtgtacaagcataatgtgcaccccctgcgcgctgtcggaactgaaggattgtttggatttgtaatcctgagcttactgctggttcccatgtactatatccctgctggatctttctcgggcaatccacgaggaacactcgaggacgcactggatgccttttgccaagtggggcagcaaccgcttattgctgtcgccctgctggggaacataagcagcatcgccttctttaactttgccggaatcagtgtcaccaaggaactgagcgcaactaccaggatggtactggattctctgagaactgtagtgatttgggccctcagcttggccctgggctgggaagcttttcatgccctgcagatcttaggcttcctgatcttgctcatcggaaccgctctatataatggcctccatagaccactcctcgggaggctgtcgcgcggacgccctctggcagaagaatccgagcaggaacgcctgttgggcggaactagaacgcccatcaacgacgccagttag

SEQ ID NO: 195543 - protein, 311 aa, Artificial Sequence
  derived and/or modified sequence
MEATRRRQHLGATGGPGAQLGASFLQARHGSVSADEAARTAPFHLDLWFYFTLQNWVLDFGRPIAMLVFPLEWFPLNKPSVGDYFHMAYNVITPFLLLKLIERSPRTLPRSITYVSIIIFIMGASIHLVGDSVNHRLLFSGYQHHLSVRENPIIKNLKPETLIDSFELLYYYDEYLGHCMWYIPFFLILFMYFSGCFTASKAESLIPGPALLLVAPSGLYYWYLVTEGQIFILFIFTFFAMLALVLHQKRKRLFLDSNGLFLFSSFALTLLLVALWVAWLWNDPVLRKKYPGVIYVPEPWAFYTLHVSSRH

SEQ ID NO: 195544 - protein, 182 aa, Artificial Sequence
  derived and/or modified sequence
MRLPARLPSTSTSGSTSHCRTGFWTLGVPLPCWYSLSSGFHSTSPVLGTTSTWPTTSSRPFSCSSGCFTASKAESLIPGPALLLVAPSGLYYWYLVTEGQIFILFIFTFFAMLALVLHQKRKRLFLDSNGLFLFSSFALTLLLVALWVAWLWNDPVLRKKYPGVIYVPEPWAFYTLHVSSRH

SEQ ID NO: 195545 - protein, 343 aa, Artificial Sequence
  derived and/or modified sequence
MAAVAGKERRARGRPRPETLGAIPRREGGEAGLSRAFKPLAQAPLSCETSLRKLKFKGKKHGSVSADEAARTAPFHLDLWFYFTLQNWVLDFGRPIAMLVFPLEWFPLNKPSVGDYFHMAYNVITPFLLLKLIERSPRTLPRSITYVSIIIFIMGASIHLVGDSVNHRLLFSGYQHHLSVRENPIIKNLKPETLIDSFELLYYYDEYLGHCMWYIPFFLILFMYFSGCFTASKAESLIPGPALLLVAPSGLYYWYLVTEGQIFILFIFTFFAMLALVLHQKRKRLFLDSNGLFLFSSFALTLLLVALWVAWLWNDPVLRKKYPGVIYVPEPWAFYTLHVSSRH

SEQ ID NO: 195546 - DNA, 936 bp, Artificial Sequence
  derived and/or modified sequence
atggaggcaactcggagacggcagcacctgggggccactggaggtcccggtgctcagctgggggcttccttcctgcaggcaaggcacggcagtgtttcagccgacgaggcagctcgcacggcaccgttccacctcgatctgtggttttacttcacccttcaaaactgggtgcttgatttcgggcgacctatcgccatgttggtgttcccccttgaatggttccctctcaacaaacccagcgtcggcgattacttccacatggcctacaacgtgataactccatttctgctgctcaaattaatagaacggtcccctcggaccctgccaagaagtattacttatgtcagtatcattattttcattatgggcgccagcatccatcttgtcggagactccgtgaatcatcgacttctgttttcagggtaccaacaccacctctccgtcagggaaaatcccataataaagaacctgaagcccgagaccctgatcgactctttcgagctcctctactactacgatgaatatctgggacactgcatgtggtacatcccattctttctcatcctattcatgtacttttcagggtgttttactgccagtaaagccgaatcccttatcccggggcctgccctactacttgttgccccctctggcctctactattggtatctggtaactgaaggccagattttcatactgttcatctttacgttcttcgcaatgctcgccctcgttctgcaccagaaaaggaaaaggctcttcctggacagcaacggcctcttcttattctccagcttcgctctcactctgctgttggttgccctgtgggtggcctggctgtggaacgaccctgtccttaggaaaaaataccctggtgtcatctacgtgccagagccatgggccttctacacactgcatgtgtcttcccgccactag

SEQ ID NO: 195547 - DNA, 549 bp, Artificial Sequence
  derived and/or modified sequence
atgaggttacccgcgagattgcccagcaccagtacgagtggaagcacctctcactgtaggactggattctggaccctgggagttccgctcccgtgctggtatagcttgtcaagtggcttccatagcacctcgcccgtgctaggaacgacaagtacgtggccaactacatcatcaaggccatttagctgtagctcggggtgcttcaccgcatcaaaagccgaatctctgattcccggacccgcccttctcctggttgcccctagcggtttatattattggtacctggttacagaaggccaaattttcatcttgttcattttcacgttcttcgccatgctggctctggtacttcaccaaaagcgaaagaggctctttctggacagcaatggactgttcttgttctcctcatttgccctgaccctgttgctggtcgccctctgggtggcttggttatggaatgacccggtgctgagaaagaagtatcccggggtgatttatgttcctgaaccatgggcattttataccttacacgtaagttcccgacactag

SEQ ID NO: 195548 - DNA, 1032 bp, Artificial Sequence
  derived and/or modified sequence
atggcggcggtggccggaaaggaaaggagggcacgaggtcgtccgcggcccgaaacactaggggccatcccacggagggagggaggggaagctgggctgagtcgagctttcaagcctctggcccaggcgccactgtcctgcgaaacatctttgaggaagctgaagttcaagggcaagaagcacgggtcagtttcagctgacgaggctgcaagaacagcacccttccacctcgacctgtggttttatttcaccctgcaaaattgggttttggattttggaaggccaatagcaatgctggtgtttcctctggaatggttccccctcaacaagcccagcgtaggagactacttccacatggcttacaacgtgattacccccttccttctcctcaagctgattgagaggtctccacggaccctgccccggagcattacatacgtaagcataattatcttcattatgggtgcatctattcacctcgtgggcgacagcgtgaatcaccgactcctattcagcggataccagcatcacctctccgtccgggagaaccctattattaagaatttaaagcccgaaaccctgatcgacagcttcgaattgctgtattattatgacgagtacctcggccattgtatgtggtacattccattcttcctgatccttttcatgtacttctccggatgcttcaccgcttcaaaagccgaatccttgatccccggccccgccttgttgctggtggccccttccggtctttattactggtatctagtcactgagggacagatcttcattctgttcatatttaccttttttgctatgctggcattggttctccatcagaagcgtaagagactttttcttgacagtaacggcctcttcctgttctcgtcattcgcgttaacccttctcctggtcgccctgtgggtggcatggctgtggaacgatcccgtcctccgaaaaaaataccccggcgtcatatacgtccccgagccttgggctttttacacacttcatgtctctagtcgccattag

SEQ ID NO: 195549 - DNA, 936 bp, Artificial Sequence
  derived and/or modified sequence
atggaggccacccggcggcggcagcacctgggcgccactggaggccctggggcccagctgggcgccagcttcctgcaggcccggcacggctctgtgtctgcagatgaagctgccaggacagcccccttccacctggacctgtggttctacttcaccctgcagaactgggtgctggactttggccggcccatcgccatgctggtgttccccctggagtggttccccctgaacaagcccagcgtgggggactacttccacatggcctacaacgtcatcacccccttcctgctgctgaagctgattgaaagaagccccaggaccctgcccaggagcatcacctacgtgtccatcatcatcttcatcatgggcgccagcatccacctggtgggggacagcgtgaaccaccggctgctcttcagcggctaccagcaccacctgtctgtgcgggagaaccccatcatcaagaacctgaagccagagaccctgattgacagctttgagctgctgtactactatgatgagtacctgggccactgcatgtggtacatccccttcttcctgatcctcttcatgtacttcagcggctgcttcaccgccagcaaggccgagagcctcatccctggccctgccctgctgctggtggcccccagcggcctgtactactggtacctggtgacagagggccagatcttcatcctcttcatcttcaccttctttgccatgctggccctggtgctgcaccagaagaggaagaggctcttcctggacagcaatggcctcttcctgttcagcagctttgccctgaccctgctgctggtggccctgtgggtggcctggctgtggaatgaccctgtgctgaggaagaagtacccaggagtcatctacgtgcctgagccctgggccttctacaccctgcacgtgagcagccgccactag

SEQ ID NO: 195550 - DNA, 549 bp, Artificial Sequence
  derived and/or modified sequence
atgaggctgcctgcccggctgcccagcaccagcaccagcggcagcaccagccactgcaggacaggcttctggaccctgggcgtgcccctgccctgctggtacagcctgagcagcggcttccacagcaccagccctgtgctgggcaccaccagcacctggcccaccaccagcagccggcccttcagctgcagcagcggctgcttcaccgccagcaaggccgagagcctcatccctggccctgccctgctgctggtggcccccagcggcctgtactactggtacctggtgacagagggccagatcttcatcctcttcatcttcaccttctttgccatgctggccctggtgctgcaccagaagaggaagaggctcttcctggacagcaatggcctcttcctgttcagcagctttgccctgaccctgctgctggtggccctgtgggtggcctggctgtggaatgaccctgtgctgaggaagaagtacccaggagtcatctacgtgcctgagccctgggccttctacaccctgcacgtgagcagccgccactag

SEQ ID NO: 195551 - DNA, 1032 bp, Artificial Sequence
  derived and/or modified sequence
atggctgctgtggccggcaaggagcggcgggcccggggccggcccaggcctgagaccctgggcgccatcccccggcgggagggcggggaggccggcctgagccgggccttcaagcccctggcccaggcccccctgagctgtgagaccagcctgaggaagctgaagttcaagggcaagaagcacggctctgtgtctgcagatgaagctgccaggacagcccccttccacctggacctgtggttctacttcaccctgcagaactgggtgctggactttggccggcccatcgccatgctggtgttccccctggagtggttccccctgaacaagcccagcgtgggggactacttccacatggcctacaacgtcatcacccccttcctgctgctgaagctgattgaaagaagccccaggaccctgcccaggagcatcacctacgtgtccatcatcatcttcatcatgggcgccagcatccacctggtgggggacagcgtgaaccaccggctgctcttcagcggctaccagcaccacctgtctgtgcgggagaaccccatcatcaagaacctgaagccagagaccctgattgacagctttgagctgctgtactactatgatgagtacctgggccactgcatgtggtacatccccttcttcctgatcctcttcatgtacttcagcggctgcttcaccgccagcaaggccgagagcctcatccctggccctgccctgctgctggtggcccccagcggcctgtactactggtacctggtgacagagggccagatcttcatcctcttcatcttcaccttctttgccatgctggccctggtgctgcaccagaagaggaagaggctcttcctggacagcaatggcctcttcctgttcagcagctttgccctgaccctgctgctggtggccctgtgggtggcctggctgtggaatgaccctgtgctgaggaagaagtacccaggagtcatctacgtgcctgagccctgggccttctacaccctgcacgtgagcagccgccactag

SEQ ID NO: 195552 - DNA, 936 bp, Artificial Sequence
  derived and/or modified sequence
atggaggccacccggcggcggcagcacctgggcgccaccggcggcccgggggctcagctgggtgcttcttttttacaggcccggcatggatccgtgtctgctgacgaagctgcgcggacagctccctttcacttggacctgtggttctacttcaccctgcagaactgggttctcgattttggcaggcccattgccatgctggtgtttccactggagtggttcccactgaataaaccaagcgtgggtgactacttccacatggcttacaacgtcatcacaccctttctgctgctgaaactgatcgagcgttctccccgtaccctgccaaggagtatcacatatgtgtccatcataatttttatcatgggggctagtatacatcttgtgggcgactcggtgaatcacaggctgctctttagtggttaccagcatcacctctcagtcagagaaaacccaatcatcaaaaaccttaaacccgaaactctcatagacagcttcgaactgctttattattatgatgagtacttggggcattgcatgtggtacatcccattctttctgattctctttatgtacttcagcgggtgctttaccgcctctaaggccgagagtcttatcccagggcccgcactgctcctcgtggcgccatccggcctgtactattggtatctcgtcacagagggccagatctttatcctgtttatcttcacgttttttgcgatgttagcgctagtcctgcatcagaaacggaagcggttgtttctcgattccaacggactgttcttgttcagctccttcgcccttaccttgctcctcgtggctctctgggtggcttggctgtggaatgatcccgttctacggaagaagtatcccggagtcatttacgttcctgagccttgggcattctacaccttacatgtgagttctcggcactag

SEQ ID NO: 195553 - DNA, 549 bp, Artificial Sequence
  derived and/or modified sequence
atgcggctgcccgcccggctgcccagcaccagcaccagcggcagcacttctcattgtcgaacgggcttctggacattaggtgtgccactaccatgttggtatagcctttccagcgggtttcactccacaagtccggtgttaggcactacttcgacctggcccacaaccagctcaaggccatttagctgtagttcagggtgctttaccgctagcaaagctgagtctctgatccctggacccgcactgctgctggtggcaccttcgggactttattactggtatcttgtcacagaggggcagatttttattctcttcatctttacattttttgccatgctggcacttgtgcttcaccagaaaaggaagcgcttgtttctggattcaaacgggctattcttattcagcagttttgcactcacgctgctgctggtagccttgtgggtagcatggctatggaatgaccctgtactgcgtaaaaaataccccggtgtaatctatgtcccagagccatgggcgttctatactctgcatgtatccagccggcactag

SEQ ID NO: 195554 - DNA, 1032 bp, Artificial Sequence
  derived and/or modified sequence
atggccgccgtggccggcaaggagcggcgggcccggggccggccccggcccgagacgcttggagcgattccgaggcgggagggtggcgaggccgggctttcgagagcttttaaacccctcgcccaggcacccctcagctgcgagacctccctgcgcaagttaaagttcaaagggaagaagcacggcagcgtgagcgccgatgaggctgcgcgcactgctccattccacctggacttgtggttttattttactctgcaaaactgggtgctggactttggacgaccaatcgcaatgctggtatttcctttggaatggttcccactcaataaaccttctgtgggagactacttccacatggcctacaacgtcatcacacctttcctgctgctgaaactgatcgaacgaagccccaggaccctcccccggagcatcacctacgtgagcataataatcttcatcatgggagccagtatccacttggtaggggacagcgtgaatcatagactgctgttctcaggatatcagcatcacctcagtgttcgtgagaaccctatcatcaagaatctgaaaccagagactctgattgattcgtttgaactgttatactactatgatgaatatctagggcattgcatgtggtacatccctttctttctgatcctgttcatgtatttcagcggatgctttactgcctccaaagccgagtccttaattcctggccccgcccttctcttggtggcaccatcaggcctgtactattggtacctggtgaccgagggccaaatctttatactgttcatcttcaccttctttgccatgctggcactcgtgctccatcagaagagaaaaaggctatttctcgatagcaatggactttttctgttcagctcctttgcactgaccctcctactggtggccctgtgggtagcctggttgtggaatgacccagtgttgagaaaaaagtatccgggtgtgatctacgttccagagccctgggcgttctatacgctccacgtttcaagtcgccattag

SEQ ID NO: 195555 - DNA, 936 bp, Artificial Sequence
  derived and/or modified sequence
atggaagcaacgcgaagaagacagcatttgggtgctacgggtgggcctggggctcaactgggcgcatccttcctgcaagccagacacggctctgtatcagccgacgaggctgcgagaaccgcaccattccacttggacttatggttctattttactttgcagaattgggtactggacttcggacggccaatcgcgatgctcgtcttccctctggagtggttccctctcaataagccttccgttggcgactatttccatatggcatataacgtaatcactcccttcttgctgcttaaattgatcgagcgttctcctaggaccctccccaggtccatcacgtatgtatcaatcataatcttcataatgggggcttctatccatttggttggcgatagtgtgaatcatagactcctgttttccggttatcagcaccaccttagcgtcagagaaaaccccatcattaaaaatcttaagcctgagactctgatcgatagcttcgagctgctctattactatgacgagtacttgggacactgcatgtggtacattccattcttccttatcctttttatgtatttctctggctgttttaccgcctctaaagcagagagcttaattcccggacctgccctccttctggttgcacctagcggtctgtactattggtacttggtgactgagggccagatcttcatcctgtttattttcacttttttcgcaatgctggcgctagtgctccatcagaagaggaagaggctctttttggattccaacggtttgttcctgttttcttcctttgcgctgactttgctgttggtggccttgtgggttgcttggctgtggaatgaccctgtgctccgaaaaaagtaccccggtgtcatttacgtcccagagccttgggcattctacacccttcacgtgtccagtcgccactag

SEQ ID NO: 195556 - DNA, 549 bp, Artificial Sequence
  derived and/or modified sequence
atgcgtctgccagcccgattacctagcacctccacatcggggtccaccagccactgccggacgggattctggaccctgggcgtcccccttccttgttggtactcgctgtccagtggtttccatagtacctctcccgttttgggcaccactagtacctggcctaccactagcagtcggcctttctcatgttccagcggatgctttactgcaagcaaagcagaatcactgatacccggacctgccctactgctggtggccccttccggcctgtactattggtacctagttaccgaaggccagatcttcattctctttattttcaccttttttgctatgttagctttggtgctacatcagaagaggaagcgcctgtttctcgactctaatggactgtttctgttttcctcattcgcactcacactgctgcttgttgccctgtgggtggcgtggctttggaatgatcccgtgctcaggaagaagtaccctggtgttatatatgtgccagagccttgggcattctacacactgcatgtgtccagtcggcattag

SEQ ID NO: 195557 - DNA, 1032 bp, Artificial Sequence
  derived and/or modified sequence
atggcagcagtggcaggcaaggagagacgcgctcgcggtaggcccagacctgagactttaggggcaatcccacgcagagagggcggtgaagcaggtctgtcccgggcattcaagccgcttgcccaagcacccctgagctgtgaaacttcattacgaaagcttaagtttaagggcaagaaacacggatcggtttccgctgatgaggccgctaggactgccccatttcatctcgacttatggttctatttcacactgcagaattgggtgctcgactttgggcgtcctattgccatgctagtgttccctttagagtggtttccactgaacaagccaagtgttggcgattacttccacatggcgtacaacgtgatcactcccttcctcctgcttaaactgatagagcgctcccccagaacactgcccagatcgattacttacgtttccatcatcatttttattatgggcgctagcatccatttggtgggggactcagttaatcaccgtctattatttagcggataccaacatcacctgtcagtgagagagaacccaattatcaagaatcttaagcctgaaacccttatcgacagcttcgaactcctctattattacgacgagtacctgggacattgcatgtggtacattccattttttttaattttgtttatgtatttctctggctgctttactgcttccaaggctgagtctctcatacctggacctgcacttctgctcgtggctccctcaggattatattactggtatctggtgacagaaggccaaatctttatcttattcatattcacttttttcgcaatgctggccctcgtcctgcaccagaaacgcaagcgtctgttcctggactctaacgggctgttcttattctcatcatttgcgttgacgctcctcctggtggccttatgggtggcttggttgtggaatgacccggtccttaggaagaagtatcctggggtcatctacgtcccagaaccttgggcattctacactttgcatgttagttctcggcattag

SEQ ID NO: 195558 - DNA, 2242 bp, Artificial Sequence
  derived and/or modified sequence
gtccgcagccccgcctgttcctcccgagggccgcgcgctctcgccggcccgccccgaaccgccccgcgctgggaatttgcggcggcctccgccggggcagccgagctgaaccggtctcttcctcggaaaggcagggccgaggggcctgcggggcagccatggaggcgacgcggaggcggcagcacctgggagcgacgggcggcccaggcgcgcagctgggcgcctccttcctgcaggccaggcatggctctgtgagcgctgatgaggctgcccgcacggctcccttccacctcgacctctggttctacttcacactgcagaactgggttctggactttgggcgtcccattgccatgctggtattccctctcgagtggtttccactcaacaagcccagtgttggggactacttccacatggcctacaacgtcatcacgccctttctcttgctcaagctcatcgagcggtccccccgcaccctgccacgctccatcacgtacgtgagcatcatcatcttcatcatgggtgccagcatccacctggtgggtgactctgtcaaccaccgcctgctcttcagtggctaccagcaccacctgtctgtccgtgagaaccccatcatcaagaatctcaagccggagacgctgatcgactcctttgagctgctctactattatgatgagtacctgggtcactgcatgtggtacatccccttcttcctcatcctcttcatgtacttcagcggctgctttactgcctctaaagctgagagcttgattccagggcctgccctgctcctggtggcacccagtggcctgtactactggtacctggtcaccgagggccagatcttcatcctcttcatcttcaccttcttcgccatgctggccctcgtcctgcaccagaagcgcaagcgcctcttcctggacagcaacggcctcttcctcttctcctccttcgcactgaccctcttgcttgtggcgctctgggtcgcctggctgtggaatgaccctgttctcaggaagaagtacccgggtgtcatctacgtccctgagccctgggctttctacacccttcacgtcagcagtcggcactgagtccctggcaccaggctctggcgctctgctgggtgggagggtgggccatggagggcatctgaatacaggagtagggggggtgtgggtgtgtaaccagagaccgagagcatgagtggggtgtgcctcgtgtgcgtggattcgtgtgtgtgtgtgtgtgtgtcttgtatatgtgtgcgcagagtgcatcattttcagactctactatttccgtcaagtttctgtttgatttggatcatctcaggatcggattctgttttagagtgtttctgggccaggatccgggcccctgccctcctctgcacctgaccacactccctactcagggctagtctgttcttcccggacatcttctggtagccgtgcaggagagggctgggtggggcagaggccaggaggggacctggtgtgtcacctgcccaccacctggctcatccctcaggcccaccctgaccctacattacataggttacgtcagcctactgtggctgttgagcaaagcatttctcctttctgggcctcatttgcactagatgggcctgtggtcccaaagtaggtcagtaggttggggttgctgacaccccttgggtgcagctttgggacagatgagtggctctgtcctgtcactgccctctccctgcctgggggctatgtgcactccagacccctgcccaggctcaggcccatgaggtatggagacaccctggcccccaggagctggaggcaccgcccactcccctggcattccagctttgcaggtgaccctcctctacccaaagctctgtccccctgctcccactccagaagaactgcggcacgcgcttcgggcagcctagccacaggctttgagcgcctgcattcctgggggctggagggtggggtgccaaaggccctgagcaaaagccagagctcctctcatcaaagcctttacaaggtgctgggcccagaggctttgccttgacagagtggcccagggtttcaagggaggaggaacctccccctacctaggacccttcctgtggggggtctacagagtcagggacagaagggaagggacccacaggaagtcacagtggtgcccagggatgtgtcagcccccagccacggggacgcgggattcaagaatgaagtaaatacagtcacagccccaa

SEQ ID NO: 195559 - DNA, 945 bp, Artificial Sequence
  derived and/or modified sequence
gaatttgcggcggcctccgccggggcagccgagctgaaccggtctcttcctcggaaaggcagggccgaggggcctgcggggcagccatggaggcgacgcggaggcggcagcacctgggagcgacgggcggcccaggcgcgcagctgggcgcctccttcctgcaggccaggcatggctctgtgagcgctgatgaggctgcccgcacggctcccttccacctcgacctctggttctacttcacactgcagaactgggttctggactttgggcgtcccattgccatgctggtattccctctcgagtggtttccactcaacaagcccagtgttggggactacttccacatggcctacaacgtcatcacgccctttctcttgctcaagcggctgctttactgcctctaaagctgagagcttgattccagggcctgccctgctcctggtggcacccagtggcctgtactactggtacctggtcaccgagggccagatcttcatcctcttcatcttcaccttcttcgccatgctggccctcgtcctgcaccagaagcgcaagcgcctcttcctggacagcaacggcctcttcctcttctcctccttcgcactgaccctcttgcttgtggcgctctgggtcgcctggctgtggaatgaccctgttctcaggaagaagtacccgggtgtcatctacgtccctgagccctgggctttctacacccttcacgtcagcagtcggcactgagtccctggcaccaggctctggcgctctgctgggtgggagggtgggccatggagggcatctgaatacaggagtagggggggtgtgggtgtgtaaccagagaccgagagcatgagtggggtgtgcctcgtgtgcgtggattcgtgtgtgtgtgtgtgtgtgtcttgtatatgtgtgcgcagagtgcatcattttcagactctactattt

SEQ ID NO: 195560 - DNA, 1343 bp, Artificial Sequence
  derived and/or modified sequence
agaagtcaggccaggtgtctctctttcccttgggcccgcggcccaaccgcatggcaccaggcagcccccagcggtattgcgacctctgcgtcagtcgcgctcagtccctagatacaggtgtgccggagaagcccagggaagggatgcgtgaccatcactacaccctgccccacgacgcggtgggacgcgcaccctgaccctccccagagccgcgcccaggaccttgcctgggcggaaaatggcagccgttgccgggaaggagcggcgagcgagaggcaggccccggccagagacactgggagccatccctaggagggagggaggcgaggcgggcttgagccgagccttcaagccactggcgcaggcgccattgtcctgtgagacttcgctgagaaaactcaaattcaaaggtaaaaagcatggctctgtgagcgctgatgaggctgcccgcacggctcccttccacctcgacctctggttctacttcacactgcagaactgggttctggactttgggcgtcccattgccatgctggtattccctctcgagtggtttccactcaacaagcccagtgttggggactacttccacatggcctacaacgtcatcacgccctttctcttgctcaagctcatcgagcggtccccccgcaccctgccacgctccatcacgtacgtgagcatcatcatcttcatcatgggtgccagcatccacctggtgggtgactctgtcaaccaccgcctgctcttcagtggctaccagcaccacctgtctgtccgtgagaaccccatcatcaagaatctcaagccggagacgctgatcgactcctttgagctgctctactattatgatgagtacctgggtcactgcatgtggtacatccccttcttcctcatcctcttcatgtacttcagcggctgctttactgcctctaaagctgagagcttgattccagggcctgccctgctcctggtggcacccagtggcctgtactactggtacctggtcaccgagggccagatcttcatcctcttcatcttcaccttcttcgccatgctggccctcgtcctgcaccagaagcgcaagcgcctcttcctggacagcaacggcctcttcctcttctcctccttcgcactgaccctcttgcttgtggcgctctgggtcgcctggctgtggaatgaccctgttctcaggaagaagtacccgggtgtcatctacgtccctgagccctgggctttctacacccttcacgtcagcagtcggcactgagtccctggcaccaggctctggcgctctgctgggtgggagggtgggccatggagggcatctgaatacaggagta

SEQ ID NO: 195561 - DNA, 936 bp, Artificial Sequence
  derived and/or modified sequence
atggaggccaccagaagaagacagcacctgggcgccaccggcggccccggcgcccagctgggcgccagcttcctgcaggccagacacggcagcgtgagcgccgacgaggccgccagaaccgcccccttccacctggacctgtggttctacttcaccctgcagaactgggtgctggacttcggcagacccatcgccatgctggtgttccccctggagtggttccccctgaacaagcccagcgtgggcgactacttccacatggcctacaacgtgatcacccccttcctgctgctgaagctgatcgagagaagccccagaaccctgcccagaagcatcacctacgtgagcatcatcatcttcatcatgggcgccagcatccacctggtgggcgacagcgtgaaccacagactgctgttcagcggctaccagcaccacctgagcgtgagagagaaccccatcatcaagaacctgaagcccgagaccctgatcgacagcttcgagctgctgtactactacgacgagtacctgggccactgcatgtggtacatccccttcttcctgatcctgttcatgtacttcagcggctgcttcaccgccagcaaggccgagagcctgatccccggccccgccctgctgctggtggcccccagcggcctgtactactggtacctggtgaccgagggccagatcttcatcctgttcatcttcaccttcttcgccatgctggccctggtgctgcaccagaagagaaagagactgttcctggacagcaacggcctgttcctgttcagcagcttcgccctgaccctgctgctggtggccctgtgggtggcctggctgtggaacgaccccgtgctgagaaagaagtaccccggcgtgatctacgtgcccgagccctgggccttctacaccctgcacgtgagcagcagacactag

SEQ ID NO: 195562 - DNA, 549 bp, Artificial Sequence
  derived and/or modified sequence
atgagactgcccgccagactgcccagcaccagcaccagcggcagcaccagccactgcagaaccggcttctggaccctgggcgtgcccctgccctgctggtacagcctgagcagcggcttccacagcaccagccccgtgctgggcaccaccagcacctggcccaccaccagcagcagacccttcagctgcagcagcggctgcttcaccgccagcaaggccgagagcctgatccccggccccgccctgctgctggtggcccccagcggcctgtactactggtacctggtgaccgagggccagatcttcatcctgttcatcttcaccttcttcgccatgctggccctggtgctgcaccagaagagaaagagactgttcctggacagcaacggcctgttcctgttcagcagcttcgccctgaccctgctgctggtggccctgtgggtggcctggctgtggaacgaccccgtgctgagaaagaagtaccccggcgtgatctacgtgcccgagccctgggccttctacaccctgcacgtgagcagcagacactag

SEQ ID NO: 195563 - DNA, 1032 bp, Artificial Sequence
  derived and/or modified sequence
atggccgccgtggccggcaaggagagaagagccagaggcagacccagacccgagaccctgggcgccatccccagaagagagggcggcgaggccggcctgagcagagccttcaagcccctggcccaggcccccctgagctgcgagaccagcctgagaaagctgaagttcaagggcaagaagcacggcagcgtgagcgccgacgaggccgccagaaccgcccccttccacctggacctgtggttctacttcaccctgcagaactgggtgctggacttcggcagacccatcgccatgctggtgttccccctggagtggttccccctgaacaagcccagcgtgggcgactacttccacatggcctacaacgtgatcacccccttcctgctgctgaagctgatcgagagaagccccagaaccctgcccagaagcatcacctacgtgagcatcatcatcttcatcatgggcgccagcatccacctggtgggcgacagcgtgaaccacagactgctgttcagcggctaccagcaccacctgagcgtgagagagaaccccatcatcaagaacctgaagcccgagaccctgatcgacagcttcgagctgctgtactactacgacgagtacctgggccactgcatgtggtacatccccttcttcctgatcctgttcatgtacttcagcggctgcttcaccgccagcaaggccgagagcctgatccccggccccgccctgctgctggtggcccccagcggcctgtactactggtacctggtgaccgagggccagatcttcatcctgttcatcttcaccttcttcgccatgctggccctggtgctgcaccagaagagaaagagactgttcctggacagcaacggcctgttcctgttcagcagcttcgccctgaccctgctgctggtggccctgtgggtggcctggctgtggaacgaccccgtgctgagaaagaagtaccccggcgtgatctacgtgcccgagccctgggccttctacaccctgcacgtgagcagcagacactag

SEQ ID NO: 195564 - protein, 328 aa, Artificial Sequence
  derived and/or modified sequence
MSMLAERRRKQKWAVDPQNTAWSNDDSKFGQRMLEKMGWSKGKGLGAQEQGATDHIKVQVKNNHLGLGATINNEDNWIAHQDDFNQLLAELNTCHGQETTDSSDKKEKKSFSLEEKSKISKNRVHYMKFTKGKDLSSRSKTDLDCIFGKRQSKKTPEGDASPSTPEENETTTTSAFTIQEYFAKRMAALKNKPQVPVPGSDISETQVERKRGKKRNKEATGKDVESYLQPKAKRHTEGKPERAEAQERVAKKKSAPAEEQLRGPCWDQSSKASAQDAGDHVQPPEGRDFTLKPKKRRGKKKLQKPVEIAEDATLEETLVKKKKKKDSK

SEQ ID NO: 195565 - DNA, 987 bp, Artificial Sequence
  derived and/or modified sequence
atgagcatgctggccgagagaagaagaaagcagaagtgggccgtggacccccagaacaccgcctggagcaacgacgacagcaagttcggccagagaatgctggagaagatgggctggagcaagggcaagggcctgggcgcccaggagcagggcgccaccgaccacatcaaggtgcaggtgaagaacaaccacctgggcctgggcgccaccatcaacaacgaggacaactggatcgcccaccaggacgacttcaaccagctgctggccgagctgaacacctgccacggccaggagaccaccgacagcagcgacaagaaggagaagaagagcttcagcctggaggagaagagcaagatcagcaagaacagagtgcactacatgaagttcaccaagggcaaggacctgagcagcagaagcaagaccgacctggactgcatcttcggcaagagacagagcaagaagacccccgagggcgacgccagccccagcacccccgaggagaacgagaccaccaccaccagcgccttcaccatccaggagtacttcgccaagagaatggccgccctgaagaacaagccccaggtgcccgtgcccggcagcgacatcagcgagacccaggtggagagaaagagaggcaagaagagaaacaaggaggccaccggcaaggacgtggagagctacctgcagcccaaggccaagagacacaccgagggcaagcccgagagagccgaggcccaggagagagtggccaagaagaagagcgcccccgccgaggagcagctgagaggcccctgctgggaccagagcagcaaggccagcgcccaggacgccggcgaccacgtgcagccccccgagggcagagacttcaccctgaagcccaagaagagaagaggcaagaagaagctgcagaagcccgtggagatcgccgaggacgccaccctggaggagaccctggtgaagaagaagaagaagaaggacagcaagtag

SEQ ID NO: 195566 - DNA, 987 bp, Artificial Sequence
  derived and/or modified sequence
atgagcatgctagctgagagaaggcgaaaacaaaaatgggctgtcgacccccaaaacaccgcctggtcgaatgacgacagtaagtttgggcagcggatgctggaaaagatgggttggagcaaaggaaaagggctgggcgcccaggaacaaggcgcaactgatcacattaaggttcaggtcaaaaataatcatctgggcctgggcgctaccatcaataacgaagataattggatcgctcatcaggacgattttaatcagttgcttgctgaattgaatacttgtcacgggcaagagaccaccgacagtagcgacaagaaggagaagaagagcttcagcctggaggagaagagtaagatcagcaaaaatagggtccactatatgaagtttacaaaggggaaggatctgtcctcccgctcgaagaccgatttggattgcatctttggcaagcgtcagagcaagaagacccccgagggtgatgcgtctccttccactccggaggaaaatgagacaaccacaaccagtgcattcactatacaggaatactttgccaagaggatggcagctcttaaaaacaagccacaggtgccggtcccaggaagtgatatatctgagactcaagtcgagcggaaacgcggaaaaaaacggaataaagaggccaccggtaaagacgtggagtcgtacctgcagcctaaagccaagcgacataccgaggggaagcccgagcgggctgaagcccaagagcgagtggcgaaaaaaaaatccgcgccagcggaggaacagctgcggggaccttgttgggaccagagctccaaggcctctgctcaggacgcgggggaccacgtccagcctcctgaaggccgggacttcactttgaagccgaaaaagaggaggggaaaaaagaagctgcagaaacccgttgagatcgctgaagatgcaacccttgaggaaactttggttaagaagaagaagaagaaggactctaagtag

SEQ ID NO: 195567 - DNA, 987 bp, Artificial Sequence
  derived and/or modified sequence
atgtccatgctggccgagaggaggaggaagcagaagtgggccgtggacccccagaacacagcctggagcaatgatgacagcaagtttggccagaggatgctggagaagatgggctggagcaagggcaagggcctgggcgcccaggagcagggcgccacagaccacatcaaggtgcaggtgaagaacaaccacctgggcctgggcgccaccatcaacaatgaagacaactggatcgcccaccaggatgacttcaaccagctgctggccgagctgaacacctgccacggccaggagaccacagacagcagtgacaagaaggagaagaagagcttcagcctggaggagaagagcaagatcagcaagaacagagtgcactacatgaagttcaccaagggcaaggacctgagcagccgcagcaagacagacctggactgcatctttgggaagaggcagagcaagaagaccccagaaggagatgccagccccagcaccccagaagaaaatgagaccaccaccaccagcgccttcaccatccaggagtactttgccaagaggatggccgccctgaagaacaagccccaggtgcctgtgcccggcagtgacatcagcgagacccaggtggagaggaagaggggcaagaagaggaacaaggaggccaccgggaaggatgtggagagctacctgcagcccaaggccaagaggcacacagagggcaagccagagagagctgaggcccaggagcgggtggccaagaagaagagcgccccagctgaggagcagctgcggggcccctgctgggaccagagcagcaaggccagcgcccaggatgctggggaccacgtgcagcccccagagggccgggacttcaccctgaagcccaagaagaggcggggcaagaagaagctgcagaagcctgtggagattgctgaagatgccaccctggaggagaccctggtgaagaagaagaagaagaaggacagcaagtag

SEQ ID NO: 195568 - DNA, 987 bp, Artificial Sequence
  derived and/or modified sequence
atgagcatgctggccgagcggcggcggaagcagaagtgggccgtggacccgcagaatacagcctggtcaaacgacgactcaaaatttggacaacggatgcttgagaagatgggctggagtaagggcaagggactcggggctcaggaacagggagcaaccgatcatataaaagtccaagtgaaaaataatcacttaggcctaggagccactatcaacaatgaagacaactggatcgctcaccaggacgatttcaatcaactgctagcagaactgaatacatgtcacggccaagagacaaccgactcctctgataagaaggagaaaaagagtttttccctggaagagaaaagtaagatctcgaagaatagagtccactatatgaaattcacgaaaggaaaggatctcagtagccggtctaaaactgatcttgattgcatcttcggcaagcgacagagcaagaagactcccgagggcgacgccagtccaagtacccctgaggagaatgagactacaacaacaagtgcctttacaatccaggaatactttgcaaagaggatggccgccttgaaaaataagccacaagttccagtgcctggcagcgacatttcagagactcaggttgagaggaaaaggggaaaaaagcggaacaaggaagctacggggaaagatgttgagtcctaccttcaacccaaggcgaagagacacactgaagggaaacccgaacgagctgaagcccaggaaagggtcgccaagaaaaaaagcgctcccgctgaagagcagctccggggcccttgctgggatcaaagctcaaaagcctcagcgcaagatgctggcgaccacgtacaaccaccagaaggaagagattttactctcaaacctaaaaaacgcaggggaaagaagaagctccagaaacctgtcgagatcgcagaagacgccactctggaggaaaccctcgttaaaaagaaaaaaaaaaaggacagcaagtag

SEQ ID NO: 195569 - DNA, 987 bp, Artificial Sequence
  derived and/or modified sequence
atgtcgatgttggcggagaggcgcaggaagcagaagtgggcagtggacccccaaaataccgcctggtcaaacgacgactctaagtttggacagcgaatgctagagaagatgggttggtcgaaggggaagggcctgggggcacaagaacagggtgccacagaccatatcaaagttcaggttaagaataatcacctgggtttgggcgctaccatcaataacgaagataactggatcgcccatcaagacgactttaatcagctgcttgcggagctcaatacgtgccatggccaggaaaccaccgattcctcagacaaaaaggagaaaaagtccttttccctggaggagaagtccaagatctctaaaaatcgcgttcactacatgaaatttacaaaaggtaaggatttgtccagtcgctccaagacggatctggattgtatctttgggaagaggcagtccaagaagacgcctgaaggggacgcgagcccttccacccctgaggagaacgagaccaccacaacaagcgccttcaccattcaggagtacttcgctaagcggatggctgctttgaagaacaaacctcaagtccccgtgcctggctctgacatatctgaaacacaggtagagagaaagcggggtaagaaaagaaacaaggaggcaaccggaaaagacgtggagagttaccttcagccaaaagcgaagagacataccgaagggaaacctgaacgtgccgaggcccaggaaagagttgcgaaaaaaaaatcagcaccagcggaggagcagttgcggggtccatgttgggaccagtccagtaaggcaagtgcacaggacgccggtgatcacgtgcagccccctgagggtagagatttcacgctgaagcccaaaaaaaggagagggaagaaaaagttgcagaagccagtagaaatagccgaggatgcaactctggaggagacactggtgaaaaaaaagaagaagaaagacagtaaatag

SEQ ID NO: 195570 - DNA, 1545 bp, Artificial Sequence
  derived and/or modified sequence
cgtccgctgcagtccgccggcgagggagttacgcacgtcctgattctcctggagtctccagcccgcccagtggccgcagtcacccaggtccagaggcggcggtatcacaggctctccgacatgtctatgctggctgaacgtcggcggaagcagaagtgggctgtggatcctcagaacactgcctggagtaatgacgattccaagtttggccagcggatgctagagaagatggggtggtctaaaggaaagggtttaggggctcaggagcaaggagccacagatcatattaaagttcaagtgaaaaataaccacctgggactcggagctaccatcaataatgaagacaactggattgcccatcaggatgattttaaccagcttctggccgaactgaacacttgccatgggcaggaaaccacagattcctcggacaagaaggaaaagaaatcttttagccttgaggaaaagtccaaaatctccaaaaaccgtgttcactatatgaaattcacaaaagggaaggatctgtcatctcggagcaaaacagatcttgactgcatttttgggaaaagacagagtaagaagactcccgagggcgatgccagtccctccactccagaggagaacgaaaccacgacaaccagcgccttcaccatccaggagtactttgccaagcggatggcagcactgaagaacaagccccaggttccagttccagggtctgacatttctgagacgcaggtggaacgtaaaagggggaagaaaagaaataaagaggccacaggtaaagatgtggaaagttacctccagcctaaggccaagaggcacacggagggaaagcccgagagggccgaggcccaggagcgagtggccaagaagaagagcgcgccagcagaagagcagctcagaggcccctgctgggaccagagttccaaggcctctgctcaggatgcaggggaccatgtgcagccgcctgagggccgggacttcaccctgaagcccaaaaagaggagagggaagaaaaagctgcaaaaaccagtagagatagcagaggacgctacactagaagaaacgctagtgaaaaagaagaagaagaaagattccaaatgaatccttcccagccggggccttccgaccactcagctgtcagggcactgcgggggcagacacctctggcctgaagtcacagcagagttcaccccagagcgcctgggcgcatcttgtggcatgcccatgggctgccgagtcctgccctctcgccacatttcccccaagttacattcccaggaggacctttttaatgttctcaatcgtggctctcagacacaaataaatttttttgtaaactctgagcccttcagcaagagagtttaattataatcattacaaatacatgcattcatgtaagtgtgcacacgtgtgtgtgcatgtgcgcatctgtgtgtgtgtgtgtgtgtcactatctccgtttgctctcggttcccttcaataacaatgaatggtgctttcttctgaaagactcagcctaattaaaggattaagaggcaa

SEQ ID NO: 195571 - protein, 1275 aa, Artificial Sequence
  derived and/or modified sequence
MENFILYEEIGRGSKTVVYKGRRKGTINFVAILCTDKCKRPEITNWVRLTREIKHKNIVTFHEWYETSNHLWLVVELCTGGSLKTVIAQDENLPEDVVREFGIDLISGLHHLHKLGILFCDISPRKILLEGPGTLKFSNFCLAKVEGENLEEFFALVAAEEGGGDNGENVLKKSMKSRVKGSPVYTAPEVVRGADFSISSDLWSLGCLLYEMFSGKPPFFSESISELTEKILCEDPLPPIPKDSSRPKASSDFINLLDGLLQRDPQKRLTWTRLLQHSFWKKAFAGADQESSVEDLSLSRNTMECSGPQDSKELLQNSQSRQAKGHKSGQPLGHSFRLENPTEFRPKSTLEGQLNESMFLLSSRPTPRTSTAVEVSPGEDMTHCSPQKTSPLTKITSGHLSQQDLESQMRELIYTDSDLVVTPIIDNPKIMKQPPVKFDAKILHLPTYSVDKLLFLKDQDWNDFLQQVCSQIDSTEKSMGASRAKLNLLCYLCVVAGHQEVATRLLHSPLFQLLIQHLRIAPNWDIRAKVAHVIGLLASHTAELQENTPVVEAIVLLTELIRENFRNSKLKQCLLPTLGELIYLVATQEEKKKNPRECWAVPLAAYTVLMRCLREGEERVVNHMAAKIIENVCTTFSAQSQGFITGEIGPILWYLFRHSTADSLRITAVSALCRITRHSPTAFQNVIEKVGLNSVINSLASAICKVQQYMLTLFAAMLSCGIHLQRLIQEKGFVSTIIRLLDSPSTCIRAKAFLVLLYILIYNREMLLLSCQARLVMYIERDSRKTTPGKEQQSGNEYLSKCLDLLICHIVQELPRILGDILNSLANVSGRKHPSTVQVKQLKLCLPLMPVVLHLVTSQVFRPQVVTEEFLFSYGTILSHIKSVDSGETNIDGAIGLTASEEFIKITLSAFEAIIQYPILLKDYRSTVVDYILPPLVSLVQSQNVEWRLFSLRLLSETTSLLVNQEFGDGKEKASVDSDSNLLALIRDVLLPQYEHILLEPDPVPAYALKLLVAMTEHNPTFTRLVEESKLIPLIFEVTLEHQESILGNTMQSVIALLSNLVACKDSNMELLYEQGLVSHICNLLTETATLCLDVDNKNNNEMAAPLLFSLLDILHSMLTYTSGIVRLALQAQKSGSGEDPQAAEDLLLLNRPLTDLISLLIPLLPNEDPEIFDVSSKCLSILVQLYGGENPDSLSPENVEIFAHLLTSKEDPKEQKLLLRILRRMITSNEKHLESLKNAGSLLRALERLAPGSGSFADSAVAPLALEILQAVGH

SEQ ID NO: 195572 - protein, 69 aa, Artificial Sequence
  derived and/or modified sequence
MQKYCIYQHFQFQLLIQHLWIAANCDIWAKVARVIGLLASHKTDLQENTPVVEAFPNSPRTPTLPGVLT

SEQ ID NO: 195573 - DNA, 3828 bp, Artificial Sequence
  derived and/or modified sequence
atggagaacttcatcctgtacgaggagatcggcagaggcagcaagaccgtggtgtacaagggcagaagaaagggcaccatcaacttcgtggccatcctgtgcaccgacaagtgcaagagacccgagatcaccaactgggtgagactgaccagagagatcaagcacaagaacatcgtgaccttccacgagtggtacgagaccagcaaccacctgtggctggtggtggagctgtgcaccggcggcagcctgaagaccgtgatcgcccaggacgagaacctgcccgaggacgtggtgagagagttcggcatcgacctgatcagcggcctgcaccacctgcacaagctgggcatcctgttctgcgacatcagccccagaaagatcctgctggagggccccggcaccctgaagttcagcaacttctgcctggccaaggtggagggcgagaacctggaggagttcttcgccctggtggccgccgaggagggcggcggcgacaacggcgagaacgtgctgaagaagagcatgaagagcagagtgaagggcagccccgtgtacaccgcccccgaggtggtgagaggcgccgacttcagcatcagcagcgacctgtggagcctgggctgcctgctgtacgagatgttcagcggcaagccccccttcttcagcgagagcatcagcgagctgaccgagaagatcctgtgcgaggaccccctgccccccatccccaaggacagcagcagacccaaggccagcagcgacttcatcaacctgctggacggcctgctgcagagagacccccagaagagactgacctggaccagactgctgcagcacagcttctggaagaaggccttcgccggcgccgaccaggagagcagcgtggaggacctgagcctgagcagaaacaccatggagtgcagcggcccccaggacagcaaggagctgctgcagaacagccagagcagacaggccaagggccacaagagcggccagcccctgggccacagcttcagactggagaaccccaccgagttcagacccaagagcaccctggagggccagctgaacgagagcatgttcctgctgagcagcagacccacccccagaaccagcaccgccgtggaggtgagccccggcgaggacatgacccactgcagcccccagaagaccagccccctgaccaagatcaccagcggccacctgagccagcaggacctggagagccagatgagagagctgatctacaccgacagcgacctggtggtgacccccatcatcgacaaccccaagatcatgaagcagccccccgtgaagttcgacgccaagatcctgcacctgcccacctacagcgtggacaagctgctgttcctgaaggaccaggactggaacgacttcctgcagcaggtgtgcagccagatcgacagcaccgagaagagcatgggcgccagcagagccaagctgaacctgctgtgctacctgtgcgtggtggccggccaccaggaggtggccaccagactgctgcacagccccctgttccagctgctgatccagcacctgagaatcgcccccaactgggacatcagagccaaggtggcccacgtgatcggcctgctggccagccacaccgccgagctgcaggagaacacccccgtggtggaggccatcgtgctgctgaccgagctgatcagagagaacttcagaaacagcaagctgaagcagtgcctgctgcccaccctgggcgagctgatctacctggtggccacccaggaggagaagaagaagaaccccagagagtgctgggccgtgcccctggccgcctacaccgtgctgatgagatgcctgagagagggcgaggagagagtggtgaaccacatggccgccaagatcatcgagaacgtgtgcaccaccttcagcgcccagagccagggcttcatcaccggcgagatcggccccatcctgtggtacctgttcagacacagcaccgccgacagcctgagaatcaccgccgtgagcgccctgtgcagaatcaccagacacagccccaccgccttccagaacgtgatcgagaaggtgggcctgaacagcgtgatcaacagcctggccagcgccatctgcaaggtgcagcagtacatgctgaccctgttcgccgccatgctgagctgcggcatccacctgcagagactgatccaggagaagggcttcgtgagcaccatcatcagactgctggacagccccagcacctgcatcagagccaaggccttcctggtgctgctgtacatcctgatctacaacagagagatgctgctgctgagctgccaggccagactggtgatgtacatcgagagagacagcagaaagaccacccccggcaaggagcagcagagcggcaacgagtacctgagcaagtgcctggacctgctgatctgccacatcgtgcaggagctgcccagaatcctgggcgacatcctgaacagcctggccaacgtgagcggcagaaagcaccccagcaccgtgcaggtgaagcagctgaagctgtgcctgcccctgatgcccgtggtgctgcacctggtgaccagccaggtgttcagaccccaggtggtgaccgaggagttcctgttcagctacggcaccatcctgagccacatcaagagcgtggacagcggcgagaccaacatcgacggcgccatcggcctgaccgccagcgaggagttcatcaagatcaccctgagcgccttcgaggccatcatccagtaccccatcctgctgaaggactacagaagcaccgtggtggactacatcctgccccccctggtgagcctggtgcagagccagaacgtggagtggagactgttcagcctgagactgctgagcgagaccaccagcctgctggtgaaccaggagttcggcgacggcaaggagaaggccagcgtggacagcgacagcaacctgctggccctgatcagagacgtgctgctgccccagtacgagcacatcctgctggagcccgaccccgtgcccgcctacgccctgaagctgctggtggccatgaccgagcacaaccccaccttcaccagactggtggaggagagcaagctgatccccctgatcttcgaggtgaccctggagcaccaggagagcatcctgggcaacaccatgcagagcgtgatcgccctgctgagcaacctggtggcctgcaaggacagcaacatggagctgctgtacgagcagggcctggtgagccacatctgcaacctgctgaccgagaccgccaccctgtgcctggacgtggacaacaagaacaacaacgagatggccgcccccctgctgttcagcctgctggacatcctgcacagcatgctgacctacaccagcggcatcgtgagactggccctgcaggcccagaagagcggcagcggcgaggacccccaggccgccgaggacctgctgctgctgaacagacccctgaccgacctgatcagcctgctgatccccctgctgcccaacgaggaccccgagatcttcgacgtgagcagcaagtgcctgagcatcctggtgcagctgtacggcggcgagaaccccgacagcctgagccccgagaacgtggagatcttcgcccacctgctgaccagcaaggaggaccccaaggagcagaagctgctgctgagaatcctgagaagaatgatcaccagcaacgagaagcacctggagagcctgaagaacgccggcagcctgctgagagccctggagagactggcccccggcagcggcagcttcgccgacagcgccgtggcccccctggccctggagatcctgcaggccgtgggccactag

SEQ ID NO: 195574 - DNA, 3828 bp, Artificial Sequence
  derived and/or modified sequence
atggagaacttcattttgtacgaggaaattggcaggggtagtaaaaccgtagtctataagggacgcaggaaaggtaccattaattttgtggcaattctctgtactgataagtgcaagcggccagagatcacgaattgggttagactcacacgcgagatcaagcacaaaaatattgttacctttcacgaatggtacgagacttccaaccacctgtggttagtcgtggagctttgtaccggcgggtccctgaagactgtaatagcacaggacgagaatctccccgaagacgtggtgagggagttcggcattgatttgatcagcggcctccaccatctgcataagctgggcatcctgttctgcgacatttctcctcggaagatacttttggaaggaccaggcaccttaaagtttagcaacttctgtctagccaaggtggaaggcgagaacctagaagagttctttgctctggtggcagcagaagagggcggcggcgataatggagagaatgtccttaagaagtccatgaagtcgcgggtgaaggggagtcccgtctacacagcacccgaggtggtgaggggggcggatttctccatttcatcagacttgtggtccctcggctgcctcctctacgaaatgttttctggtaagcccccttttttctcagaaagcatcagcgagctgacagagaagatactttgcgaggaccctctcccccccatcccaaaggattcatctcgccccaaggctagcagtgatttcattaatctgctggatggactgcttcagagggacccacagaaaagattgacttggacaaggttactccaacattctttctggaagaaagcctttgctggtgccgaccaagagagctccgttgaggatctctctctctcgcgcaacaccatggaatgttccggtccacaggatagtaaggagcttttgcagaacagccaatcgcgtcaggccaaaggccacaaaagcggccaacctctgggacatagcttccgactggaaaatcctacagaattccgccccaagagcacattagagggacagctaaatgagtctatgtttctattgtcgtcccgaccaaccccacgtacatccacggctgttgaagtgtccccaggggaggatatgactcactgcagcccccaaaaaacctcaccccttaccaagataacctccggacacctcagccagcaagacctggaatcccagatgcgggaattgatctatacagatagcgacctggtggtgactcctatcatcgataatccaaagataatgaaacaacctccagtcaaatttgatgcgaagatcctgcacctgccgacgtactcagtcgataaattactgtttctgaaggaccaagattggaatgacttcctgcagcaggtgtgcagccagattgactcaaccgaaaagagcatgggcgcatctcgggcaaagttgaacttgctctgttacctgtgcgtggtggccggccatcaggaagtcgccactcggttactccactcccccctgttccaactactcattcagcacctgcgtatcgcacccaactgggatataagggcaaaggttgcccacgttatcgggcttttagcttcacacacggcagagctccaggagaacactcccgtggttgaagctattgtattgctcacagagctaatccgagaaaactttcgtaatagtaaactcaaacagtgcctgctgcccacactaggagagttgatctatctggtggctacacaggaggaaaagaagaaaaacccccgggagtgctgggccgtccccctggccgcgtacaccgtgctaatgcgctgcctgcgagaaggcgaggaaagggtggttaatcatatggcagccaaaatcatagaaaacgtatgtaccaccttttcagcgcaatcccaaggattcatcacgggagagattggcccaatcctgtggtatctgtttagacactcaacagcggactccctgcggattaccgctgtgtctgccctgtgtaggattacacgacatagtcctactgcctttcagaacgttatcgaaaaggtgggattgaacagcgtgatcaatagtcttgctagtgcgatttgtaaggtgcagcagtacatgctcacactattcgcagcgatgttaagctgcgggatccacctgcagaggttaatccaggagaagggcttcgtttcaacaatcatccgactcctggattccccaagtacctgtattagggctaaggcattcctggttttgctttatatcctcatatataatcgggaaatgctgctcctgagctgtcaggcacggctggtcatgtacatcgagcgagattcccgcaaaaccacacccggaaaagagcagcaatctggaaatgaatacctgtcgaagtgccttgatcttctgatttgtcacatcgtacaagagctccctagaatcttaggagacatcctgaactccctggccaacgtatctggcagaaagcatccttctaccgtacaggttaaacagctcaagctgtgtttgcctttaatgcccgtagtgctgcacctggtgacatcacaagtcttccgtccacaggtggtcacagaagagtttctgtttagctacggtaccattctgtcacacatcaagagcgttgattcgggagagaccaacattgacggcgcgataggcctgactgccagcgaggagtttattaaaattacgctgtcagcctttgaggcaatcatacaatatcccatcctcctcaaagactataggagcacagtggtggactatatccttccccctctcgtcagcctggtgcagagccagaatgtcgagtggagactgttcagcctgaggctgctgtcagaaactacttccttgttggtaaatcaggaatttggtgatggcaaagaaaaggctagcgttgacagtgactcaaatttactcgctttgatccgcgacgtcctcctaccgcaatacgaacacatcctcctggaacctgatccagtgccagcctatgccctgaaattattggtcgcgatgactgaacacaaccctactttcacccgcctagtggaagagagtaagctgatccccctgatcttcgaggtaacactggaacatcaggagagtatcttaggcaacacaatgcagtccgtgatcgcgctgctgagcaacctggtagcgtgcaaggattctaatatggaactgttgtatgagcagggactggtgtcccatatttgcaacctgcttaccgaaaccgccactctgtgcctagatgtggataataaaaataacaatgagatggccgccccactcctgttctccctccttgacatcctccacagcatgctaacctatacatcaggaattgtgcgcttggctttacaggcccagaagtctggatccggcgaggatccacaagccgctgaggacctcttgctcttgaatcggcccttaactgacctgatctctttacttatccccctgctgcctaacgaagatccagaaatttttgacgtaagctcaaaatgcttatccattctggttcagttatatggaggcgaaaatcctgacagtttgtcccccgaaaatgtcgagatcttcgcccatttgctaactagcaaagaggatcctaaggaacagaaattgcttttgaggatactgagaaggatgatcacctcaaacgagaagcacctcgagtcattaaagaatgctggctccctgctccgagctctggaaagattggcgcccgggtctgggagcttcgcagacagtgccgtggctccactcgcccttgaaatcctccaagctgtggggcactag

SEQ ID NO: 195575 - DNA, 3828 bp, Artificial Sequence
  derived and/or modified sequence
atggagaacttcatcctgtatgaggagatcggccggggcagcaagacagtggtgtacaagggccgcaggaagggcaccatcaactttgtggccatcctgtgcacagacaagtgcaagaggcctgagatcaccaactgggtgcggctgacccgggagatcaagcacaagaacatcgtgaccttccacgagtggtatgagaccagcaaccacctgtggctggtggtggagctgtgcacaggaggcagcctgaagacagtgattgcccaggatgagaacctgcctgaagatgtggtgcgggagtttggaattgacctgatcagcggcctgcaccacctgcacaagctgggcatcctcttctgtgacatcagccccaggaagatcctgctggagggccctggcaccctgaagttcagcaacttctgcctggccaaggtggagggggagaacctggaggagttctttgccctggtggccgctgaggagggcggcggggacaacggggagaatgtgctgaagaagtccatgaagagccgggtgaagggcagccctgtgtacacagcccctgaggtggtgagaggagctgacttcagcatcagcagtgacctgtggagcctgggctgcctgctgtatgagatgttcagcggcaagccacccttcttcagcgagagcatcagcgagctgacagagaagatcctgtgtgaggaccccctgccccccatccccaaggacagcagccggcccaaggccagcagtgacttcatcaacctgctggatggcctgctgcagagggacccccagaagaggctgacctggacccggctgctgcagcacagcttctggaagaaggcctttgctggagctgaccaggagagctctgtggaggacctgagcctgagcaggaacaccatggagtgcagcggcccccaggacagcaaggagctgctgcagaacagccagagccggcaggccaagggccacaagagcggccagcccctgggccacagcttccggctggagaaccccacagagttccggcccaagagcaccctggagggccagctgaatgaatccatgttcctgctgagcagccggcccacccccaggaccagcacagctgtggaggtgtccccaggagaggacatgacccactgcagcccccagaagaccagccccctgaccaagatcaccagcggccacctgagccagcaggacctggagagccagatgagggagctgatctacacagacagcgacctggtggtgacccccatcatcgacaaccccaagatcatgaagcagccccctgtgaagtttgatgccaagatcctgcacctgcccacctacagcgtggacaagctgctcttcctgaaggaccaggactggaatgacttcctgcagcaggtgtgcagccagattgacagcacagagaagtccatgggcgccagccgggccaagctgaacctgctgtgctacctgtgtgtggtggccggccaccaggaggtggccacccggctgctgcacagccccctcttccagctgctgatccagcacctgcgcatcgcccccaactgggacatccgggccaaggtggcccacgtgattggcctgctggccagccacacagctgagctgcaggagaacacccctgtggtggaggccatcgtgctgctgacagagctgatccgggagaacttcaggaacagcaagctgaagcagtgcctgctgcccaccctgggggagctgatctacctggtggccacccaggaggagaagaagaagaacccccgggagtgctgggccgtgcccctggccgcctacacagtgctgatgcgctgcctgcgggagggggaggagcgggtggtgaaccacatggccgccaagatcattgaaaatgtgtgcaccaccttcagcgcccagagccagggcttcatcactggagagatcggccccatcctgtggtacctgttccgccacagcacagctgacagcctgcgcatcacagctgtgtctgccctgtgccgcatcaccaggcacagccccacagccttccagaatgtgattgagaaggtgggcctgaacagcgtcatcaacagcctggccagcgccatctgcaaggtgcagcagtacatgctgaccctgtttgctgccatgctgagctgtggcatccacctgcagaggctcatccaggagaagggctttgtgtccaccatcatccggctgctggacagccccagcacctgcatccgggccaaggccttcctggtgctgctgtacatcctgatctacaaccgggagatgctgctgctgagctgccaggcccggctggtgatgtacatcgagcgggacagcaggaagaccacccctgggaaggagcagcagagcggaaatgagtacctgagcaagtgcctggacctgctgatctgccacatcgtgcaggagctgccccgcatcctgggggacatcctgaacagcctggccaacgtgtctggcaggaagcaccccagcacagtgcaggtgaagcagctgaagctgtgcctgcccctgatgcctgtggtgctgcacctggtgaccagccaggtgttccggccccaggtggtgacagaggagttcctgttctcctatggcaccatcctgagccacatcaagtctgtggacagcggggagaccaacattgatggagccatcggcctgacagccagcgaggagttcatcaagatcaccctgagcgcctttgaggccatcatccagtaccccatcctgctgaaggactaccgcagcacagtggtggactacatcctgccccccctggtgtccctggtgcagagccagaatgtggagtggaggctcttcagcctgcggctgctgtctgagaccaccagcctgctggtgaaccaggagtttggagatggcaaggagaaggcctctgtggacagcgacagcaacctgctggccctgatcagagatgtgctgctgccccagtatgagcacatcctgctggagccagaccctgtgcctgcctatgccctgaagctgctggtggccatgacagagcacaaccccaccttcacccggctggtggaggagagcaagctgatccccctcatctttgaggtgaccctggagcaccaggagagcatcctgggcaacaccatgcagagcgtgattgccctgctgagcaacctggtggcctgcaaggacagcaacatggagctgctgtatgagcagggcctggtgagccacatctgcaacctgctgacagaaacagccaccctgtgcctggatgtggacaacaagaacaacaatgagatggccgcccccctgctcttcagcctgctggacatcctgcacagcatgctgacctacaccagcggcatcgtgcggctggccctgcaggcccagaagagcggcagcggggaggacccccaggccgctgaggacctgctgctgctgaaccggcccctgacagacctgatcagcctgctgatccccctgctgcccaatgaagatcctgagatctttgatgtgagcagcaagtgcctgagcatcctggtgcagctgtatggaggagagaacccagacagcctgagcccagaaaatgtggagatctttgcccacctgctgaccagcaaagaagaccccaaggagcagaagctgctgctgcgcatcctgcggaggatgatcaccagcaatgagaagcacctggagagcctgaagaatgccggcagcctgctgcgggccctggagcggctggcccctggcagcggcagctttgctgacagcgctgtggcccccctggccctggagatcctgcaggccgtgggccactag

SEQ ID NO: 195576 - DNA, 3828 bp, Artificial Sequence
  derived and/or modified sequence
atggagaacttcatcctgtacgaggagatcggccggggcagcaagaccgtggtctacaagggtcgccgcaaggggaccatcaatttcgtggccatcctctgcacggacaaatgcaaaaggcccgaaattacaaactgggttagactcactcgcgaaattaagcacaagaatatcgtaactttccacgaatggtacgagaccagcaaccatctgtggttagtcgtggagctctgcactggtggatccctgaaaacagtgattgcacaggatgaaaacctgccggaggatgttgtaagggagtttggcatcgatctcatctcaggcctgcaccacctgcataagctcggcatactattctgtgacatcagcccaaggaagatcctcctggaggggccaggtactctcaagttctcaaacttttgcttagccaaagtggagggtgagaacctcgaagaattttttgccttggttgccgccgaagagggaggtggagacaacggcgagaacgtgcttaaaaagagtatgaagtccagagttaaggggtcgccagtgtatactgcacctgaagtggttcgtggcgccgatttttctatctctagtgatctgtggtcactcggctgcctgctttacgaaatgttctcagggaagcctccgtttttttcggagtccatctccgaactgaccgaaaagattctatgtgaggatccgctccctcccatacctaaggacagttcaaggcccaaagcttcttccgacttcatcaatctgctcgatgggctgctgcagcgcgatccccagaagcgcctcacctggacaaggctgctccaacacagcttttggaaaaaagccttcgccggcgccgaccaggaatctagcgtggaagatttatccctttcgagaaatactatggagtgttctggcccgcaagatagcaaggaattactgcagaacagccagtctagacaggctaagggccacaaaagcgggcaacccctgggacattcgtttcgcctcgaaaacccaacagagtttagaccaaagagtactctggagggccagctgaacgaatccatgtttctgctgagcagcaggcctacccctcggacaagcacggcggtggaagttagccccggtgaggatatgacccactgttcacctcagaaaaccagccccttaaccaaaatcacgagtggccatctctcgcagcaggatctcgaatctcagatgcgggagcttatttacactgattccgacctggtcgtcactccgatcattgataatccaaagattatgaaacaacctcccgtaaaatttgacgcaaaaatcctccacctaccaacttacagcgtcgacaagctccttttcctcaaggatcaggactggaacgattttctgcaacaggtctgttcacagatagattccactgagaagagcatgggtgcatcccgagcaaagctcaacctgctctgctacctttgtgtcgtagctggacatcaggaggtagctacccggctgcttcactcccctctgtttcaattactcatacagcatctgagaattgcacccaattgggatattagagccaaggtggcgcatgtcatcgggttgctggcctcccacacagccgagttgcaggagaatactcccgtggtggaagccattgtgctccttactgaacttatccgggagaacttccggaacagtaagctgaaacagtgcctgctgcccactctaggcgagctgatctacctagtggctacccaggaggaaaagaagaaaaatccaagggaatgttgggctgtgcccctcgctgcgtacacagttcttatgcgctgtctgagggaaggtgaagaaagggttgtaaaccacatggctgcaaagatcatcgagaacgtttgtacgacattcagcgcccaaagccaggggttcatcactggcgagattggacccatcctctggtacttattccggcacagtacagcggactctctgcggatcaccgcagtctccgctctgtgccgaattacacgacacagtcccactgctttccagaatgtgattgaaaaggtcgggctgaacagcgttatcaatagtctggctagcgctatttgcaaggtgcagcaatacatgctgactctgtttgctgccatgttgtcctgcggcattcacttacaacggctgatccaggaaaaggggttcgtctctactatcatccggttactggactcaccatcaacttgcatcagagccaaagcttttctggtcttattgtatatcttaatttataaccgagagatgctgctgttgagctgtcaggcacggctcgtgatgtatattgaaagggattctaggaagaccactccgggaaaagagcagcagtctggcaatgagtatctgtccaagtgcctggacctgctcatatgtcacatagtccaggaactgcctcggatccttggtgatatcctcaatagcctcgctaatgtgtccggccgtaaacatccaagtactgtgcaggtcaaacaattgaagctctgcctgccacttatgcctgtggtgctgcatttagtcaccagtcaagtcttcagaccacaggttgttacagaggaatttctcttcagctacggcaccatcctgagtcatatcaagtctgtcgactctggagagacgaatatagatggtgctatcggtctgactgcaagtgaggaattcatcaaaattactttatctgccttcgaagccatcattcaatacccaattttgctgaaggattaccgatcaaccgtcgttgattacattctccctccccttgtctccttagtgcagagtcagaatgtggagtggcgcctctttagtcttcgactcttgtccgagactactagcctgctggtgaaccaggaattcggcgacgggaaggagaaggcttccgtggactcagactccaatttgctcgcactcatcagggatgtgctccttccgcagtatgaacacatcttactcgaacccgaccccgtgccggcatacgccctcaagctgttggttgccatgactgagcacaatcccacttttactcgactggtggaggagagtaaactgatcccactcatttttgaggtgactctggaacatcaggaaagcattctagggaacaccatgcaatctgtgattgcccttctgagcaacctggttgcctgcaaagacagcaacatggaactcctgtatgagcaggggctggtcagccacatatgtaatctgttgactgagactgccactctttgtctggatgttgataacaaaaacaacaatgagatggccgcccctttgcttttcagcctattggacattctccattcaatgctcacctacacttcagggatagtacggttggccttgcaagctcagaaatcgggatccggcgaggacccacaggcggctgaggacctgctgctccttaatcggcccttgacagatctgatctccctcctaatccctctactccccaatgaagatccagaaattttcgatgtctcctctaaatgtctctccatcctggtacagctgtatgggggcgagaatcccgatagtctgtcccccgagaatgtggaaatcttcgcccatctcctcaccagtaaggaagatcctaaggagcagaaactcctactgaggatcctaagacggatgatcacctctaacgagaaacatcttgaatctctgaagaacgccggttctctccttcgggcactggagcggcttgcccctggctctggctcttttgcagacagcgctgtcgccccactcgcgcttgagatccttcaggcggtcggccattag

SEQ ID NO: 195577 - DNA, 3828 bp, Artificial Sequence
  derived and/or modified sequence
atggagaattttattctgtacgaagaaattggccgaggaagtaaaactgtcgtgtataagggccgtagaaaaggaactatcaatttcgtggccattctgtgcacggataaatgtaagcggccagaaattacaaactgggtgcggctgacaagagagattaaacacaagaacatcgttaccttccatgagtggtatgagacatctaatcacctgtggctggtcgtagaactgtgtactggtggcagcctcaagacagtgatcgcacaggacgaaaatctacccgaagacgtggttagagagtttgggatcgatctgatctcgggccttcaccatttgcacaaattaggaatcctgttctgtgatattagtccgaggaagattctcctggaaggtcctggtaccttgaaattctctaatttctgtctggcgaaggtggagggagagaatctcgaggaattctttgccctggtggctgcagaggaaggtggtggcgataatggagagaatgtgttgaagaaatcgatgaaaagccgagtgaaagggtctccagtatatacggcacccgaagtggtacgaggtgccgacttctcaatctcctccgacctgtggtccctgggctgtctgctttatgagatgttcagcggtaagccgcctttcttttcagaatcaattagtgaactcacggagaagatcctctgcgaagaccctctcccgcctatccctaaggattctagccgcccaaaagcttcctcggatttcattaacttgttggatgggctgctgcagcgagatccacagaagcggcttacttggacgcgactcctgcaacactctttctggaaaaaggcgttcgctggcgctgatcaagagtctagcgtggaagacctgtccttgtctcgtaacactatggagtgctcaggtccacaggattcaaaggagctcctacaaaacagtcagtctaggcaggccaagggacataaatccgggcaaccacttggacactcctttcgccttgagaacccaaccgaatttcggcctaaatctacattggaaggacagctgaacgaatccatgtttctgttatcctcccggccaacaccaaggacctcaactgccgtggaggtttcccccggagaagatatgacccactgcagtcctcagaagacaagcccccttacgaagatcacatctgggcaccttagtcaacaggacctggagtcccagatgagagagctgatctacactgactccgatttagttgtaacacctataatagacaatccaaaaattatgaagcagcccccagtgaagttcgatgctaagatcctgcatctgcccacctattctgtcgacaagctgctattcctcaaagatcaggattggaatgacttcctccagcaagtgtgttcccagattgattcaactgagaagtcaatgggagctagtagggctaaattaaatctgctgtgttacctgtgtgtggtggctggtcaccaggaggtagcgactaggttgctccactccccactctttcagctcctaattcaacacctgagaatagcccctaattgggacattagggcaaaggtcgcccacgtcattgggcttcttgcatctcatactgcagagttacaagaaaatacacccgtcgtcgaggccattgtcctcttgacagaactgattagggagaactttcgcaattccaaactcaaacagtgtctcttaccaaccctaggagaacttatctatctcgtggccacccaggaagaaaaaaagaaaaatcctagagaatgctgggctgtaccactggcagcatataccgttctgatgagatgcctgcgcgaaggggaagagagggtggttaaccacatggcggctaagatcattgaaaacgtgtgcaccacattttccgcacaatctcaaggctttattaccggggagataggccctattctttggtacctgtttagacactccacagccgatagcttgagaataacagcggtctcggccttatgcagaattacaaggcattccccaactgccttccagaacgtcattgaaaaagtcggtctcaacagtgtaattaacagtctggcttccgcgatttgcaaagtgcagcagtatatgttgacactgtttgccgctatgctgagctgcggaattcatcttcaaagactcattcaggagaaaggcttcgtgtcaactattatcaggctacttgattcaccgtcaacgtgtataagggccaaggcattcttggtcctcctctatattctaatttataacagggaaatgctgctactctcgtgtcaggccaggctggtaatgtatatcgagagagatagtcgcaaaactacacctggcaaggaacaacagagcgggaatgagtacctgagcaagtgtctagaccttcttatttgccatattgttcaggagttaccaaggattcttggcgacatcctgaatagcctggcgaacgtctctggcaggaagcatccatccacagtgcaggtgaagcaattgaaactttgtctgcccctgatgccggtcgtactgcacctggttacctcacaagtttttagaccccaggttgtcactgaagagttcctcttctcctatggcaccatcctgagccatatcaagtctgtggactcaggcgagactaacatagatggcgcaatcggcctaacggctagcgaagagttcataaaaattaccctgtctgcctttgaggccatcattcagtatccaattctcttgaaggattaccgctcaaccgtggtggactatattctgccacccttggtgtcactggttcaaagccagaacgtcgaatggcgcctgttcagcctgaggctgttgtccgagactaccagtcttttagtgaaccaggagtttggagacgggaaagagaaagcaagtgtggacagcgattccaatctacttgcactcatccgagatgtcctcctgccccagtacgagcacattctgctggaacccgacccggtgccagcctacgcccttaagctcttggttgctatgactgaacacaaccctactttcactcgactggtggaggagtccaaactaatacctctgatcttcgaagtgaccctagagcaccaggaatccattcttggcaatacaatgcagagtgtgatcgcactgctgagcaaccttgtcgcgtgcaaggacagtaacatggagctcctgtatgaacagggtctcgtctcccacatctgtaaccttctcactgaaacagccactctgtgcctggacgtcgataacaaaaataacaatgaaatggccgctccattgttattttctttgctggatattttgcacagtatgctgacttatacatctggaattgtccgactggctcttcaggcacagaaatcgggatctggggaggacccacaggctgctgaggatctgctgttgttgaatcgtcccctgacagacctgataagtctgctgatcccactcctacccaatgaggatccagaaatttttgatgtgtcatctaaatgcctatctatcctggtgcagctgtatggtggcgaaaacccagattcgctcagtcctgaaaatgtcgaaatattcgcacatctactgacttccaaagaggaccccaaagagcagaaacttcttctgagaattctgaggcggatgatcacctcaaatgaaaagcacctggaatccctaaagaacgccggaagcttactgcgcgcacttgaaagacttgccccaggttccggcagtttcgctgattctgctgttgcacctctggcattagaaattctccaggctgtgggccactag

SEQ ID NO: 195578 - DNA, 4613 bp, Artificial Sequence
  derived and/or modified sequence
atagagggatggtgggccgaccactatgactgttactccagcacttcccgccccagtctctggcctgtgggctcgtccaaaggcagggcgtgatgccctttgggtggagggaggggccctcgtggtctctcacttccgggccccagccaacaggaacggaaactgcacagccagtcggcttcctgagcttcttccggcgttctgtgtgctgccgtggaaaccgtatggacgaatccaaacctggaggggcgtcgcctccgtaaggctggtcggcttcttccgcgcgttccgctttgcttcactgctttctcccccattcttgggcctgtggacctgtcctgaggcagaggccgagatgcgcgcaaccgcgggagcagccaagtggactggactcttttcttgacttagctaccaggagctagagatgctgttattctattgtatgtgagaagtcggcccagagatggaaaactttattctgtatgaggagatcggaagaggaagcaagactgttgtctataaagggcgacggaagggaacaatcaattttgtagccattctttgtactgataagtgcaaaaggcctgaaataaccaactgggtccgtctcacccgtgaaataaaacacaagaatattgtaacttttcatgaatggtatgaaacaagcaaccacctctggctagtggtggaactctgcacaggtggttccttaaaaacagttattgctcaagatgaaaacctcccagaagatgttgtgagagaatttggaattgacctgattagtggattacatcatcttcataaacttggcattctcttttgtgacatttctcctaggaagatactcttggaagggcctggcacactgaagtttagcaacttttgcttggcaaaagtggaaggtgaaaatttggaagagttctttgctttggtggcagcagaggaaggaggaggtgataatggggaaaatgtcctgaagaaaagcatgaaaagtagagtcaaaggatctcctgtatatacagcaccagaagttgtgaggggtgctgacttttccatctccagtgacctctggtctttgggctgtctgctttatgaaatgttttcaggaaaacctccattcttctcagaaagtatttcagaattaactgaaaagatcttatgtgaagatcctttgccacctattccgaaagattcttctcgtcctaaagcttcttcagattttattaatttgcttgatgggttacttcaaagagatcctcagaaaagattgacttggacaaggctactgcagcattcattttggaagaaagcttttgctggagcagatcaggaatcaagcgtcgaagatctcagtctcagcagaaacactatggagtgttctgggccacaagattccaaggagcttttgcagaactctcagagtagacaagcaaaagggcacaagagtggtcaaccactaggtcactctttcagactagaaaatccaactgagtttcggcctaagagtactcttgagggtcaattgaatgaatccatgtttcttctcagttctcgtcctactcccagaactagcactgcagtggaagtaagtcctggtgaggatatgactcactgttcaccacagaagacttctcctctgaccaagattacaagtggacacctgagtcagcaggacctggaatcccagatgagagagcttatctacacggactcagatcttgttgtcacccccattatcgacaatccaaagataatgaaacagccaccagttaaatttgatgcaaaaatattgcatctaccaacatattcagtggataagttattatttctgaaagatcaagattggaatgactttttgcaacaagtgtgctcgcagatcgactccactgagaagagcatgggggcctcccgagccaagctgaatctcctttgctatttgtgcgtggtggctggtcaccaggaggtggccaccaggctcctccattcccccctgttccaattgctaatccagcatttgcggatagctccaaactgggatatacgggccaaggttgctcacgtaattggtttactggcttcgcacacagctgagctccaggaaaatacacctgttgttgaggcaattgttctcttaactgaattaattagggaaaacttcaggaacagcaaattaaaacagtgccttttaccaacccttggggagctgatctatcttgtagccacccaggaagaaaaaaaaaagaaccctagagagtgctgggctgttcccttggctgcatacacagtgctaatgaggtgccttcgggaaggggaagagcgtgttgtgaatcacatggcagcaaaaattattgaaaatgtctgtaccaccttttctgctcagtcccagggctttattacaggagaaataggacccattttgtggtacctattcagacactccactgctgattctcttaggataacagcagtatcggccttgtgtagaatcactcgccattctcctactgccttccagaatgttattgaaaaggtgggactgaactcagtaataaactccctggcctctgccatctgcaaagttcagcagtacatgttgaccttattcgctgccatgttgtcctgtgggattcatcttcaaagactaatccaagaaaagggttttgtctccacaattatccgtttacttgacagcccctcaacatgcattagagcaaaagccttcctggttcttctatatattttgatttataaccgtgagatgttgctgctcagttgccaagcaagactggtgatgtacatcgagagagacagcagaaagaccactccaggcaaggagcagcaaagtggcaatgaatacctgtccaaatgcctggatcttctcatctgtcacattgtgcaggagctgccacgaatcctgggtgacattcttaactccttggctaatgtttctggacgtaaacacccatcaacagttcaagtgaaacagctgaagttgtgtctccccctgatgcctgtagtgcttcacctcgtaacttcacaggtatttcgacctcaagttgtgacagaagagtttcttttcagctatggaactattcttagtcatattaaatctgtagactcaggagaaacgaacatagatggagccataggactgacagcatcagaagaatttatcaagatcacattgtcagcttttgaagcaataatacagtatcctattttattgaaagactatcgctccacggttgttgactatatactgccacccttggtgtccttggttcaaagccaaaatgtggagtggagactctttagcttgcggttgctctcagaaaccacatctctactcgtgaaccaggagtttggggatggcaaggagaaggccagtgttgattctgacagcaatcttctggctctcattcgagatgtcttacttccccagtatgagcacattcttttagaacctgacccagtaccagcatatgctctgaaactgctagtcgcgatgactgaacacaacccaactttcacaagacttgtggaagaaagcaaactgatcccactcatttttgaagtaactctggaacatcaggagagcattctgggtaataccatgcaaagtgtgattgcattactcagcaatctagttgcctgcaaagattcgaatatggaactactttatgaacaaggacttgtcagtcacatctgtaacctgctcactgaaactgccacactgtgcttggatgtggacaataaaaacaacaatgagatggcagctccactgctcttttccctgcttgatattttgcacagcatgctgacctatacctccggtattgtacggctggctttgcaggcccagaagtctggctcaggagaggaccctcaggctgcagaagacctgctgctgctcaacagacctctgacagacctgattagcctgctcattccactgcttcctaatgaagatcctgagatttttgatgtttcatccaagtgcctgtctatactggttcagctgtatggaggggaaaacccggacagcctctctcctgaaaatgtggaaatttttgctcatttactgacatccaaggaggacccaaaggagcagaagcttctgttaaggattctcagaagaatgatcacctccaatgagaagcacttggagagcctcaagaatgcaggcagcctcctgcgggctctggagcggctggcccctgggagtggttcatttgccgacagtgcggtggctcccttggccctggaaatcctccaagccgttgggcactaggcaagaaggtgcttagcacaagcccgccctgtggccccagccctcggatgcataagcaaggtcagctcccagacacctttgccacatcccctcacagctgtctttggacctaataaagtcagcttaacccagaacctggtggcccaagtgctcactaaccccagggcctagaaaactgactcagaatggacttccttggttcctgtggaatgcatctgggaagcccaggtttgttagctgttctcagaaatgttctttccctctctgtgtgggccaggtgggctaaggttagcactgcctgtggtaataaagcagtggatgc

SEQ ID NO: 195579 - protein, 930 aa, Artificial Sequence
  derived and/or modified sequence
MCSGSGRRRSSLSPTMRPGTGAERGGLMMGHPGMHYAPMGMHPMGQRANMPPVPHGMMPQMMPPMGGPPMGQMPGMMSSVMPGMMMSHMSQASMQPALPPGVNSMDVAAGTASGAKSMWTEHKSPDGRTYYYNTETKQSTWEKPDDLKTPAEQLLSKCPWKEYKSDSGKPYYYNSQTKESRWAKPKELEDLEGYQNTIVAGSLITKSNLHAMIKAEESSKQEECTTTSTAPVPTTEIPTTMSTMAAAEAAAAVVAAAAAAAAAAAAANANASTSASNTVSGTVPVVPEPEVTSIVATVVDNENTVTISTEEQAQLTSTPAIQDQSVEVSSNTGEETSKQETVADFTPKKEEEESQPAKKTYTWNTKEEAKQAFKELLKEKRVPSNASWEQAMKMIINDPRYSALAKLSEKKQAFNAYKVQTEKEEKEEARSKYKEAKESFQRFLENHEKMTSTTRYKKAEQMFGEMEVWNAISERDRLEIYEDVLFFLSKKEKEQAKQLRKRNWEALKNILDNMANVTYSTTWSEAQQYLMDNPTFAEDEELQNMDKEDALICFEEHIRALEKEEEEEKQKSLLRERRRQRKNRESFQIFLDELHEHGQLHSMSSWMELYPTISSDIRFTNMLGQPGSTALDLFKFYVEDLKARYHDEKKIIKDILKDKGFVVEVNTTFEDFVAIISSTKRSTTLDAGNIKLAFNSLLEKAEAREREREKEEARKMKRKESAFKSMLKQAAPPIELDAVWEDIRERFVKEPAFEDITLESERKRIFKDFMHVLEHECQHHHSKNKKHSKKSKKHHRKRSRSRSGSDSDDDDSHSKKKRQRSESRSASEHSSSAESERSYKKSKKHKKKSKKRRHKSDSPESDAEREKDKKEKDRESEKDRTRQRSESKHKSPKKKTGKDSGNWDTSGSELSEGELEKRRRTLLEQLDDDQ

SEQ ID NO: 195580 - protein, 826 aa, Artificial Sequence
  derived and/or modified sequence
MDVAAGTASGAKSMWTEHKSPDGRTYYYNTETKQSTWEKPDDLKTPAEQLLSKCPWKEYKSDSGKPYYYNSQTKESRWAKPKELEDLEGYQNTIVAGSLITKSNLHGMLTELKYSKQEECTTTSTAPVPTTEIPTTMSTMAAAEAAAAVVAAAAAAAAAAAAANANASTSASNTVSGTVPVVPEPEVTSIVATVVDNENTVTISTEEQAQLTSTPAIQDQSVEVSSNTGEETSKQETVADFTPKKEEEESQPAKKTYTWNTKEEAKQAFKELLKEKRVPSNASWEQAMKMIINDPRYSALAKLSEKKQAFNAYKVQTEKEEKEEARSKYKEAKESFQRFLENHEKMTSTTRYKKAEQMFGEMEVWNAISERDRLEIYEDVLFFLSKKEKEQAKQLRKRNWEALKNILDNMANVTYSTTWSEAQQYLMDNPTFAEDEELQNMDKEDALICFEEHIRALEKEEEEEKQKSLLRERRRQRKNRESFQIFLDELHEHGQLHSMSSWMELYPTISSDIRFTNMLGQPGSTALDLFKFYVEDLKARYHDEKKIIKDILKDKGFVVEVNTTFEDFVAIISSTKRSTTLDAGNIKLAFNSLLEKAEAREREREKEEARKMKRKESAFKSMLKQAAPPIELDAVWEDIRERFVKEPAFEDITLESERKRIFKDFMHVLEHECQHHHSKNKKHSKKSKKHHRKRSRSRSGSDSDDDDSHSKKKRQRSESRSASEHSSSAESERSYKKSKKHKKKSKKRRHKSDSPESDAEREKDKKEKDRESEKDRTRQRSESKHKSPKKKTGKDSGNWDTSGSELSEGELEKRRRTLLEQLDDDQ

SEQ ID NO: 195581 - DNA, 2793 bp, Artificial Sequence
  derived and/or modified sequence
atgtgctccggctcaggacgacgaaggtctagcttgtctcctaccatgcggcccggtaccggcgctgaacgcggaggcctgatgatgggccacccgggaatgcactacgccccaatgggcatgcatcccatgggccagcgcgcgaacatgccccccgtgcctcatggcatgatgccccagatgatgcccccaatgggtggaccccccatgggccagatgccaggtatgatgtcgagcgtgatgcctggtatgatgatgtcccacatgtcgcaggcctctatgcagccagcccttccacccggcgtcaacagtatggatgtggcagctggtactgcttctggggcgaagtcgatgtggacagagcataagtctccggatgggcgaacgtactactacaacacagagacgaagcaatccacctgggagaagccagatgatttgaaaacgcccgcagagcaactgctaagcaagtgcccctggaaggagtacaagtcagactcaggcaaaccttactactacaattcccagactaaagaaagcaggtgggcaaagccgaaagagctcgaagatcttgagggatatcagaacaccattgtggccggatcactcattactaaatcaaacctgcacgctatgatcaaagccgaagagtccagcaagcaggaggagtgcacaacaacctcaacagctccggtccctaccaccgagatacctaccacaatgtctaccatggcggctgcagaggcagcagcagccgtggtcgctgccgctgcagctgcagccgctgcagctgccgctgccaacgccaatgcatcaacttcagctagcaatactgtctccggaaccgtgcctgtggtgccagaaccggaagtcacctctatcgtcgctaccgtcgtagataacgagaacaccgtcacaatcagtactgaagagcaggcccagctaaccagcacacccgccatacaggatcaatctgtggaagtgtccagcaatacaggagaagaaacatccaaacaggagaccgtcgcagacttcactcctaaaaaagaggaggaggagtcacagccggccaagaagacgtacacttggaacaccaaggaggaggctaaacaggcctttaaggagctcctgaaggaaaagagggttccatcgaacgcttcctgggagcaggctatgaaaatgatcatcaatgacccgcggtattccgccctggccaagctgtccgagaagaaacaggcatttaacgcctataaggtgcagactgagaaggaagagaaagaggaggctcgctctaaatataaggaggccaaagagagttttcagaggttcctggagaatcacgagaagatgacctccactactcggtacaaaaaagcggaacagatgttcggcgagatggaggtttggaacgctatttctgagcgggatcgtctggagatctacgaggatgttctatttttcctaagcaaaaaggagaaggaacaggctaaacagcttagaaagagaaactgggaagctctgaaaaacatccttgacaatatggcaaatgtcacctacagcacaacatggagtgaggcacaacagtacttaatggacaaccccacctttgccgaggatgaagagcttcaaaacatggataaagaagatgcccttatatgttttgaggaacatatacgggctctagaaaaagaagaagaagaagagaagcagaaaagcctcttgagagagcggcgccggcagcggaaaaatcgcgagtcatttcagatctttttggatgaacttcacgagcatggacaacttcattcgatgtccagctggatggagctgtaccctaccatcagcagtgacatccggttcacaaacatgctgggtcaacccgggtccaccgcgctagatctcttcaagttttatgtcgaagacctaaaggcaaggtaccatgacgagaagaagatcatcaaggatatcttaaaagataaggggtttgtggtggaagtgaataccacgtttgaggacttcgttgctatcatctcgagtaccaaacgatcaactacattggatgcagggaacataaagcttgccttcaacagccttctggagaaagcggaggcccgtgagcgggagcgcgaaaaagaagaggccagaaagatgaaacggaaggaatctgctttcaaatctatgcttaagcaggccgctccacccattgaactcgacgcagtgtgggaggacataagagaaaggttcgtgaaggaacctgctttcgaggacattaccctggagtccgagagaaaaagaattttcaaagacttcatgcatgtcttggagcatgagtgtcagcatcaccactcaaagaataagaaacacagcaagaagagtaaaaagcaccacaggaagaggagccggtctagatcaggcagcgactccgacgatgatgacagccactcgaagaagaagcggcagcgaagtgaatcccggagtgcaagtgagcatagctcttccgcagaatctgagcgatcttacaagaaatcaaagaaacacaaaaaaaaaagtaaaaagagacggcacaagtcggacagccctgaaagcgacgcagagcgggagaaggataaaaaagagaaggaccgggaaagtgagaaggatcgcactaggcagaggtccgagagtaagcacaaatctcccaagaaaaagaccggcaaggactccggaaactgggatacatctggttccgagctaagtgaaggcgaactggagaagcgccgtagaaccctgttagagcagctagatgatgaccagtag

SEQ ID NO: 195582 - DNA, 2481 bp, Artificial Sequence
  derived and/or modified sequence
atggacgtcgccgccgggaccgcatccggcgccaaatcgatgtggacggagcacaagtcccctgatgggcggacttattactataatacagagaccaagcaaagcacctgggaaaagccggatgatctcaagacccccgccgaacagttgttgtcaaaatgtccgtggaaagagtataagtctgatagcgggaaaccatattactacaactctcaaactaaggagtcaaggtgggccaagccaaaagagcttgaagacctagagggctaccaaaatactattgtcgctggaagtctcatcacgaagagcaatctccatggaatgttgaccgagttgaagtactcaaagcaggaagaatgtacaacaacgagtaccgcccctgtgccgacgacagagatcccgactaccatgagcaccatggccgccgcagaggcagctgcagccgtggttgctgccgccgcagcggccgctgctgcggcagcagccgctaacgcaaatgccagtacgtctgcttctaacactgtaagtggtaccgtcccggtcgtcccagagcctgaagtgacgtccatagtggccacggtagtggacaatgaaaatactgtgactataagtaccgaggaacaggcccagctcacttctaccccagctattcaggaccagtccgtggaggtgtcgtctaacactggagaggagacttctaagcaagaaacggtggctgactttacccccaaaaaagaggaggaagagagccagcccgctaagaaaacttacacctggaacacaaaggaggaagctaagcaagcattcaaggaactattgaaggaaaaaagagtcccctccaatgcctcgtgggagcaagcaatgaagatgatcatcaacgatcccagatacagcgccctggcaaagctgagtgaaaaaaaacaggccttcaacgcttacaaggtgcagaccgaaaaagaggagaaggaggaggcaagaagcaagtataaggaggccaaggaatcatttcagcgttttttagagaatcacgaaaagatgacaagcaccaccagatataaaaaagccgaacagatgtttggagagatggaagtctggaatgctatctctgagcgggacagactcgaaatatatgaggatgtgctgttttttctatctaaaaaggagaaggaacaggctaaacagctgcgaaagcgcaactgggaggcactgaagaatattctagacaacatggccaacgtgacatattctactacttggagtgaagcccagcagtacctgatggataatcccaccttcgctgaagacgaggaactacaaaatatggacaaagaggatgccctgatatgtttcgaggagcatatcagagcccttgagaaggaggaggaggaagagaaacagaagagtttgctgcgcgagagacgacgacagagaaaaaaccgcgaaagcttccagatctttttggatgagctccacgaacacggacagctccattctatgagtagttggatggaactctaccctaccattagttcagatatccgctttaccaacatgcttggacaaccagggtctactgccctagacctgttcaagttctacgtcgaggatctgaaggcaaggtaccatgatgaaaagaagattataaaggacatcttaaaagacaaaggcttcgtggtcgaggttaatacaaccttcgaggactttgtggccatcatcagcagcaccaagagatctaccaccttggatgccgggaacatcaagctcgcatttaacagcctcctggaaaaggctgaagctagggagcgtgaacgcgagaaggaggaagctagaaagatgaagcgtaaagagtccgccttcaagtcaatgctgaagcaggctgccccaccaatcgaacttgatgctgtctgggaggatattcgggagagatttgttaaagagccggcgttcgaagacatcacacttgaatctgagagaaaacgcattttcaaagactttatgcatgttctagaacatgagtgccagcatcaccattctaagaacaaaaaacactccaagaagtccaagaaacaccaccgcaaacgtagccggagcaggagcggaagcgatagcgacgacgacgattcgcatagcaaaaaaaagcgccagcggtccgagagcagatccgcatccgagcactcaagctctgccgagtccgagcggagctataagaaatcaaaaaaacacaaaaaaaaaagcaaaaagcgcagacataagagcgactctccagagagcgacgccgaacgtgaaaaagataaaaaggagaaagatcgggagtccgagaaagaccgcacacgccagcgttctgaaagcaagcataagtcgcctaagaagaaaaccggaaaggattccggcaattgggatacttcaggctcagagctttccgagggcgagctggaaaagcgtaggcgaaccctgctcgagcagttggatgacgatcaatag

SEQ ID NO: 195583 - DNA, 2793 bp, Artificial Sequence
  derived and/or modified sequence
atgtgcagcggcagcggcagaagaagaagcagcctgagccccaccatgaggcctggcaccggggctgagcggggcggcctgatgatgggccaccctggcatgcactacgcccccatgggcatgcaccccatgggccagagggccaacatgcctcctgtgccccacggcatgatgccccagatgatgccacccatgggcggcccccccatgggccagatgcctggcatgatgagctctgtgatgcctggcatgatgatgagccacatgagccaggcctccatgcagcctgccctgcccccaggagtgaacagcatggatgtggccgccggcacagccagcggggccaagtccatgtggacagagcacaagagcccagatggccgcacctactactacaacacagagaccaagcagagcacctgggagaagccagatgacctgaagaccccagctgagcagctgctgagcaaatgtccctggaaggagtacaagagtgacagcggcaagccctactactacaacagccagaccaaggagagccgctgggccaagcccaaggagctggaggacctggagggctaccagaacaccatcgtggccggcagcctcatcaccaagagcaacctgcacgccatgatcaaggccgaggagagcagcaagcaggaggagtgcaccaccaccagcacagcccctgtgcccaccacagagatccccaccaccatgagcaccatggctgctgctgaggccgctgctgctgtggtggccgctgctgctgctgctgctgctgctgctgctgctgccaatgccaatgccagcaccagcgccagcaacacagtgtctggcaccgtgcctgtggtgcctgagcctgaggtgaccagcatcgtggccaccgtggtggacaatgaaaatacagtgaccatcagcacagaggagcaggcccagctgaccagcaccccagccatccaggaccagagcgtggaggtgagcagcaacacaggagaggagaccagcaagcaggagaccgtggccgacttcacccccaagaaggaggaggaggagagccagcctgccaagaagacctacacctggaacaccaaggaggaggccaagcaggccttcaaggagctgctgaaggagaagagggtgcccagcaatgcctcctgggagcaggccatgaagatgatcatcaatgacccccgctacagcgccctggccaagctgtctgagaagaagcaggccttcaatgcctacaaggtgcagacagagaaggaggagaaggaggaggcccggagcaagtacaaggaggccaaggagagcttccagcgcttcctggagaaccacgagaagatgaccagcaccacccgctacaagaaggccgagcagatgtttggagagatggaggtgtggaatgccatcagcgagcgggaccggctggagatctatgaagatgtgctcttcttcctgagcaagaaggagaaggagcaggccaagcagctgaggaagaggaactgggaggccctgaagaacatcctggacaacatggccaacgtgacctacagcaccacctggagcgaggcccagcagtacctgatggacaaccccacctttgctgaagatgaggagctgcagaacatggacaaggaggatgccctgatctgctttgaggagcacatccgggccctggagaaggaggaggaggaggagaagcagaagagcctgctgcgggagcggcggcggcagaggaagaaccgggagagcttccagatcttcctggatgagctgcatgaacatggccagctgcacagcatgagctcctggatggagctgtaccccaccatcagcagtgacatccgcttcaccaacatgctgggccagcccggcagcacagccctggacctcttcaagttctacgtggaggacctgaaggcccgctaccatgatgagaagaagatcatcaaggacatcctgaaggacaagggctttgtggtggaggtgaacaccacctttgaggactttgtggccatcatcagcagcaccaagaggagcaccaccctggatgctggcaacatcaagctggccttcaacagcctgctggagaaggccgaggcccgggagcgggagcgggagaaggaggaggccaggaagatgaagaggaaggagagcgccttcaagtccatgctgaagcaggccgccccacccatcgagctggatgctgtgtgggaggacatccgggagagatttgtgaaggagcccgcctttgaggacatcaccctggagagcgagaggaagaggatcttcaaggacttcatgcacgtgctggagcacgagtgccagcaccaccacagcaagaacaagaagcacagcaagaagagcaagaagcaccacaggaagaggagccgcagccgcagcggcagtgacagtgatgatgatgacagccacagcaagaagaagaggcagaggtctgagagccgcagcgccagcgagcacagcagcagcgctgagagcgagaggagctacaagaagagcaagaagcacaagaagaagagcaagaagaggaggcacaagagtgacagccctgagagtgatgctgagcgggagaaggacaagaaggagaaggaccgggagagcgagaaggacaggacccggcagaggtctgagagcaagcacaagagccccaagaagaagacaggcaaggacagcggcaactgggacaccagcggcagcgagctgtctgagggggagctggagaagagaagaaggaccctgctggagcagctggatgatgaccagtag

SEQ ID NO: 195584 - DNA, 2481 bp, Artificial Sequence
  derived and/or modified sequence
atggatgtggccgccggcacagccagcggggccaagtccatgtggacagagcacaagagcccagatggccgcacctactactacaacacagagaccaagcagagcacctgggagaagccagatgacctgaagaccccagctgagcagctgctgagcaaatgtccctggaaggagtacaagagtgacagcggcaagccctactactacaacagccagaccaaggagagccgctgggccaagcccaaggagctggaggacctggagggctaccagaacaccatcgtggccggcagcctcatcaccaagagcaacctgcacggcatgctgacagagctgaagtacagcaagcaggaggagtgcaccaccaccagcacagcccctgtgcccaccacagagatccccaccaccatgagcaccatggctgctgctgaggccgctgctgctgtggtggccgctgctgctgctgctgctgctgctgctgctgctgccaatgccaatgccagcaccagcgccagcaacacagtgtctggcaccgtgcctgtggtgcctgagcctgaggtgaccagcatcgtggccaccgtggtggacaatgaaaatacagtgaccatcagcacagaggagcaggcccagctgaccagcaccccagccatccaggaccagagcgtggaggtgagcagcaacacaggagaggagaccagcaagcaggagaccgtggccgacttcacccccaagaaggaggaggaggagagccagcctgccaagaagacctacacctggaacaccaaggaggaggccaagcaggccttcaaggagctgctgaaggagaagagggtgcccagcaatgcctcctgggagcaggccatgaagatgatcatcaatgacccccgctacagcgccctggccaagctgtctgagaagaagcaggccttcaatgcctacaaggtgcagacagagaaggaggagaaggaggaggcccggagcaagtacaaggaggccaaggagagcttccagcgcttcctggagaaccacgagaagatgaccagcaccacccgctacaagaaggccgagcagatgtttggagagatggaggtgtggaatgccatcagcgagcgggaccggctggagatctatgaagatgtgctcttcttcctgagcaagaaggagaaggagcaggccaagcagctgaggaagaggaactgggaggccctgaagaacatcctggacaacatggccaacgtgacctacagcaccacctggagcgaggcccagcagtacctgatggacaaccccacctttgctgaagatgaggagctgcagaacatggacaaggaggatgccctgatctgctttgaggagcacatccgggccctggagaaggaggaggaggaggagaagcagaagagcctgctgcgggagcggcggcggcagaggaagaaccgggagagcttccagatcttcctggatgagctgcatgaacatggccagctgcacagcatgagctcctggatggagctgtaccccaccatcagcagtgacatccgcttcaccaacatgctgggccagcccggcagcacagccctggacctcttcaagttctacgtggaggacctgaaggcccgctaccatgatgagaagaagatcatcaaggacatcctgaaggacaagggctttgtggtggaggtgaacaccacctttgaggactttgtggccatcatcagcagcaccaagaggagcaccaccctggatgctggcaacatcaagctggccttcaacagcctgctggagaaggccgaggcccgggagcgggagcgggagaaggaggaggccaggaagatgaagaggaaggagagcgccttcaagtccatgctgaagcaggccgccccacccatcgagctggatgctgtgtgggaggacatccgggagagatttgtgaaggagcccgcctttgaggacatcaccctggagagcgagaggaagaggatcttcaaggacttcatgcacgtgctggagcacgagtgccagcaccaccacagcaagaacaagaagcacagcaagaagagcaagaagcaccacaggaagaggagccgcagccgcagcggcagtgacagtgatgatgatgacagccacagcaagaagaagaggcagaggtctgagagccgcagcgccagcgagcacagcagcagcgctgagagcgagaggagctacaagaagagcaagaagcacaagaagaagagcaagaagaggaggcacaagagtgacagccctgagagtgatgctgagcgggagaaggacaagaaggagaaggaccgggagagcgagaaggacaggacccggcagaggtctgagagcaagcacaagagccccaagaagaagacaggcaaggacagcggcaactgggacaccagcggcagcgagctgtctgagggggagctggagaagagaagaaggaccctgctggagcagctggatgatgaccagtag

SEQ ID NO: 195585 - DNA, 2793 bp, Artificial Sequence
  derived and/or modified sequence
atgtgcagcggcagcggccggcggcggagcagcctgagccccaccatgaggcccggcaccggagctgaacggggcggcctcatgatgggccatccagggatgcattacgcccctatggggatgcatccaatgggccaacgcgctaatatgccccctgtaccccacggtatgatgcctcagatgatgcccccgatgggggggcccccaatgggccagatgcctggtatgatgagttctgttatgccgggcatgatgatgtcccatatgagccaggcgagcatgcaacccgcattgccccctggagtgaacagtatggatgttgccgcggggacagcctctggagccaaatcgatgtggacagaacacaagagtcctgatgggcggacctactactataataccgagacaaagcagtcaacgtgggagaagccggatgacttgaaaacaccagcagaacagcttctgtctaagtgtccatggaaagaatataaatcggactcagggaagccctactactacaactcacagacgaaagagtctaggtgggctaaaccgaaggaattggaggatctggagggctaccagaacactatcgtggccgggtccctcattactaagtccaatttgcacgcaatgattaaagcggaggagagttctaagcaggaagagtgcacaacgaccagtactgcccctgtgccgactaccgagattccaacgaccatgtccactatggccgctgccgaagcagcagccgcggtggtcgcagccgcagccgctgcagctgccgccgccgcagcggctaatgccaatgcctctacatctgccagtaacacggtctccgggacagtgccggtggttcccgagcctgaggttacctccatagtagctacagtcgtcgataacgaaaatacagttactattagtaccgaagaacaggcacagctgacaagcactccggcgattcaggaccagagtgtagaggttagctccaataccggggaagaaactagtaaacaggaaacagttgccgattttacgcctaagaaagaagaagaagagtctcaacccgctaaaaagacctacacttggaacaccaaggaagaggctaaacaggcttttaaggagctcctcaaggagaagagagtgccgtccaacgcctcctgggagcaggccatgaagatgatcatcaatgaccctaggtatagcgccctcgccaagctatccgagaaaaagcaggcattcaatgcatacaaagtgcagactgagaaggaggagaaggaagaagccagaagtaagtacaaggaagccaaggagtccttccagagatttcttgaaaatcacgaaaaaatgacttctacaacgcgctacaagaaagcggagcagatgttcggcgaaatggaagtgtggaacgcaattagtgagagagatcgtctggaaatatacgaagacgtgctgttcttcctttcaaagaaagaaaaagagcaggctaaacagctgagaaaaagaaactgggaggcgcttaagaacattcttgacaatatggctaacgtaacttactctacaacatggtcagaggcacagcaatacctgatggataatcctacattcgccgaggatgaggagctgcagaacatggataaggaggacgctctgatatgttttgaagagcacattagagccctggaaaaagaggaagaggaggagaagcaaaagtctctgctccgcgagcgcaggcggcaaaggaagaaccgagagtcatttcaaatcttccttgacgaattgcacgagcatggtcaactccactccatgtcttcctggatggaactctaccctacaatctccagtgatattcggttcactaacatgctgggacaacctggatccactgctctcgatctgtttaagttctatgtggaagacctaaaggctagataccatgacgagaaaaagataatcaaggacatattgaaggataagggattcgtggtagaggtgaatactacctttgaagactttgtcgcgatcatcagctccacgaagcggtcaaccaccctggacgccgggaacattaagctagccttcaattctctcctagaaaaggccgaggcccgagagcgcgagcgggagaaggaggaagctcggaaaatgaaaagaaaggaaagtgcattcaaatctatgcttaagcaggctgccccacccatagagttagacgcagtttgggaggatatcagagagcgctttgtgaaggagcctgcgttcgaggacatcaccctcgagtctgagagaaaacgtatctttaaagatttcatgcatgtcctcgaacacgaatgccagcatcatcattcaaagaataaaaaacattctaagaaatcgaagaaacaccatagaaagagaagccgctctcgttcaggtagcgacagtgatgacgatgattctcactctaagaagaagaggcagagaagcgaatctaggtccgcttccgagcattcgagcagcgccgagagcgaacggtcatataaaaagtctaagaaacataagaagaaatcaaagaaacggcggcacaagtcagatagcccagaatctgatgcagaacgggagaaggacaagaaagagaaagaccgggaatcagaaaaggaccgcacccgccagcgttcggaaagtaagcataagtcccccaagaagaagacgggcaaggattccggcaattgggacacctctggttccgaactctccgagggagagctggagaaaagacgccgtacgttgctggagcagttggatgatgaccagtag

SEQ ID NO: 195586 - DNA, 2481 bp, Artificial Sequence
  derived and/or modified sequence
atggacgtggccgccggcaccgccagcggcgccaagagcatgtggactgaacacaagtccccagacggtagaacctactattataatacagagacgaaacagagtacttgggaaaaaccagatgatctcaagactccagcggagcaactcttgagtaaatgcccgtggaaggaatataaatcagacagtggcaaaccctattactacaattcccagaccaaagagtccaggtgggcaaaacccaaagaactcgaagacctggagggctatcagaacactatcgtcgcagggtctcttattactaagagcaacttgcacgggatgctgacagaactgaagtactcaaagcaggaagaatgtaccactacctctaccgccccagtccccactaccgagattccaacgacaatgagtactatggcagctgctgaggcagccgcggctgtagttgccgctgccgccgctgccgccgcagctgcagccgctgcaaatgccaatgcgtcgacttccgcatcaaataccgtatctgggacggttcccgtagtgcctgagcccgaagtaacgagcatcgtggcaaccgtcgtggacaatgagaacaccgtaacaatctccacagaagagcaagcacagctgaccagtaccccagctattcaggaccagagtgtagaggtgtcctcaaacacaggggaagagacctccaagcaggagacggtggcagattttacgcccaagaaagaggaggaggaatctcagcccgccaaaaagacatacacctggaacaccaaagaggaggctaaacaggccttcaaggaattactgaaagaaaaaagggtgccctccaatgcctcttgggaacaggcaatgaaaatgattatcaatgatcccaggtacagcgcgctcgccaaattaagcgaaaaaaagcaggcttttaatgcctataaagtgcagaccgagaaggaggagaaagaggaggctcgcagcaagtacaaggaagcaaaggagtcctttcagcggtttcttgagaatcacgaaaagatgacttccactactcgatacaagaaagccgaacagatgtttggcgaaatggaagtgtggaatgccattagtgagcgggaccggttggaaatctatgaagacgtgctgttttttttgagtaagaaagagaaagaacaagctaagcagttaagaaaaaggaactgggaggccttaaagaatattctcgacaacatggcgaatgtgacatattcaacgacttggagcgaggcgcaacagtacctcatggacaatccaacatttgccgaggatgaagagctccagaatatggacaaggaagacgcattaatctgtttcgaagaacacataagggcgctggagaaggaggaggaagaagagaagcagaaatctcttctgagagaacgtcgtcggcagagaaaaaatcgggaatcctttcagatttttcttgatgagctccatgaacatggacaattgcatagcatgtcctcctggatggaattataccccacaatttctagtgatatacggttcacaaacatgctgggacaaccaggaagcaccgctctggatctgtttaagttctacgtcgaagatttgaaggcacgctaccatgatgagaaaaagatcatcaaagatattctgaaggacaagggcttcgtagtggaggtaaacactaccttcgaagactttgtggccattatttcctcaacaaagcgctcaacaaccctcgacgccggcaatataaagctggctttcaacagtttactggaaaaagctgaggcaagagagcgagaacgcgaaaaggaggaggccagaaaaatgaagcgcaaagagtctgcgttcaagagcatgctcaagcaggcagcccctcctatcgagctggacgcagtgtgggaggatattcgcgagcgcttcgtgaaggaacctgccttcgaggatataaccctggagagcgaaaggaagaggattttcaaagatttcatgcatgtccttgagcatgaatgtcagcaccaccattcaaagaataaaaagcactccaagaaatctaaaaagcaccatcgcaagaggtctagatcgcgtagcggctccgactccgatgacgacgactcccattcaaagaaaaagcgacaaagaagcgagtctcgttccgcatctgaacacagcagttccgccgagtctgaacgatcctataaaaaatctaaaaaacataagaagaaatctaaaaaaagacgccacaagagcgatagcccagaaagtgatgctgagcgtgagaaggataaaaaggaaaaagatcgggaatcagaaaaggaccgtacaagacagagatcagagagtaaacacaagtcacctaaaaaaaagaccgggaaggattcggggaactgggacacatcaggaagcgagcttagcgaaggggaactggagaaaagaaggcgaactttattggaacagcttgatgatgatcagtag

SEQ ID NO: 195587 - DNA, 2793 bp, Artificial Sequence
  derived and/or modified sequence
atgtgttcaggttcaggtcgcaggaggagttccctgagcccgacaatgcgcccaggtacgggagcagagaggggcggactgatgatgggccacccgggaatgcattatgctccaatggggatgcaccctatgggtcagcgtgccaacatgcctcccgttccgcacggtatgatgcctcagatgatgccaccaatggggggacctcccatgggtcagatgcccggaatgatgtcttcggtgatgcccggtatgatgatgtcgcatatgagccaggcttccatgcagcctgccctccctcccggagttaactctatggacgtggctgccggtaccgcatctggcgcaaaatccatgtggaccgagcacaagtcacccgatggaaggacatattactacaataccgagaccaaacagagcacatgggagaagccagacgacttgaaaacaccagctgaacagctgttgtccaaatgcccgtggaaagaatacaagagcgacagcgggaagccctattattacaacagccagaccaaagaatcacggtgggcaaagcctaaagagctggaagacctcgagggctatcagaatactatcgtggctgggagtttgatcacaaagtccaaccttcacgctatgattaaagccgaagagagttctaaacaagaggaatgcacaacgacatctactgcgccagtgcccacaacagaaattccaaccactatgagtacaatggcggctgctgaagccgcagctgccgtcgtagcagccgcagccgctgccgctgcagcagcagccgctgccaatgccaacgctagtaccagcgcttccaataccgtgagtggcaccgtgccggtggtgcccgagcccgaagtgacctcgatcgtggctaccgtggtagataatgaaaatactgttacaatctctactgaggagcaggcccagcttactagcaccccagctattcaggaccagagcgtcgaagtctcctctaacactggcgaggagacctcaaagcaggaaactgtggccgactttacccctaaaaaagaggaagaggaaagtcagccagcaaagaaaacatacacctggaataccaaagaggaagcaaagcaggcgttcaaagagctgctgaaagaaaaacgcgtgccatccaatgcgtcctgggagcaggcaatgaaaatgatcatcaacgacccaagatactcagcattggcaaaactctcagagaaaaaacaggcctttaacgcatacaaggtgcagacagaaaaggaggaaaaggaagaagcacgcagtaagtataaagaggccaaagagtcattccagcgctttttagaaaaccacgagaagatgacaagcacgactcgatataagaaggctgaacagatgtttggcgagatggaagtgtggaatgcaatctctgaacgggatagacttgaaatatatgaagacgtgctatttttcctgagcaagaaggagaaggaacaagccaagcaactgcggaaacggaactgggaagcattgaaaaatatcctggacaacatggctaatgtaacctacagcacaacatggtctgaagctcagcaatacctgatggataacccaacctttgctgaagatgaggagctacagaatatggataaagaggacgctctaatctgctttgaggaacacatcagagctctggagaaagaggaggaagaggagaagcagaagtctttgctacgagaaagacgcaggcagaggaagaaccgggagtccttccagatctttctggacgagctccatgaacatggacagcttcacagcatgtcttcatggatggagctctacccaacaatctcttccgacatacgcttcacgaatatgttaggtcagcccggatctactgcactcgacctattcaagttctacgtagaagatctgaaagctaggtaccacgacgaaaaaaaaattattaaggacatcctgaaggacaaagggttcgtcgtggaggtgaacaccactttcgaggacttcgtagcgatcatttcgtctacaaagaggtctactaccctcgatgccggaaatatcaaactggcttttaacagcctgctggaaaaagccgaagccagagagagggagcgcgagaaagaagaagcgaggaaaatgaaacggaaggagagtgcttttaaatcaatgctaaagcaagccgctccacctattgaactggacgcggtttgggaggatatccgcgaaagatttgtcaaagagcccgctttcgaagatatcaccttggaatcagagaggaagcgcatcttcaaagactttatgcacgttctggagcacgaatgtcagcaccaccattccaagaacaagaagcatagtaaaaaatctaaaaaacaccaccgaaaacgaagtcgcagccggtcgggttctgacagtgatgacgatgatagccactctaaaaagaaacggcagcggtccgaatctcgaagtgcgagcgaacattcgtccagcgccgaatctgagagaagttacaagaagtctaaaaagcacaagaagaagagcaagaaacggcgtcacaagagcgacagcccagagagtgacgctgagcgggagaaggataaaaaagagaaggatcgcgagtcagagaaagaccggactaggcagaggtctgagtcgaaacacaagtctccaaagaaaaagactgggaaagactcagggaactgggataccagcggaagcgagctctctgagggcgagctggagaaacgccgacgcaccctcctcgagcagctcgatgacgaccagtag

SEQ ID NO: 195588 - DNA, 2481 bp, Artificial Sequence
  derived and/or modified sequence
atggatgtggcagctggtactgcatccggtgcaaaatctatgtggacggaacacaagtcacccgacggccgaacctactactacaacacagagaccaagcagagcacttgggagaaaccagacgatctgaagactccagccgaacaactgcttagtaaatgcccatggaaagagtataaatctgacagtggcaagccctactattacaactcccagacaaaggagtctagatgggctaagcctaaggagctggaggatctagaaggctaccagaatacgatagtcgctggaagcttaattactaaatccaatcttcatggaatgctgaccgagttgaagtacagcaaacaggaggaatgcacgaccaccagtactgccccagtgccaacaacagagattcctaccaccatgtcaaccatggccgctgccgaggccgcagccgcagtagttgccgcagccgcagcagctgcagcagccgcagccgcagccaatgccaatgcaagtacgagcgcttctaacaccgtcagcgggaccgttccagtggtccccgagccggaagttactagcatagtggccaccgtagtcgacaacgagaataccgtaaccatctccacagaggagcaagcccaactgacgtccacgcctgcaattcaagaccagagcgtggaagtttcttctaacacaggagaggaaacttccaaacaggagacagtggctgacttcacacctaagaaagaggaggaagagtcacagccggcaaagaaaacatacacgtggaataccaaggaggaggctaaacaggctttcaaggagttgctgaaagagaagagggtgccttctaacgcgtcttgggagcaagcaatgaagatgattatcaacgaccccagatactcagcattagcgaaactctccgagaagaaacaagcgtttaacgcttacaaagtacagactgagaaggaggaaaaagaagaggcacggagcaagtataaagaggcgaaggagagtttccagagatttttggagaaccatgagaagatgacgtctactacaagatataaaaaggcagaacaaatgtttggagagatggaggtgtggaatgctatctccgaacgcgatcgcttggagatttacgaggatgtgctgttttttttgtcaaaaaaagaaaaagagcaggctaaacagctccgcaaaagaaattgggaagctctgaaaaatatcttggacaacatggccaatgttacctactcgactacatggtctgaggctcagcagtacttaatggacaatcccacttttgcggaggatgaagagcttcagaatatggataaggaggatgctctgatttgttttgaggagcacatcagagcactcgaaaaagaggaggaagaagagaaacagaagtctcttttacgagaacggaggaggcaacgtaagaacagagaatccttccaaatttttctggacgagctgcacgagcacggacagctgcactccatgtcttcatggatggaactctacccaaccatcagctctgacattcgtttcacaaatatgttagggcagccgggatctaccgcgctcgatctctttaaattttacgtcgaggacctgaaagcgagatatcatgatgaaaagaagatcatcaaggacatcctgaaggacaaagggttcgtagttgaggtgaatacaacatttgaggactttgtggccatcatcagcagtaccaagaggagcacaacccttgatgcaggaaacatcaagcttgccttcaactctctcctggagaaagcagaagcaagagagcgggaacgcgagaaggaggaagccaggaaaatgaaacgcaaagaaagtgctttcaagagtatgttgaaacaggccgctcctccaatcgagctggacgcagtttgggaagacatccgagagcggtttgttaaagaaccggcatttgaggacatcacacttgaatcagagagaaagcgcatctttaaggatttcatgcatgtgctcgagcatgaatgccagcaccatcacagcaaaaacaagaaacatagtaagaagtcaaagaagcaccaccgcaaaaggtctagaagtcggtcaggatcagacagcgacgatgacgacagccactccaagaagaaacgccagcggtccgagagtcggagcgcatcagagcacagttcctccgctgaaagcgaaaggtcctataagaaatcaaagaaacataagaaaaaatcaaagaagagacggcacaagtcagattccccggaatccgatgccgaaagggagaaggacaagaaggagaaagatcgtgaatcagaaaaggacaggacccgccagcgctctgagtcaaagcacaagagccccaagaaaaaaacagggaaggacagcgggaactgggataccagcggaagcgaactcagcgaaggagagttagaaaaacggcgacgcactcttctggagcagttggacgacgaccaatag

SEQ ID NO: 195589 - DNA, 3134 bp, Artificial Sequence
  derived and/or modified sequence
actcagatcgcttcttgttggtatgtgtagcggcagtggccgccggcggagcagtctgagcccgacgatgaggccggggacgggagctgagcgtggaggcctcatgatggggcaccctggcatgcattatgccccaatgggaatgcaccctatgggtcagagagcgaatatgcctcctgtacctcatggaatgatgccgcagatgatgccccctatgggagggccaccaatgggacaaatgcctggaatgatgtcgtcagtaatgcctggaatgatgatgtctcatatgtctcaggcttccatgcagcctgccttaccgctaaactaaacggatattcactctgaagtgggataaatgaagatgtggagtttcatgttcatgtagggcaggttttgccactatagtgagttttggtaccatacttgaaaaaagttggctttcagagggttttggtttccagaattgtgggtaaaggattgaggaccttgtgtacacttggtgaccatataacatttaaactactcccgtagtctcggttgctgatctcttttacaatttatagcaagctcggggaactgagaccactaaaagttttgctaagaatatgagtcagaggcttgaggattatacatagcagccaggagtaaatagtatggatgtagcagcaggtacagcatctggtgcaaaatcaatgtggactgaacataaatcacctgatggaaggacttactactacaacactgaaaccaaacagtctacctgggagaaaccagatgatcttaaaacacctgctgagcaactcttatctaaatgcccctggaaggaatacaaatcagattctggaaagccttactattataattctcaaacaaaagaatctcgctgggccaaacctaaagaacttgaggatcttgaaggataccagaataccattgttgctggaagtcttattacaaaatcaaacctgcatggaatgttaacggaattaaagtatagtaagcaagaagagtgcaccacaacatcaacagccccagtccctacaacagaaattccgaccacaatgagcaccatggctgctgccgaagcagcagctgctgttgttgcagcagcagcagcggcagcagcagcagcagctgcagccaatgctaatgcttccacttctgcttctaatactgtcagtggaactgttccagttgttcctgagcctgaagttacttccattgttgctactgttgtagataatgagaatacagtaactatttcaactgaggaacaagcacaacttactagtacccctgctattcaggatcaaagtgtggaagtatccagtaatactggagaagaaacatctaagcaagaaactgtagctgattttactcccaaaaaagaagaggaggagagccaaccagcaaagaaaacatacacttggaatacaaaggaagaggcaaagcaagcttttaaagaattattgaaagaaaagcgggtaccatcgaatgcttcatgggagcaggctatgaaaatgattattaatgatccacgatacagtgctttggcaaagttaagtgaaaaaaagcaagcctttaatgcctataaagtccagacagaaaaagaagaaaaagaagaagcaagatcaaagtacaaagaggctaaggaatcctttcagcgttttcttgaaaatcatgagaaaatgacttctacaaccagatacaaaaaagcagagcaaatgtttggagagatggaagtttggaatgcaatatcagaacgtgatcgtcttgaaatctatgaagatgttttgttctttctttcaaaaaaagaaaaggaacaagcaaagcagttgcgaaagagaaattgggaagccttaaaaaacatacttgacaacatggctaatgtaacatactctaccacttggtctgaagcccagcagtatctgatggataatccaacttttgcagaagatgaggagttacaaaatatggacaaagaagatgcattaatttgctttgaagaacacattcgggctttagaaaaggaggaagaagaagaaaaacagaagagtttgctgagagaaaggagacgacagcgaaaaaatagggaatctttccagatatttttagatgaattacatgaacatggacaactgcattctatgtcatcttggatggaattgtatccaactattagttctgatattagattcactaatatgcttggtcagcctggatcaactgcacttgatcttttcaagttttatgttgaggatcttaaagcacgttatcatgacgagaagaagataataaaagacattctaaaggataaaggatttgtagttgaagtaaacactacttttgaagattttgtggcgataatcagttcaactaaaagatcaactacattagatgctggaaatatcaaattggctttcaatagtttactagaaaaggcagaagcccgtgaacgtgaaagagaaaaagaagaggctcggaagatgaaacgaaaagaatctgcatttaagagtatgttaaaacaagctgctcctccgatagaattggatgctgtctgggaagatatccgtgagagatttgtaaaagagccagcatttgaggacataactctagaatctgaaagaaaacgaatatttaaagattttatgcatgtgcttgagcatgaatgtcagcatcatcattcaaagaacaagaaacattctaagaaatctaaaaaacatcataggaaacgttcccgctctcgatcggggtcagattcagatgatgatgatagccattcaaagaaaaaaagacagcgatcagagtctcgttctgcttcagaacattcttctagtgcagagtctgagagaagttataaaaagtcaaaaaagcataagaagaaaagtaagaagaggagacataaatctgactctccagaatccgatgctgagcgagagaaggataaaaaagaaaaagatcgggaaagtgaaaaagacagaactagacaaagatcagaatcaaaacacaaatcgcctaagaaaaagactggaaaggattctggtaattgggatacttctggcagcgaactgagtgaaggggaattggaaaagcgcagaagaacccttttggagcaactggatgatgatcaataa

SEQ ID NO: 195590 - DNA, 2793 bp, Artificial Sequence
  derived and/or modified sequence
atgtgcagcggcagcggcagaagaagaagcagcctgagccccaccatgagacccggcaccggcgccgagagaggcggcctgatgatgggccaccccggcatgcactacgcccccatgggcatgcaccccatgggccagagagccaacatgccccccgtgccccacggcatgatgccccagatgatgccccccatgggcggcccccccatgggccagatgcccggcatgatgagcagcgtgatgcccggcatgatgatgagccacatgagccaggccagcatgcagcccgccctgccccccggcgtgaacagcatggacgtggccgccggcaccgccagcggcgccaagagcatgtggaccgagcacaagagccccgacggcagaacctactactacaacaccgagaccaagcagagcacctgggagaagcccgacgacctgaagacccccgccgagcagctgctgagcaagtgcccctggaaggagtacaagagcgacagcggcaagccctactactacaacagccagaccaaggagagcagatgggccaagcccaaggagctggaggacctggagggctaccagaacaccatcgtggccggcagcctgatcaccaagagcaacctgcacgccatgatcaaggccgaggagagcagcaagcaggaggagtgcaccaccaccagcaccgcccccgtgcccaccaccgagatccccaccaccatgagcaccatggccgccgccgaggccgccgccgccgtggtggccgccgccgccgccgccgccgccgccgccgccgccgccaacgccaacgccagcaccagcgccagcaacaccgtgagcggcaccgtgcccgtggtgcccgagcccgaggtgaccagcatcgtggccaccgtggtggacaacgagaacaccgtgaccatcagcaccgaggagcaggcccagctgaccagcacccccgccatccaggaccagagcgtggaggtgagcagcaacaccggcgaggagaccagcaagcaggagaccgtggccgacttcacccccaagaaggaggaggaggagagccagcccgccaagaagacctacacctggaacaccaaggaggaggccaagcaggccttcaaggagctgctgaaggagaagagagtgcccagcaacgccagctgggagcaggccatgaagatgatcatcaacgaccccagatacagcgccctggccaagctgagcgagaagaagcaggccttcaacgcctacaaggtgcagaccgagaaggaggagaaggaggaggccagaagcaagtacaaggaggccaaggagagcttccagagattcctggagaaccacgagaagatgaccagcaccaccagatacaagaaggccgagcagatgttcggcgagatggaggtgtggaacgccatcagcgagagagacagactggagatctacgaggacgtgctgttcttcctgagcaagaaggagaaggagcaggccaagcagctgagaaagagaaactgggaggccctgaagaacatcctggacaacatggccaacgtgacctacagcaccacctggagcgaggcccagcagtacctgatggacaaccccaccttcgccgaggacgaggagctgcagaacatggacaaggaggacgccctgatctgcttcgaggagcacatcagagccctggagaaggaggaggaggaggagaagcagaagagcctgctgagagagagaagaagacagagaaagaacagagagagcttccagatcttcctggacgagctgcacgagcacggccagctgcacagcatgagcagctggatggagctgtaccccaccatcagcagcgacatcagattcaccaacatgctgggccagcccggcagcaccgccctggacctgttcaagttctacgtggaggacctgaaggccagataccacgacgagaagaagatcatcaaggacatcctgaaggacaagggcttcgtggtggaggtgaacaccaccttcgaggacttcgtggccatcatcagcagcaccaagagaagcaccaccctggacgccggcaacatcaagctggccttcaacagcctgctggagaaggccgaggccagagagagagagagagagaaggaggaggccagaaagatgaagagaaaggagagcgccttcaagagcatgctgaagcaggccgccccccccatcgagctggacgccgtgtgggaggacatcagagagagattcgtgaaggagcccgccttcgaggacatcaccctggagagcgagagaaagagaatcttcaaggacttcatgcacgtgctggagcacgagtgccagcaccaccacagcaagaacaagaagcacagcaagaagagcaagaagcaccacagaaagagaagcagaagcagaagcggcagcgacagcgacgacgacgacagccacagcaagaagaagagacagagaagcgagagcagaagcgccagcgagcacagcagcagcgccgagagcgagagaagctacaagaagagcaagaagcacaagaagaagagcaagaagagaagacacaagagcgacagccccgagagcgacgccgagagagagaaggacaagaaggagaaggacagagagagcgagaaggacagaaccagacagagaagcgagagcaagcacaagagccccaagaagaagaccggcaaggacagcggcaactgggacaccagcggcagcgagctgagcgagggcgagctggagaagagaagaagaaccctgctggagcagctggacgacgaccagtag

SEQ ID NO: 195591 - DNA, 2481 bp, Artificial Sequence
  derived and/or modified sequence
atggacgtggccgccggcaccgccagcggcgccaagagcatgtggaccgagcacaagagccccgacggcagaacctactactacaacaccgagaccaagcagagcacctgggagaagcccgacgacctgaagacccccgccgagcagctgctgagcaagtgcccctggaaggagtacaagagcgacagcggcaagccctactactacaacagccagaccaaggagagcagatgggccaagcccaaggagctggaggacctggagggctaccagaacaccatcgtggccggcagcctgatcaccaagagcaacctgcacggcatgctgaccgagctgaagtacagcaagcaggaggagtgcaccaccaccagcaccgcccccgtgcccaccaccgagatccccaccaccatgagcaccatggccgccgccgaggccgccgccgccgtggtggccgccgccgccgccgccgccgccgccgccgccgccgccaacgccaacgccagcaccagcgccagcaacaccgtgagcggcaccgtgcccgtggtgcccgagcccgaggtgaccagcatcgtggccaccgtggtggacaacgagaacaccgtgaccatcagcaccgaggagcaggcccagctgaccagcacccccgccatccaggaccagagcgtggaggtgagcagcaacaccggcgaggagaccagcaagcaggagaccgtggccgacttcacccccaagaaggaggaggaggagagccagcccgccaagaagacctacacctggaacaccaaggaggaggccaagcaggccttcaaggagctgctgaaggagaagagagtgcccagcaacgccagctgggagcaggccatgaagatgatcatcaacgaccccagatacagcgccctggccaagctgagcgagaagaagcaggccttcaacgcctacaaggtgcagaccgagaaggaggagaaggaggaggccagaagcaagtacaaggaggccaaggagagcttccagagattcctggagaaccacgagaagatgaccagcaccaccagatacaagaaggccgagcagatgttcggcgagatggaggtgtggaacgccatcagcgagagagacagactggagatctacgaggacgtgctgttcttcctgagcaagaaggagaaggagcaggccaagcagctgagaaagagaaactgggaggccctgaagaacatcctggacaacatggccaacgtgacctacagcaccacctggagcgaggcccagcagtacctgatggacaaccccaccttcgccgaggacgaggagctgcagaacatggacaaggaggacgccctgatctgcttcgaggagcacatcagagccctggagaaggaggaggaggaggagaagcagaagagcctgctgagagagagaagaagacagagaaagaacagagagagcttccagatcttcctggacgagctgcacgagcacggccagctgcacagcatgagcagctggatggagctgtaccccaccatcagcagcgacatcagattcaccaacatgctgggccagcccggcagcaccgccctggacctgttcaagttctacgtggaggacctgaaggccagataccacgacgagaagaagatcatcaaggacatcctgaaggacaagggcttcgtggtggaggtgaacaccaccttcgaggacttcgtggccatcatcagcagcaccaagagaagcaccaccctggacgccggcaacatcaagctggccttcaacagcctgctggagaaggccgaggccagagagagagagagagagaaggaggaggccagaaagatgaagagaaaggagagcgccttcaagagcatgctgaagcaggccgccccccccatcgagctggacgccgtgtgggaggacatcagagagagattcgtgaaggagcccgccttcgaggacatcaccctggagagcgagagaaagagaatcttcaaggacttcatgcacgtgctggagcacgagtgccagcaccaccacagcaagaacaagaagcacagcaagaagagcaagaagcaccacagaaagagaagcagaagcagaagcggcagcgacagcgacgacgacgacagccacagcaagaagaagagacagagaagcgagagcagaagcgccagcgagcacagcagcagcgccgagagcgagagaagctacaagaagagcaagaagcacaagaagaagagcaagaagagaagacacaagagcgacagccccgagagcgacgccgagagagagaaggacaagaaggagaaggacagagagagcgagaaggacagaaccagacagagaagcgagagcaagcacaagagccccaagaagaagaccggcaaggacagcggcaactgggacaccagcggcagcgagctgagcgagggcgagctggagaagagaagaagaaccctgctggagcagctggacgacgaccagtag

SEQ ID NO: 195592 - protein, 843 aa, Artificial Sequence
  derived and/or modified sequence
MWGRLWPLLLSILTATAVPGPSLRRPSRELDATPRMTIPYEELSGTRHFKGQAQNYSTLLLEEASARLLVGARGALFSLSANDIGDGAHKEIHWEASPEMQSKCHQKGKNNQTECFNHVRFLQRLNSTHLYACGTHAFQPLCAAIDAEAFTLPTSFEEGKEKCPYDPARGFTGLIIDGGLYTATRYEFRSIPDIRRSRHPHSLRTEETPMHWLNDAEFVFSVLVRESKASAVGDDDKVYYFFTERATEEGSGSFTQSRSSHRVARVARVCKGDLGGKKILQKKWTSFLKARLICHIPLYETLRGVCSLDAETSSRTHFYAAFTLSTQWKTLEASAICRYDLAEIQAVFAGPYMEYQDGSRRWGRYEGGVPEPRPGSCITDSLRSQGYNSSQDLPSLVLDFVKLHPLMARPVVPTRGRPLLLKRNIRYTHLTGTPVTTPAGPTYDLLFLGTADGWIHKAVVLGSGMHIIEETQVFRESQSVENLVISLLQHSLYVGAPSGVIQLPLSSCSRYRSCYDCILARDPYCGWDPGTHACAAATTIANRSQGSRTALIQDIERGNRGCESSRDTGPPPPLKTRSVLRGDDVLLPCDQPSNLARALWLLNGSMGLSDGQGGYRVGVDGLLVTDAQPEHSGNYGCYAEENGLRTLLASYSLTVRPATPAPAPKAPATPGAQLAPDVRLLYVLAIAALGGLCLILASSLLYVACLREGRRGRRRKYSLGRASRAGGSAVQLQTVSGQCPGEEDEGDDEGAGGLEGSCLQIIPGEGAPAPPPPPPPPPPAELTNGLVALPSRLRRMNGNSYVLLRQSNNGVPAGPCSFAEELSRILEKRKHTQLVEQLDESSV

SEQ ID NO: 195593 - protein, 552 aa, Artificial Sequence
  derived and/or modified sequence
MWGRLWPLLLSILTATAVPGPSLRRPSRELDATPRMTIPYEELSGTRHFKGQAQNYSTLLLEEASARLLVGARGALFSLSANDIGDGAHKEIHWEASPEMQSKCHQKGKNNQTECFNHVRFLQRLNSTHLYACGTHAFQPLCAAIDAEAFTLPTSFEEGKEKCPYDPARGFTGLIIDGGLYTATRYEFRSIPDIRRSRHPHSLRTEETPMHWLNDAEFVFSVLVRESKASAVGDDDKVYYFFTERATEEGSGSFTQSRSSHRVARVARVCKGDLGGKKILQKKWTSFLKARLICHIPLYETLRGVCSLDAETSSRTHFYAAFTLSTQWKTLEASAICRYDLAEIQAVFAGPYMEYQDGSRRWGRYEGGVPEPRPGSCITDSLRSQGYNSSQDLPSLVLDFVKLHPLMARPVVPTRGRPLLLKRNIRYTHLTGTPVTTPAGPTYDLLFLGTADGWIHKAVVLGSGMHIIEETQVFRESQSVENLVISLLQHSLYVGAPSGVIQLPLSSCSRYRSCYDCILARDPYCHILSGPLPQPHVVTSLSRAWERASLGR

SEQ ID NO: 195594 - DNA, 1659 bp, Artificial Sequence
  derived and/or modified sequence
atgtggggcagactgtggcccctgctgctgagcatcctgaccgccaccgccgtgcccggccccagcctgagaagacccagcagagagctggacgccacccccagaatgaccatcccctacgaggagctgagcggcaccagacacttcaagggccaggcccagaactacagcaccctgctgctggaggaggccagcgccagactgctggtgggcgccagaggcgccctgttcagcctgagcgccaacgacatcggcgacggcgcccacaaggagatccactgggaggccagccccgagatgcagagcaagtgccaccagaagggcaagaacaaccagaccgagtgcttcaaccacgtgagattcctgcagagactgaacagcacccacctgtacgcctgcggcacccacgccttccagcccctgtgcgccgccatcgacgccgaggccttcaccctgcccaccagcttcgaggagggcaaggagaagtgcccctacgaccccgccagaggcttcaccggcctgatcatcgacggcggcctgtacaccgccaccagatacgagttcagaagcatccccgacatcagaagaagcagacacccccacagcctgagaaccgaggagacccccatgcactggctgaacgacgccgagttcgtgttcagcgtgctggtgagagagagcaaggccagcgccgtgggcgacgacgacaaggtgtactacttcttcaccgagagagccaccgaggagggcagcggcagcttcacccagagcagaagcagccacagagtggccagagtggccagagtgtgcaagggcgacctgggcggcaagaagatcctgcagaagaagtggaccagcttcctgaaggccagactgatctgccacatccccctgtacgagaccctgagaggcgtgtgcagcctggacgccgagaccagcagcagaacccacttctacgccgccttcaccctgagcacccagtggaagaccctggaggccagcgccatctgcagatacgacctggccgagatccaggccgtgttcgccggcccctacatggagtaccaggacggcagcagaagatggggcagatacgagggcggcgtgcccgagcccagacccggcagctgcatcaccgacagcctgagaagccagggctacaacagcagccaggacctgcccagcctggtgctggacttcgtgaagctgcaccccctgatggccagacccgtggtgcccaccagaggcagacccctgctgctgaagagaaacatcagatacacccacctgaccggcacccccgtgaccacccccgccggccccacctacgacctgctgttcctgggcaccgccgacggctggatccacaaggccgtggtgctgggcagcggcatgcacatcatcgaggagacccaggtgttcagagagagccagagcgtggagaacctggtgatcagcctgctgcagcacagcctgtacgtgggcgcccccagcggcgtgatccagctgcccctgagcagctgcagcagatacagaagctgctacgactgcatcctggccagagacccctactgccacatcctgagcggccccctgccccagccccacgtggtgaccagcctgagcagagcctgggagagagccagcctgggcagatag

SEQ ID NO: 195595 - DNA, 1569 bp, Artificial Sequence
  derived and/or modified sequence
atgtggggcagactgtggcccctgctgctgagcatcctgaccgccaccgccgtgcccggccccagcctgagaagacccagcagagagctggacgccacccccagaatgaccatcccctacgaggagctgagcggcaccagacacttcaagggccaggcccagaactacagcaccctgctgctggaggaggccagcgccagactgctggtgggcgccagaggcgccctgttcagcctgagcgccaacgacatcggcgacggcgcccacaaggagatccactgggaggccagccccgagatgcagagcaagtgccaccagaagggcaagaacaaccagaccgagtgcttcaaccacgtgagattcctgcagagactgaacagcacccacctgtacgcctgcggcacccacgccttccagcccctgtgcgccgccatcgacgccgaggccttcaccctgcccaccagcttcgaggagggcaaggagaagtgcccctacgaccccgccagaggcttcaccggcctgatcatcgacggcggcctgtacaccgccaccagatacgagttcagaagcatccccgacatcagaagaagcagacacccccacagcctgagaaccgaggagacccccatgcactggctgaacgacgccgagttcgtgttcagcgtgctggtgagagagagcaaggccagcgccgtgggcgacgacgacaaggtgtactacttcttcaccgagagagccaccgaggagggcagcggcagcttcacccagagcagaagcagccacagagtggccagagtggccagagtgtgcaagggcgacctgggcggcaagaagatcctgcagaagaagtggaccagcttcctgaaggccagactgatctgccacatccccctgtacgagaccctgagaggcgtgtgcagcctggacgccgagaccagcagcagaacccacttctacgccgccttcaccctgagcacccagtggaagaccctggaggccagcgccatctgcagatacgacctggccgagatccaggccgtgttcgccggcccctacatggagtaccaggacggcagcagaagatggggcagatacgagggcggcgtgcccgagcccagacccggcagctgcatcaccgacagcctgagaagccagggctacaacagcagccaggacctgcccagcctggtgctggacttcgtgaagctgcaccccctgatggccagacccgtggtgcccaccagaggcagacccctgctgctgaagagaaacatcagatacacccacctgaccggcacccccgtgaccacccccgccggccccacctacgacctgctgttcctgggcaccgccgacggctggatccacaaggccgtggtgctgggcagcggcatgcacatcatcgaggagacccaggtgttcagagagagccagagcgtggagaacctggtgatcagcctgctgcagcacagcctgtacgtgggcgcccccagcggcgtgatccagctgcccctgagcagctgcagcagatacagaagctgctacgactgcatcctggccagagactag

SEQ ID NO: 195596 - DNA, 1659 bp, Artificial Sequence
  derived and/or modified sequence
atgtggggccgtctgtggccacttctcctgagtatcttgacagccaccgctgttcctggaccatctttacggagaccatctagagaactggatgccactccaagaatgaccattccctacgaggagctctctggaacccgccatttcaagggccaggctcaaaattacagcacactgctcctggaagaagcaagcgctcgacttctggtgggcgcgcgcggagcgctgttttctctctcagcaaacgatatcggagatggcgctcacaaggaaatccactgggaagcgagtccagagatgcagtctaaatgtcaccagaaaggtaaaaacaatcaaacagagtgcttcaatcacgtcagattcctgcagcgccttaattccacccatctttatgcttgcggcacccatgctttccaacccctctgcgcggcaatcgacgctgaggccttcacgttgcctacgagcttcgaggaagggaaagaaaaatgcccctatgacccagccagaggctttactggattaattatcgacggtgggctttatactgccacacgctatgagttccggtccatccccgatatcaggcgctctcgccacccccattccctgaggactgaagagactcccatgcactggctgaacgacgcggagtttgtattcagcgtgttggttcgggaaagtaaagcttctgctgtcggggatgacgataaggtgtactatttctttaccgaacgggccacggaggaaggtagcggcagtttcacccagagccggagctcccatagggtcgcccgggtagcacgggtgtgtaagggcgatctgggcgggaaaaaaattctgcagaaaaaatggacttcctttcttaaggccaggctgatttgtcacatcccactgtacgagacacttcggggcgtgtgcagtctggatgcagaaactagcagcaggactcacttctacgcagctttcacgctctcaacccaatggaaaacccttgaggctagcgcaatctgtcgctacgatctggcagaaatacaggccgtgtttgcagggccctatatggagtaccaggacggttcaaggaggtgggggagatatgaaggcggggtacctgaacccaggcctggatcatgcatcacagactctttgcgaagccaggggtacaacagttctcaggatttgccttctctggtccttgatttcgttaagttgcatcccctcatggcacggcctgtcgttccaactcgggggcgcccattgttgctgaagcggaacatccgttacacacatcttactgggacaccagtgacgacccccgcggggcctacttacgacctgttgtttctgggcactgccgatggctggatccacaaagcagtagtattagggtctggaatgcacatcatcgaggaaacccaagttttcagggagtcacaatctgtagagaatctcgttatctctctgctgcagcatagtctatatgtgggcgccccctccggcgtgattcaattgcccctatcaagttgctcccgctatcggtcttgctacgactgcatcctggcacgcgacccatattgtcatatactgtctggccctcttccccagccgcacgtggtgactagcctgtcccgcgcttgggaaagggcctcactaggaagatag

SEQ ID NO: 195597 - DNA, 1569 bp, Artificial Sequence
  derived and/or modified sequence
atgtggggaagactttggcccttacttctgtcaatcctgacagcaacagcggtgcctgggcccagtctccgccggccatcacgcgaactggatgcgacgccacggatgactattccctacgaggagctgtctggcaccaggcatttcaagggccaggctcagaactactcgaccttgctgcttgaagaggcgtcggcaaggctgcttgttggcgctaggggtgccctcttcagtctgtcagctaatgacattggagatggagcccacaaggagatccactgggaagcctcccccgagatgcagtccaaatgtcaccaaaaagggaaaaacaaccagacagaatgtttcaatcacgtgaggttcctccagaggctgaacagcactcatctttatgcctgcgggacacatgctttccaaccactttgcgctgctatcgatgccgaagccttcactcttccgacaagcttcgaggaaggcaaagaaaaatgtccttatgatcctgctagagggttcaccggattgattatcgacggcggactgtatactgccacccggtatgagttccgatctatacccgatatccggcgatccagacacccccacagccttcggacagaagagacccctatgcattggctgaacgatgcagaattcgtttttagcgtgttagtcagggagtccaaggcatccgctgtgggtgacgatgacaaagtctactacttcttcacagaaagggccacggaagaaggatctggttctttcacccagtcacgttcctctcatagggtagcccgtgtagcaagggtgtgtaaaggagacttgggaggcaagaaaatactgcagaaaaagtggacatcattccttaaggcccgcttgatttgtcacatacctctgtatgagaccctgcgcggagtgtgcagtctcgacgctgaaacatcttcccgcacacacttttacgcagcctttaccttgtctacacagtggaagactctagaagcatctgctatttgtcgttacgacttagcagaaattcaggcagtatttgcagggccctacatggagtaccaggacggcagtagaagatggggcaggtacgaggggggcgttcctgagccgcggccaggttcttgcatcaccgatagcctgagatcacaggggtacaattcctcccaggatctcccaagtctagtgctcgatttcgtgaaattacatcctctgatggcgcgacccgtggtgccaacacgcggacggccattacttttgaagcgtaacattcgctacacacatctgaccggcacaccagtgaccacccccgcaggacctacctacgatttgctgttcctcgggacagctgatggatggatccacaaggccgttgtcctgggttctggcatgcacatcatcgaagaaacccaggtattccgcgagtcccaatccgtggaaaacctggtcataagtctgcttcagcactctttatatgtgggcgctcccagtggagtaattcagctgcctctgagcagctgtagtagataccgatcttgttatgactgtattctggccagggattag

SEQ ID NO: 195598 - DNA, 1659 bp, Artificial Sequence
  derived and/or modified sequence
atgtggggccgcctgtggcccctgctgctgagcatcctgacagccacagctgtgcccggccccagcctgcggcggcccagccgggagctggatgccacccccaggatgaccatcccctatgaggagctgagcggcaccaggcacttcaagggccaggcccagaactacagcaccctgctgctggaggaggccagcgcccggctgctggtgggcgcccggggggccctcttcagcctgagcgccaatgacattggagatggagcccacaaggagatccactgggaggccagccctgagatgcagagcaagtgccaccagaagggcaagaacaaccagacagagtgcttcaaccacgtgcgcttcctgcagaggctgaacagcacccacctgtatgcctgtggcacccacgccttccagcccctgtgtgccgccattgatgctgaggccttcaccctgcccaccagctttgaggagggcaaggagaagtgcccctatgaccctgcccggggcttcaccggcctcatcattgatggcggcctgtacacagccaccaggtatgagttccgcagcatcccagacatcagaagaagccgccacccccacagcctgaggacagaggagacccccatgcactggctgaatgatgctgagtttgtgttttctgtgctggtgcgggagagcaaggccagcgctgtgggagatgatgacaaggtgtactacttcttcacagagcgggccacagaggagggcagcggcagcttcacccagagccgcagcagccaccgggtggcccgggtggcccgggtgtgcaagggggacctgggcggcaagaagatcctgcagaagaagtggaccagcttcctgaaggcccggctcatctgccacatccccctgtatgagaccctgcggggcgtgtgcagcctggatgctgagaccagcagcaggacccacttctacgccgccttcaccctgagcacccagtggaagaccctggaggccagcgccatctgccgctatgacctggccgagatccaggccgtgtttgctggcccctacatggagtaccaggacggcagccgccgctggggccgctatgaaggaggagtgcctgagccccggcccggcagctgcatcacagacagcctgcggagccagggctacaacagcagccaggacctgcccagcctggtgctggactttgtgaagctgcaccccctgatggcccggcctgtggtgcccacccggggccggcccctgctgctgaagaggaacatccgctacacccacctgaccggcacccctgtgaccaccccagctggccccacctatgacctgctcttcctgggcacagcagatggctggatccacaaggctgtggtgctgggcagcggcatgcacatcatcgaggagacccaggtgttccgggagagccagagcgtggagaacctggtgatcagcctgctgcagcacagcctgtatgtgggcgcccccagcggggtcatccagctgcccctgagcagctgcagccgctaccgcagctgctatgactgcatcctggcccgggacccctactgccacatcctgagcggccccctgccccagccccacgtggtgaccagcctgagccgggcctgggagcgggccagcctgggccgctag

SEQ ID NO: 195599 - DNA, 1569 bp, Artificial Sequence
  derived and/or modified sequence
atgtggggccgcctgtggcccctgctgctgagcatcctgacagccacagctgtgcccggccccagcctgcggcggcccagccgggagctggatgccacccccaggatgaccatcccctatgaggagctgagcggcaccaggcacttcaagggccaggcccagaactacagcaccctgctgctggaggaggccagcgcccggctgctggtgggcgcccggggggccctcttcagcctgagcgccaatgacattggagatggagcccacaaggagatccactgggaggccagccctgagatgcagagcaagtgccaccagaagggcaagaacaaccagacagagtgcttcaaccacgtgcgcttcctgcagaggctgaacagcacccacctgtatgcctgtggcacccacgccttccagcccctgtgtgccgccattgatgctgaggccttcaccctgcccaccagctttgaggagggcaaggagaagtgcccctatgaccctgcccggggcttcaccggcctcatcattgatggcggcctgtacacagccaccaggtatgagttccgcagcatcccagacatcagaagaagccgccacccccacagcctgaggacagaggagacccccatgcactggctgaatgatgctgagtttgtgttttctgtgctggtgcgggagagcaaggccagcgctgtgggagatgatgacaaggtgtactacttcttcacagagcgggccacagaggagggcagcggcagcttcacccagagccgcagcagccaccgggtggcccgggtggcccgggtgtgcaagggggacctgggcggcaagaagatcctgcagaagaagtggaccagcttcctgaaggcccggctcatctgccacatccccctgtatgagaccctgcggggcgtgtgcagcctggatgctgagaccagcagcaggacccacttctacgccgccttcaccctgagcacccagtggaagaccctggaggccagcgccatctgccgctatgacctggccgagatccaggccgtgtttgctggcccctacatggagtaccaggacggcagccgccgctggggccgctatgaaggaggagtgcctgagccccggcccggcagctgcatcacagacagcctgcggagccagggctacaacagcagccaggacctgcccagcctggtgctggactttgtgaagctgcaccccctgatggcccggcctgtggtgcccacccggggccggcccctgctgctgaagaggaacatccgctacacccacctgaccggcacccctgtgaccaccccagctggccccacctatgacctgctcttcctgggcacagcagatggctggatccacaaggctgtggtgctgggcagcggcatgcacatcatcgaggagacccaggtgttccgggagagccagagcgtggagaacctggtgatcagcctgctgcagcacagcctgtatgtgggcgcccccagcggggtcatccagctgcccctgagcagctgcagccgctaccgcagctgctatgactgcatcctggcccgggactag

SEQ ID NO: 195600 - DNA, 1659 bp, Artificial Sequence
  derived and/or modified sequence
atgtggggccggctgtggcccctgctgctgagcatcctgaccgccactgctgtgccaggaccctcactccgacgtccgtctcgcgagctagacgccaccccacgtatgaccattccatacgaagagctgagcggcacgcgtcatttcaaggggcaggcccagaactattccacattgctgctggaggaggcgtctgccagattactggtcggtgcacgcggagctctgttttcactgagcgcgaatgacattggggatggcgctcataaggagatccattgggaggcttctccagagatgcagtccaaatgtcaccagaaaggcaaaaacaaccagacagagtgtttcaatcatgtcagattccttcagagacttaattcaacacatctttacgcgtgcgggactcatgcctttcagccgttgtgtgccgccattgacgctgaggctttcaccctaccgacgtcttttgaggagggcaaagagaagtgcccatatgacccagccaggggcttcacaggcttgatcatcgacgggggactgtataccgcaacacgatacgaatttcggtccatccctgacatccggcgaagccgccacccacattccctccggactgaggagacgccaatgcactggctcaacgacgccgaattcgttttctccgtcctcgtgagggaatcgaaagcctctgctgtgggggatgacgacaaggtttactatttttttactgaacgcgccaccgaggaggggagcgggtccttcacccagtctagatcaagccatcgggttgccagggttgcaagagtttgtaagggcgacctggggggcaagaaaatcctacagaagaaatggacctcctttctgaaagccaggttgatctgccatatcccactgtatgaaacgctccgcggtgtgtgctccctggacgcagagacttcctcccggacccacttttatgccgcattcaccctaagtactcagtggaaaaccctggaagccagcgctatttgccgctacgatttggctgaaatccaggctgtctttgcaggtccttacatggagtatcaggatggatccagacgttggggtcgctacgagggcggcgtccctgaacccaggccagggagttgtatcacagattccctgagaagccagggatataatagtagccaagacttaccatctctggtgctggactttgttaagcttcaccccctcatggcaagaccagttgtgcctaccagaggtcggccactgttgcttaaaagaaacatcaggtatacacacctgacgggcactccagtgaccacaccggccgggcccacatacgacctgctgttcctgggcactgccgacggttggattcacaaggccgtcgttttaggatccgggatgcatattattgaagaaacacaggtgtttcgcgagtcccagtccgttgagaacttagtaattagcctgctgcagcactccctgtacgtgggtgccccaagtggagtaatccagttacccctgtcttcatgtagtcggtacagatcctgttatgactgcatactcgcacgcgacccctactgccatatcctgtccggccccctgccacaaccccacgttgtgacatcactcagcagggcctgggaacgggcctcactagggcgatag

SEQ ID NO: 195601 - DNA, 1569 bp, Artificial Sequence
  derived and/or modified sequence
atgtggggccggctgtggcccctgctgctgagcatcctgaccgccactgccgtgcctggaccctccctacgcagacctagtagggaacttgacgccacccctcgtatgaccatcccctatgaggaactctcgggcaccaggcactttaagggccaggcacagaattattcaacgctgctcctcgaagaagcgagtgccagactgctggtcggggccagaggcgccctcttttcgctgtccgctaacgatataggtgatggggcccataaggaaattcattgggaagcttcaccggaaatgcagtcaaagtgtcaccaaaagggcaaaaataaccagacagagtgtttcaatcacgtgcggttcctgcaacggcttaacagcacccatctttacgcatgtgggacccacgcattccagccgttatgcgccgcaattgacgcagaggccttcacgttacccacctcttttgaggaaggtaaggagaagtgcccatatgacccagccaggggatttaccgggctgattattgacggcggcctgtatacagcaacaagatatgagtttcggtccatccccgacatcagaaggtccaggcacccgcacagcttgcggactgaagagacgccaatgcactggctgaacgatgcagagtttgtgttcagcgtgctcgtacgagaaagcaaagcttcagccgtgggagacgacgacaaagtttactatttcttcacagaaagagcgactgaagagggaagtggctccttcactcaatctcgtagttcacaccgggtcgctagggtcgctcgagtgtgtaagggggacttggggggcaaaaaaatactgcagaagaagtggactagctttcttaaggcaagactgatttgtcacatcccgctatatgaaactctgcgtggtgtgtgctctcttgacgccgagaccagttcgcgcacccacttctacgccgcatttaccctctctacacaatggaaaaccctcgaagcatccgctatatgccgctacgatctggccgagatacaagccgtgttcgcaggcccatatatggagtatcaggacgggtccagaagatggggtcgctacgagggcggcgtcccagagcctcgccccggttcctgcatcactgactccctgaggtcacaggggtataactcctctcaggatcttccctcgctggtcctcgatttcgttaagctccatccactcatggcgcggcctgtggtacccacacgcggacgccctctgctgctgaaacgaaacatccggtacacccacttgaccgggacacccgtgaccacccctgccggacctacttatgacctgcttttcctaggcactgccgatggctggatacataaggcagtggtgttaggtagtgggatgcatataattgaggagacacaggtgttcagagagtctcaatcagtggagaacctggtcattagtctcttacagcattcactgtatgttggagcccccagtggggtgattcagctgccgctgtcttcttgtagtcgctacaggagttgttatgattgtatactcgcccgtgactag

SEQ ID NO: 195602 - DNA, 1659 bp, Artificial Sequence
  derived and/or modified sequence
atgtggggaagactatggcccctgctgcttagcatattaaccgccactgcagtgcctggcccttcactgagacggcctagtcgagagctggacgcaacccctcgtatgactattccttacgaagaactgtccggcacgcggcacttcaaaggccaggctcagaattatagtaccttgctgctggaggaagcttcagctagactgctggtcggagccagaggcgcactcttttcactgtctgcaaatgacattggagacggcgctcataaagagatccattgggaagcctctcctgaaatgcagtcaaaatgccaccaaaaaggcaagaataaccaaacggagtgttttaatcacgtaaggttcctgcagcgtctgaactccacgcatttatatgcttgtggcacacatgcgtttcaacctttatgtgccgcaattgatgcagaggcctttaccctcccaacctcgttcgaggagggtaaagagaagtgtccgtacgaccccgcaaggggtttcacaggcctgatcattgatgggggattatacacagccaccagatatgagttccggtcaattcccgacataagacggagccggcacccacacagtctacgcaccgaggaaacccctatgcactggctaaacgacgccgagtttgtctttagcgttttggtccgggaatcaaaggcaagtgcagtcggagatgacgacaaagtgtactacttttttacggaaagggctacagaggaagggagcggatcttttacccagtccaggtctagccaccgcgtggctcgggtggcgagggtgtgtaagggggacctcggcggaaaaaagattctgcagaaaaaatggacgtccttcctgaaagctagactgatctgccacatccccctgtatgaaactctgcggggagtgtgcagcctggacgctgagacctcttctagaacgcatttctatgctgccttcactctgagtacgcagtggaaaaccttggaagcaagcgccatctgccggtatgacctggcggagatccaggccgtgtttgccggaccttacatggagtaccaggacggctcaagaaggtggggtaggtacgaggggggtgtccctgaacctcggccagggagctgcattacagattcactccgaagccaggggtataactcatctcaggacttgccctcactggtgctagactttgttaagctacatccactcatggccagacccgtggtccctacgcggggtaggccccttctgctgaaaagaaatattcgctatacccatttgacgggcaccccagtcactacccccgctggccctacctatgacctgctgttcctgggaactgccgacggatggatccacaaagcagtcgttctgggaagcggtatgcacattattgaagaaacacaggtgttcagggaatcacaatctgtggagaatcttgtgatcagtctcctgcagcattcgctttacgtcggcgcaccctctggtgtgattcagttgcctctctcatcgtgcagtcggtacaggtcatgttacgactgtatcctcgcgcgagacccatattgccatatcttgtctgggcctctccctcaacctcacgtcgtgacctccctttcaagggcttgggaaagagcatctctgggacggtag

SEQ ID NO: 195603 - DNA, 1569 bp, Artificial Sequence
  derived and/or modified sequence
atgtggggcagactctggcccctgctgctctcaatcctgactgccaccgcggttccaggaccatctttgaggaggccgtctcgggaactggatgccacacctaggatgactatcccttacgaagagctgtccggcacgcggcatttcaaaggccaagcacagaactattcaacactgctgctcgaagaagccagcgccagacttttagtgggagcaaggggtgctcttttctctctaagcgcaaacgacattggcgatggggctcataaagaaatacactgggaagcatccccggagatgcagtcaaagtgccaccagaagggcaagaacaatcaaaccgagtgctttaaccatgtgcggttcctgcagagactgaactcaacgcatctctatgcttgtgggacccatgcctttcagccactgtgcgctgccattgacgccgaagcctttaccctgcctacctccttcgaggagggtaaagaaaagtgcccatacgatcctgccaggggattcacaggacttattatcgacggcggactctacaccgctacacgctatgaattcaggtctatccctgacattcggagaagtagacatccgcattccttacgaacagaggagactcctatgcattggctgaatgatgcagagtttgttttttctgtgctagtccgcgaatcaaaagccagtgctgtgggggatgacgacaaggtctactatttcttcactgaaagagcaaccgaagagggctcaggtagtttcacacaatccagatccagccatcgggtggccagggtggcacgcgtctgcaaaggcgatctgggcggaaagaagatactgcagaagaagtggacatcattcttgaaagcccgtctcatttgtcacatcccactgtatgagaccttgcggggagtctgttctctggacgccgagacatccagcaggacccatttctatgccgctttcaccctttcaacccagtggaagactctggaagcttccgccatttgccggtatgatctcgctgagatccaggccgttttcgctggtccttacatggagtatcaggacggctctagacgttggggtcgctacgaaggcggagtgccagaaccccgtcctggcagttgtataacggatagtctcagatctcagggctataactcttcccaggacctgccgtcactggtgctggacttcgtgaaattgcatccgctgatggcacggcctgtcgtgcctacccgtggacggcctctgctgctgaagaggaatattagatatacacacctgacaggtactcccgtgaccacacccgcaggcccaacgtacgacctgctcttcctgggcactgctgatgggtggatccacaaggcagtggttcttggaagcggcatgcacattattgaagaaacccaggtgttccgtgagagccagtctgtcgaaaatctcgtcatttctctcctccagcactccctgtacgtgggggcaccctccggagtgatccagctgccactgtcctcatgtagtcggtatcggagctgttatgactgcattttagccagggactag

SEQ ID NO: 195604 - DNA, 4094 bp, Artificial Sequence
  derived and/or modified sequence
gcttcccattccccgcccccacaacctgtgactctggctccctttgggggtcttgttagtctgggcctccccaggaagatgtgggggaggctctggcccctcctcctcagcatcctcacagcaactgcagtcccaggaccctcactgcggagaccgtctagagaactagatgccacccctcggatgaccataccctatgaagagctctctgggacccggcacttcaagggccaagcccagaactactcaacactgctgctggaggaggcctcagcaaggctgctggtgggagcccgaggtgccctgttctctctcagtgccaacgacataggagatggggctcacaaagagatccactgggaagcctccccagagatgcaaagcaaatgtcatcaaaaagggaaaaacaaccagacggagtgctttaaccatgtgcggttcctgcagcggctcaattctacccacctctatgcatgtgggactcacgccttccagcccctctgtgcagccattgatgctgaggccttcaccttgccaaccagcttcgaggaggggaaggagaagtgtccttatgacccagcccgtggcttcacaggcctcatcattgatggaggcctctacacagccactaggtatgaattccggagcattcctgacatccgccggagccgccacccacactccctgagaactgaggagacaccaatgcattggctcaatgatgcggagtttgtgttctccgtcctcgtgcgggagagcaaggccagtgcagtgggtgatgatgacaaggtgtactacttcttcacggagcgtgccactgaggagggctctggcagcttcactcagagccgcagcagtcaccgtgtggcccgtgtggctcgtgtctgcaagggagacctgggagggaagaagatcctgcagaagaagtggacttccttcctgaaagcccgtctcatctgccacattccactgtatgagacactgcgtggggtctgcagcctggatgctgaaacctcaagccgtacacacttctatgcagccttcacgctgagcacacagtggaagaccctggaggcctcagccatctgccgctatgacctggcagagatccaggctgtctttgcaggaccctatatggaataccaggatggttcccggcgctggggtcgctatgagggtggggtgcctgagccccggcctggctcgtgtatcacagattcattgcgcagccaaggctacaattcatcccaagacttgccatccctggtcctggactttgtaaagttgcacccactgatggctcggcccgttgtgcccacacgtggacggcccctgctgctcaagcgcaacatacgctacacacaccttacagggacacctgtcaccacgcctgctggacctacctatgacctgctctttctgggcacagctgatggctggatccacaaggccgtagtcctgggctctgggatgcacattattgaagagacacaagtgttcagggagtcccagtctgtggaaaatctagtcatctctctattgcagcacagcctctatgtgggggctcctagcggagtcatccagctaccactctccagctgctcccgctaccgatcctgctatgactgcatcttggcccgagacccctactgtggctgggaccctggcacccatgcctgcgcagcagccaccaccatagccaacaggtcccagggaagcaggacagcactgatacaggacatagagagaggaaatcgaggctgtgagagcagcagggatacagggccaccaccaccactgaagacccgctctgtgctccggggtgatgatgtcctcctgccctgtgaccagccatccaacctggcccgggccttgtggctactcaatgggagcatgggcctgagcgatgggcagggtggctaccgtgtgggcgtggacgggctgctggttacagatgcacagcctgagcacagtggcaactatggctgctatgccgaggaaaatggcctccgcaccctgctggcctcctatagtctcacagtccggccagccactcctgccccagctccaaaagcccctgccacacctggggcacagctggcacctgatgtgagactgctctatgtgctagccattgccgcgcttggtggcctctgcctcatcctggcctcctccctcctctatgtggcctgtctgcgggaaggcagacgagggcgccgacggaaatactcactgggtcgggccagccgggcaggaggatctgcggtgcaactgcagacagtctcaggccagtgtcctggagaggaagatgagggtgatgatgagggggctgggggcctggagggcagctgtctccagatcatccctggggagggagccccagccccaccacccccaccgcccccaccgccaccggctgagctgaccaatggcttggtggcactgcccagccggctgcggaggatgaatggcaatagctatgtgcttctgaggcagagcaacaatggagtaccagcagggccctgctccttcgccgaggaactcagccgcatcctggaaaaaaggaagcacacgcagctcgtggagcagctagatgagagctctgtctgagcccagcctcccagaacaaatgctcttccaagccagcctatctgtcccaggctgggccactgcctccctaacacagccaccctcccttcattacccccactccatacccttctcccaactttttgatgtccctgtagggctggccagtcaggcccagccaaagccccctcctcagtctccacagacccacatgtgagcagcccaggcccatcggtgctcctcagaggtaggtgctccctcaggatcaggtgccctgcagacccagagccagttcctatcccctaacctaaacacttataggtgaggactccatcctcctgttccattcatctgcccaaaccctttctctttctcccaggcagggctctgcaggtccatatgggctcaatgtcaccaccctctgcatggccctgtgtgctggatggtcctgaaaccagacaagacctctgccagccacctaagccctgcgtacattcacatgcacacatggaagaatgtttatcggctgggctgcagtgcccccaccctcaccttctcctggtgcattcttgtttcatccctgcttctggacttggggtaccctcccaattgccacatcctatctggtcctcttccccagccccatgtggtgacctctttgtcaagagcttgggaacgggccagcctggggaggtaagactgcatcactcccctcctctcccttcctgtgtggcccttgtgaatcagcctccccactctccttggtcattctcaagagtatgagagacagagctccaggcatgtcccatccccatgcacatgtggtaacacacacctgtatcacacatgtgcttacatttccactcacatgcacctctgagcctcccttgctgtcttggacctgtctgttgggtttagtccgtggacatttcagagggagatccccctcccatttaactgtcctcacaggcccttgcctaggatggatgaccaacactgcactcaatgagccagcctctcttttgggggaatcaagcatttgcttcctctagactacagcagggaaagggaggagaaatctgatgtctcaactggcacatgaagcccattcttggaactatgcaaagggcagaggctgggagtttggacgcttagctcctacccctgtcctacctcaccggggcactttcaggggccaggggcctctgaagtctctaggcctatatgggacaatcaattctgactgagctcccccattcccctcgggtgaggatgactgttatttttgtagctgagaacgtggaatcccacgggtttttactgcccttcacccaacctctcccacctccaccccacaatgaatgtatttattgtgagaatggctacacttctttaggaatgcccccacttacaaccaggtgggtggaacaggcatgtgacagagtggggagcctgggctcagctcctccccctgccgttggttaataaacaccctttttccccac

SEQ ID NO: 195605 - DNA, 2655 bp, Artificial Sequence
  derived and/or modified sequence
gctgtggggccgcggagccgcgcgtcgctgtctctatggccccggatccgagcgcaaagaaaacggacctcagaaaaccaggactagctctactgtcgggggcagggtgaccccatcagtaacctacaacccctctagaacttcacaactccctctcaccatggagtttgcatttgatgcagaaaggcatgtgatccctccctccttctgacctcttagctggggattccatggccacacaaccctgtgactccatgtccccccgattccaggaccccccatggccccatgattccttgactcctatgaccttatgacccctgaccttccaagtgacttccttggactttgacccctgtgactgtgcttcccattccccgcccccacaacctgtgactctggctccctttgggggtcttgttagtctgggcctccccaggaagatgtgggggaggctctggcccctcctcctcagcatcctcacagcaactgcagtcccaggaccctcactgcggagaccgtctagagaactagatgccacccctcggatgaccataccctatgaagagctctctgggacccggcacttcaagggccaagcccagaactactcaacactgctgctggaggaggcctcagcaaggctgctggtgggagcccgaggtgccctgttctctctcagtgccaacgacataggagatggggctcacaaagagatccactgggaagcctccccagagatgcaaagcaaatgtcatcaaaaagggaaaaacaaccagacggagtgctttaaccatgtgcggttcctgcagcggctcaattctacccacctctatgcatgtgggactcacgccttccagcccctctgtgcagccattgatgctgaggccttcaccttgccaaccagcttcgaggaggggaaggagaagtgtccttatgacccagcccgtggcttcacaggcctcatcattgatggaggcctctacacagccactaggtatgaattccggagcattcctgacatccgccggagccgccacccacactccctgagaactgaggagacaccaatgcattggctcaatgatgcggagtttgtgttctccgtcctcgtgcgggagagcaaggccagtgcagtgggtgatgatgacaaggtgtactacttcttcacggagcgtgccactgaggagggctctggcagcttcactcagagccgcagcagtcaccgtgtggcccgtgtggctcgtgtctgcaagggagacctgggagggaagaagatcctgcagaagaagtggacttccttcctgaaagcccgtctcatctgccacattccactgtatgagacactgcgtggggtctgcagcctggatgctgaaacctcaagccgtacacacttctatgcagccttcacgctgagcacacagtggaagaccctggaggcctcagccatctgccgctatgacctggcagagatccaggctgtctttgcaggaccctatatggaataccaggatggttcccggcgctggggtcgctatgagggtggggtgcctgagccccggcctggctcgtgtatcacagattcattgcgcagccaaggctacaattcatcccaagacttgccatccctggtcctggactttgtaaagttgcacccactgatggctcggcccgttgtgcccacacgtggacggcccctgctgctcaagcgcaacatacgctacacacaccttacagggacacctgtcaccacgcctgctggacctacctatgacctgctctttctgggcacagctgatggctggatccacaaggccgtagtcctgggctctgggatgcacattattgaagagacacaagtgttcagggagtcccagtctgtggaaaatctagtcatctctctattgcagcacagcctctatgtgggggctcctagcggagtcatccagctaccactctccagctgctcccgctaccgatcctgctatgactgcatcttggcccgagacccctattgccacatcctatctggtcctcttccccagccccatgtggtgacctctttgtcaagagcttgggaacgggccagcctggggaggtaagactgcatcactcccctcctctcccttcctgtgtggcccttgtgaatcagcctccccactctccttggtcattctcaagagtatgagagacagagctccaggcatgtcccatccccatgcacatgtggtaacacacacctgtatcacacatgtgcttacatttccactcacatgcacctctgagcctcccttgctgtcttggacctgtctgttgggtttagtccgtggacatttcagagggagatccccctcccatttaactgtcctcacaggcccttgcctaggatggatgaccaacactgcactcaatgagccagcctctcttttgggggaatcaagcatttgcttcctctagactacagcagggaaagggaggagaaatctgatgtctcaactggcacatgaagcccattcttggaactatgcaaagggcagaggctgggagtttggacgcttagctcctacccctgtcctacctcaccggggcactttcaggggccaggggcctctgaagtctctaggcctatatgggacaatcaattctgactgagct

SEQ ID NO: 195606 - DNA, 2024 bp, Artificial Sequence
  derived and/or modified sequence
cctctcgcagctggtgctgtggggccgcggagccgcgcgtcgctgtctctatggccccggatccgagcgcaaagaaaacggacctcagaaaaccaggactagctctactgtcgggggcagggtgaccccatcagtaacctacaacccctctagaacttcacaactccctctcaccatggagtttgcatttgatgcagaaaggcatgtgatccctccctccttctgacctcttagctggggattccatggccacacaaccctgtgactccatgtccccccgattccaggaccccccatggccccatgattccttgactcctatgaccttatgacccctgaccttccaagtgacttccttggactttgacccctgtgactgtgcttcccattccccgcccccacaacctgtgactctggctccctttgggggtcttgttagtctgggcctccccaggaagatgtgggggaggctctggcccctcctcctcagcatcctcacagcaactgcagtcccaggaccctcactgcggagaccgtctagagaactagatgccacccctcggatgaccataccctatgaagagctctctgggacccggcacttcaagggccaagcccagaactactcaacactgctgctggaggaggcctcagcaaggctgctggtgggagcccgaggtgccctgttctctctcagtgccaacgacataggagatggggctcacaaagagatccactgggaagcctccccagagatgcaaagcaaatgtcatcaaaaagggaaaaacaaccagacggagtgctttaaccatgtgcggttcctgcagcggctcaattctacccacctctatgcatgtgggactcacgccttccagcccctctgtgcagccattgatgctgaggccttcaccttgccaaccagcttcgaggaggggaaggagaagtgtccttatgacccagcccgtggcttcacaggcctcatcattgatggaggcctctacacagccactaggtatgaattccggagcattcctgacatccgccggagccgccacccacactccctgagaactgaggagacaccaatgcattggctcaatgatgcggagtttgtgttctccgtcctcgtgcgggagagcaaggccagtgcagtgggtgatgatgacaaggtgtactacttcttcacggagcgtgccactgaggagggctctggcagcttcactcagagccgcagcagtcaccgtgtggcccgtgtggctcgtgtctgcaagggagacctgggagggaagaagatcctgcagaagaagtggacttccttcctgaaagcccgtctcatctgccacattccactgtatgagacactgcgtggggtctgcagcctggatgctgaaacctcaagccgtacacacttctatgcagccttcacgctgagcacacagtggaagaccctggaggcctcagccatctgccgctatgacctggcagagatccaggctgtctttgcaggaccctatatggaataccaggatggttcccggcgctggggtcgctatgagggtggggtgcctgagccccggcctggctcgtgtatcacagattcattgcgcagccaaggctacaattcatcccaagacttgccatccctggtcctggactttgtaaagttgcacccactgatggctcggcccgttgtgcccacacgtggacggcccctgctgctcaagcgcaacatacgctacacacaccttacagggacacctgtcaccacgcctgctggacctacctatgacctgctctttctgggcacagctgatggctggatccacaaggccgtagtcctgggctctgggatgcacattattgaagagacacaagtgttcagggagtcccagtctgtggaaaatctagtcatctctctattgcagcacagcctctatgtgggggctcctagcggagtcatccagctaccactctccagctgctcccgctaccgatcctgctatgactgcatcttggcccgagac

SEQ ID NO: 195607 - DNA, 2532 bp, Artificial Sequence
  derived and/or modified sequence
atgtggggcagactgtggcccctgctgctgagcatcctgaccgccaccgccgtgcccggccccagcctgagaagacccagcagagagctggacgccacccccagaatgaccatcccctacgaggagctgagcggcaccagacacttcaagggccaggcccagaactacagcaccctgctgctggaggaggccagcgccagactgctggtgggcgccagaggcgccctgttcagcctgagcgccaacgacatcggcgacggcgcccacaaggagatccactgggaggccagccccgagatgcagagcaagtgccaccagaagggcaagaacaaccagaccgagtgcttcaaccacgtgagattcctgcagagactgaacagcacccacctgtacgcctgcggcacccacgccttccagcccctgtgcgccgccatcgacgccgaggccttcaccctgcccaccagcttcgaggagggcaaggagaagtgcccctacgaccccgccagaggcttcaccggcctgatcatcgacggcggcctgtacaccgccaccagatacgagttcagaagcatccccgacatcagaagaagcagacacccccacagcctgagaaccgaggagacccccatgcactggctgaacgacgccgagttcgtgttcagcgtgctggtgagagagagcaaggccagcgccgtgggcgacgacgacaaggtgtactacttcttcaccgagagagccaccgaggagggcagcggcagcttcacccagagcagaagcagccacagagtggccagagtggccagagtgtgcaagggcgacctgggcggcaagaagatcctgcagaagaagtggaccagcttcctgaaggccagactgatctgccacatccccctgtacgagaccctgagaggcgtgtgcagcctggacgccgagaccagcagcagaacccacttctacgccgccttcaccctgagcacccagtggaagaccctggaggccagcgccatctgcagatacgacctggccgagatccaggccgtgttcgccggcccctacatggagtaccaggacggcagcagaagatggggcagatacgagggcggcgtgcccgagcccagacccggcagctgcatcaccgacagcctgagaagccagggctacaacagcagccaggacctgcccagcctggtgctggacttcgtgaagctgcaccccctgatggccagacccgtggtgcccaccagaggcagacccctgctgctgaagagaaacatcagatacacccacctgaccggcacccccgtgaccacccccgccggccccacctacgacctgctgttcctgggcaccgccgacggctggatccacaaggccgtggtgctgggcagcggcatgcacatcatcgaggagacccaggtgttcagagagagccagagcgtggagaacctggtgatcagcctgctgcagcacagcctgtacgtgggcgcccccagcggcgtgatccagctgcccctgagcagctgcagcagatacagaagctgctacgactgcatcctggccagagacccctactgcggctgggaccccggcacccacgcctgcgccgccgccaccaccatcgccaacagaagccagggcagcagaaccgccctgatccaggacatcgagagaggcaacagaggctgcgagagcagcagagacaccggcccccccccccccctgaagaccagaagcgtgctgagaggcgacgacgtgctgctgccctgcgaccagcccagcaacctggccagagccctgtggctgctgaacggcagcatgggcctgagcgacggccagggcggctacagagtgggcgtggacggcctgctggtgaccgacgcccagcccgagcacagcggcaactacggctgctacgccgaggagaacggcctgagaaccctgctggccagctacagcctgaccgtgagacccgccacccccgcccccgcccccaaggcccccgccacccccggcgcccagctggcccccgacgtgagactgctgtacgtgctggccatcgccgccctgggcggcctgtgcctgatcctggccagcagcctgctgtacgtggcctgcctgagagagggcagaagaggcagaagaagaaagtacagcctgggcagagccagcagagccggcggcagcgccgtgcagctgcagaccgtgagcggccagtgccccggcgaggaggacgagggcgacgacgagggcgccggcggcctggagggcagctgcctgcagatcatccccggcgagggcgcccccgccccccccccccccccccccccccccccccccgccgagctgaccaacggcctggtggccctgcccagcagactgagaagaatgaacggcaacagctacgtgctgctgagacagagcaacaacggcgtgcccgccggcccctgcagcttcgccgaggagctgagcagaatcctggagaagagaaagcacacccagctggtggagcagctggacgagagcagcgtgtag

SEQ ID NO: 195608 - DNA, 2532 bp, Artificial Sequence
  derived and/or modified sequence
atgtgggggaggctctggccattactcctgagtatccttacagccaccgccgtccctggaccttctttgcgccgcccctctcgggaactggacgctaccccacgaatgaccatcccgtacgaagagctgtcgggcacccgccactttaagggacaagctcagaattacagcacccttctactggaagaagcttcagccaggctgctcgtgggagccagaggagccctattctcgttgtcagccaacgatattggcgacggagctcacaaggaaattcactgggaagccagccctgagatgcaatctaaatgtcaccagaaggggaaaaacaatcagaccgagtgttttaatcacgtgcggttcctacagcgacttaactctacgcatctgtacgcgtgtggcacccacgcatttcaacccctgtgtgcggccatcgatgcggaagctttcacccttcccacgagcttcgaagagggcaaggaaaagtgcccctacgacccggcacgaggctttaccgggctaattattgacggcggtctatataccgccaccagatatgaattcaggagtattccagatatacgtcgatctcgacaccctcattctctcagaaccgaggagaccccaatgcactggctgaatgatgctgaattcgtgtttagcgtgctggtaagagaaagcaaggcttcggcggtcggggatgatgacaaagtctactacttctttactgaacgtgctactgaggaggggagcggcagcttcactcagtcccgctcatcccaccgagtggccagggtggcacgcgtctgtaagggtgaccttggagggaagaaaatactgcagaaaaagtggactagttttctgaaagctcgactgatctgccatatccccttatatgagacacttcgaggcgtttgttccctggatgcggaaaccagcagtagaacgcatttttatgctgccttcacactgtctacccagtggaaaacactggaggctagcgcaatctgtcggtacgatctggcagagatccaggctgtgttcgcaggaccctacatggagtaccaggatggcagtaggcggtggggccgatatgaggggggtgtcccagagccccgcccagggtcctgcatcactgattccttgcgatcacagggttataatagttcccaggatctgcccagccttgtccttgatttcgtgaagctgcatcccctcatggcccgcccagttgtgcctacgcgagggcggcctttgctccttaaaaggaatattagatacactcacctgactggcacccctgtgacgacgccagcaggcccaacttacgacttactgttcctgggaacggcagatggttggattcataaggcagtggtcctggggagtggtatgcatatcattgaggagacccaggttttccgggagtctcaatctgtcgaaaacttggtgatttcattgctgcagcatagtctctacgtcggcgccccatcgggtgtgattcagctgccattgtccagttgtagtaggtatcggtcctgttacgattgtatcctagctagagatccatattgcggctgggatcccgggacccatgcgtgtgctgctgccaccacaatagctaacaggagtcagggatcccgtacagccttgatccaagacatagagcgggggaataggggctgcgagtcatctcgagatactggacctcctccacccctaaagactagaagcgtactgagaggcgacgatgtgttactgccatgtgatcagcctagcaatctggcacgagctttgtggctgcttaacggttctatgggcctgtcagatggtcaggggggatatcgagtgggagttgacggcctcctagttactgatgcccagcctgagcactcaggaaactacgggtgttacgctgaagaaaatgggctccgcaccctgctggcctcatactccctaactgttcggccggctacccctgctcccgcacctaaagcccctgctacacccggtgctcagttggcccccgacgtacgattgctctatgtgttggccatcgcagcactgggcgggctatgcttgattctggccagcagcttgctgtacgtggcttgtctgcgcgagggacggcgtggcaggcgccgcaagtactctctcggtcgcgcgagtagggccggtggttccgctgtgcaactgcagacagttagtgggcagtgccctggtgaggaggatgaaggcgacgacgagggcgccggaggactggaggggtcgtgtctccaaatcatccctggagagggcgccccagccccgcctcctccccccccaccaccccctcctgcggaactgaccaacggactagttgccctcccctccaggctgcgacgaatgaacggcaattcttacgtgctgctcagacagagtaacaacggagtcccggcggggccctgcagctttgcggaggaactcagtcgcattttggaaaagcgtaaacacacacaattggtggagcagcttgacgaaagctcggtatag

SEQ ID NO: 195609 - DNA, 2532 bp, Artificial Sequence
  derived and/or modified sequence
atgtggggccgcctgtggcccctgctgctgagcatcctgacagccacagctgtgcccggccccagcctgcggcggcccagccgggagctggatgccacccccaggatgaccatcccctatgaggagctgagcggcaccaggcacttcaagggccaggcccagaactacagcaccctgctgctggaggaggccagcgcccggctgctggtgggcgcccggggggccctcttcagcctgagcgccaatgacattggagatggagcccacaaggagatccactgggaggccagccctgagatgcagagcaagtgccaccagaagggcaagaacaaccagacagagtgcttcaaccacgtgcgcttcctgcagaggctgaacagcacccacctgtatgcctgtggcacccacgccttccagcccctgtgtgccgccattgatgctgaggccttcaccctgcccaccagctttgaggagggcaaggagaagtgcccctatgaccctgcccggggcttcaccggcctcatcattgatggcggcctgtacacagccaccaggtatgagttccgcagcatcccagacatcagaagaagccgccacccccacagcctgaggacagaggagacccccatgcactggctgaatgatgctgagtttgtgttttctgtgctggtgcgggagagcaaggccagcgctgtgggagatgatgacaaggtgtactacttcttcacagagcgggccacagaggagggcagcggcagcttcacccagagccgcagcagccaccgggtggcccgggtggcccgggtgtgcaagggggacctgggcggcaagaagatcctgcagaagaagtggaccagcttcctgaaggcccggctcatctgccacatccccctgtatgagaccctgcggggcgtgtgcagcctggatgctgagaccagcagcaggacccacttctacgccgccttcaccctgagcacccagtggaagaccctggaggccagcgccatctgccgctatgacctggccgagatccaggccgtgtttgctggcccctacatggagtaccaggacggcagccgccgctggggccgctatgaaggaggagtgcctgagccccggcccggcagctgcatcacagacagcctgcggagccagggctacaacagcagccaggacctgcccagcctggtgctggactttgtgaagctgcaccccctgatggcccggcctgtggtgcccacccggggccggcccctgctgctgaagaggaacatccgctacacccacctgaccggcacccctgtgaccaccccagctggccccacctatgacctgctcttcctgggcacagcagatggctggatccacaaggctgtggtgctgggcagcggcatgcacatcatcgaggagacccaggtgttccgggagagccagagcgtggagaacctggtgatcagcctgctgcagcacagcctgtatgtgggcgcccccagcggggtcatccagctgcccctgagcagctgcagccgctaccgcagctgctatgactgcatcctggcccgggacccctactgcggctgggaccccggcacccacgcctgtgccgccgccaccaccatcgccaacagaagccagggcagcaggacagccctgatccaggacatcgagcggggcaacagaggctgtgagagcagccgggacaccggccccccaccacccctgaagaccaggtctgtgctgcggggagatgatgtgctgctgccctgtgaccagcccagcaacctggcccgggccctgtggctgctgaatggctccatgggcctgagtgatggccagggcggctacagagtgggcgtggatggcctgctggtgacagatgcccagcctgagcacagcggcaactacggctgctacgcagaagaaaatggcctgcggaccctgctggccagctacagcctgactgtgcggcctgccaccccagccccagcccccaaggccccagccacccctggggcccagctggccccagatgtgcggctgctgtatgtgctggccatcgccgccctgggcggcctgtgcctgatcctggccagcagcctgctgtatgtggcctgcctgcgggagggccggcggggcagaagaaggaagtacagcctgggccgggccagcagagctgggggcagcgctgtgcagctgcagacagtgtctggccagtgccctggagaagaagatgaaggagatgatgagggcgccggcggcctggagggcagctgcctgcagatcatccctggagagggcgccccagcccctcctcctcctcctcctcctcctcctcctgctgagctgaccaacggcctggtggccctgcccagccggctgcggaggatgaatggaaacagctatgtgctgctgcggcagagcaacaatggagtgcctgctggcccctgcagctttgctgaggagctgagccgcatcctggagaagaggaagcacacccagctggtggagcagctggatgagagctctgtgtag

SEQ ID NO: 195610 - DNA, 2532 bp, Artificial Sequence
  derived and/or modified sequence
atgtggggccggctgtggcccctgctgctgagcatcctgaccgccaccgcagtcccagggccctccctgcggaggccaagtcgcgagctggacgccactcctagaatgaccatcccctacgaagaactctctggcacacggcacttcaagggacaggcccagaactattctacactgctgctcgaagaggcttccgctcggctgttagtgggagcaagaggagcactgttcagcttaagtgccaacgatatcggcgacggcgcccacaaggaaatccactgggaagcaagtccagagatgcagtctaaatgccaccaaaagggtaaaaataatcagacagagtgctttaaccacgtccgcttcttacagcgcctcaactctacccatctatatgcctgcggtacacatgcatttcagccactatgtgccgctatcgatgccgaggcgtttacgctgcccacatcgtttgaggaaggcaaagaaaaatgcccgtacgaccccgccagaggatttactggccttattattgatggcgggttgtatactgccacacggtatgaatttagatccattcccgatatcaggagaagcaggcatccccatagtctgaggaccgaagagacacccatgcattggctgaacgatgcagaatttgtattctctgttctcgtgcgcgagagtaaagcctctgctgtcggtgacgacgacaaggtttattacttcttcactgagagggcgaccgaagaaggctcgggtagttttacccagagcagaagctcccaccgagtggccagggtcgcccgggtgtgtaagggagatctgggtggcaagaaaattcttcagaagaaatggacttcctttctaaaagcacgcctgatttgtcatattccactgtacgagaccttgagaggcgtgtgcagccttgacgccgagacgagctcacggacccatttctacgctgcctttaccctctcaacgcagtggaaaaccctggaggcctcggccatatgtagatacgacttagctgagatccaagcagtgttcgctggaccctacatggagtaccaggacggctcccgcagatggggaaggtatgagggtggggtccccgagcccagacccgggtcttgtatcacagatagtcttcgcagtcaaggatataactctagccaggacctgccgtcactggtcctggactttgttaagctacatcccctgatggcgcgacccgtggtacccacgcgcgggcgcccgctgttactcaaaaggaatatcaggtacacacacctcaccgggacccctgtgacgacccccgctggaccaacttacgatctgctctttctcggcacagccgacgggtggattcataaggccgtggtgctgggaagcggcatgcatatcatcgaagagacccaggtgttcagagagtcccagagtgttgaaaatttagtgatttctctgctccagcacagcctctatgtgggagctccctcaggtgtaatccagttgccactgtctagttgttctcgctaccgctcctgctatgattgcattctggcccgggacccctattgtggatgggacccagggacacatgcatgcgccgcagctactacaattgctaatcgctctcaagggagtcggacagccctgattcaggacatcgagagaggtaataggggctgtgagagtagtcgcgacacaggtcctcctccaccactgaaaacccggtctgtgctgcgaggtgatgacgtgcttctgccctgtgaccaacctagcaaccttgcacgggccctttggctgctaaacggttccatgggtttgagtgatggtcagggaggttacagggttggtgtggacgggctcctcgtgactgacgcacagccagagcactccggtaactacggctgttacgccgaagagaatgggctgcggactctgctcgcttcatacagccttacagtgcggccggcgactcctgcaccagcgccaaaggcccccgcaactcctggtgcccagctggctcccgacgtgcggctgttatatgtcctggccatcgctgccctgggaggcctgtgcctgattctggccagcagcttgttgtatgtggcctgtctcagggagggcaggaggggaaggagacggaagtatagcctcggtcgggccagtcgcgctggcggtagcgcggtgcaactccagacagtgagtggacaatgcccaggagaagaggatgaaggggacgacgaaggggccgggggactggaaggctcttgcttgcagattatccctggcgagggagctcccgcaccccccccacctccacccccccccccaccagctgaacttactaacggattggtggctctcccttcccgccttcgacgcatgaacggtaactcgtacgtcctgctgcgccagagtaataatggcgtccccgccggaccttgctcttttgccgaagaactctcccgtattcttgagaaacgtaagcatacccagcttgtggagcaactggacgaatcatccgtgtag

SEQ ID NO: 195611 - DNA, 2532 bp, Artificial Sequence
  derived and/or modified sequence
atgtgggggcgactgtggcccttacttctctccatattgacggccaccgccgtgccaggtccttcgttgcggaggccatcccgcgagctggacgccaccccgaggatgacaatcccttatgaggaactcagcggcactcggcacttcaaaggacaagcgcagaattattccaccttgttgttggaggaagctagcgcaagactacttgtaggggcacgcggtgctctgtttagccttagtgccaatgacataggagacggagctcataaagagattcattgggaggcgtcacctgagatgcaaagcaaatgtcaccagaagggaaagaataatcagaccgaatgttttaaccacgtacggttcttgcagcgcctcaacagtacccacctatatgcttgcggaacacatgcctttcagccactatgcgcggctatcgatgccgaggctttcaccctcccaacgagctttgaagaggggaaggagaagtgtccctacgatcccgctcgaggattcaccgggctgattattgatggcggactgtatacggccaccagatatgagtttcggtccatccctgatatccggagatccaggcatccccattctctgagaactgaagagacccccatgcactggctcaacgatgcagagtttgtgtttagtgtgctggtgagagaatctaaggcttcagccgtcggcgacgacgacaaggtttactatttcttcaccgagcgcgctactgaggagggaagcggctcctttactcagtccaggtccagccaccgagttgctcgcgtcgcacgagtctgcaagggggatctgggcggaaaaaaaattctacaaaagaagtggaccagctttctgaaagctagattaatttgtcatatccctctctacgaaactttacgtggtgtctgcagcttggacgctgaaaccagctcgcgaacgcacttttatgcagctttcaccctctctactcagtggaagaccctcgaggccagcgctatttgtcgttacgaccttgcagaaatccaggctgtcttcgctgggccttatatggaatatcaggacggctccagacgctggggaagatacgagggtggcgtgcctgaacctagaccgggaagttgtatcaccgattctctgcgctcacaaggttacaactccagccaggatttaccatctctagtgctcgactttgtcaagctgcatcctctgatggcgagaccagttgtgcctactcggggtagacctctcctgctcaaacggaatatcaggtatactcatctgaccggcaccccggtgactacccctgctggccctacgtacgacctgctgtttcttgggaccgctgacggctggattcacaaggcagttgtgctgggcagtggtatgcacatcatcgaggaaactcaggttttcagggagagtcagagcgtagaaaacctggtcattagcctgctgcagcacagcttgtacgtgggggctccgtccggggtgattcagctaccactgtcttcgtgctcccgatataggagttgttacgactgtatcctggcacgagacccctactgcggatgggaccccggaacccacgcctgcgcagcagccactaccattgcaaaccgaagccagggctcccgaactgccctgatccaggacattgagagggggaaccgtgggtgcgagagctccagagatactggacctccccctcccttaaagacacggagcgtactcaggggggacgatgtcctgcttccctgtgaccagccgtccaaccttgcaagagctttatggcttctcaacggatccatgggtctcagcgatggccagggcggatacagagtgggagttgatgggctgcttgttacggacgctcagcctgaacattcaggcaactatgggtgttatgctgaggagaatggcctgagaactttgctggcatcatattctctgactgttaggcccgctacacctgccccagcaccaaaagcccctgccacaccaggggctcagctggctcctgacgtgcgcctcctctatgtgttagcgattgccgctctcgggggtctgtgcctgattcttgctagtagcctgttgtacgtcgcctgcctccgagagggcagaagggggcgtcggcgaaagtactcactgggtagggctagtcgcgctgggggaagcgcggtgcagctgcagactgtgtccggacaatgtccaggcgaggaggacgaaggcgatgatgaaggcgctggcggtttagagggctcctgtctccagattatccccggtgagggtgcacccgcaccgcctccaccaccccctcctccacctccggcagaattaacaaacggtctggtggccctgcctagcagactgagacgcatgaatggcaactcatacgtgcttctgcgtcaaagtaacaacggcgttccagccggtccatgttcattcgccgaagagctctcaaggatcctggaaaagcgtaaacacactcaactagtggaacagttggacgagtcctccgtgtag

SEQ ID NO: 195612 - protein, 796 aa, Artificial Sequence
  derived and/or modified sequence
MVLAQRRRGGCEKLRAGPQAVLASGSGFCDNMLADLGLIGTIGEDDEVPVEPESDSGDEEEEGPIVLGRRQKALGKNRSADFNPDFVFTEKEGTYDGSWALADVMSQLKKKRAATTLDEKIEKVRKKRKTEDKEAKSGKLEKEKEAKEGSEPKEQEDLQENDEEGSEDEASETDYSSADENILTKADTLKVKDRKKKKKKGQEAGGFFEDASQYDENLSFQDMNLSRPLLKAITAMGFKQPTPIQKACIPVGLLGKDICACAATGTGKTAAFALPVLERLIYKPRQAPVTRVLVLVPTRELGIQVHSVTRQLAQFCNITTCLAVGGLDVKSQEAALRAAPDILIATPGRLIDHLHNCPSFHLSSIEVLILDEADRMLDEYFEEQMKEIIRMCSHHRQTMLFSATMTDEVKDLASVSLKNPVRIFVNSNTDVAPFLRQEFIRIRPNREGDREAIVAALLTRTFTDHVMLFTQTKKQAHRMHILLGLMGLQVGELHGNLSQTQRLEALRRFKDEQIDILVATDVAARGLDIEGVKTVINFTMPNTIKHYVHRVGRTARAGRAGRSVSLVGEDERKMLKEIVKAAKAPVKARILPQDVILKFRDKIEKMEKDVYAVLQLEAEEKEMQQSEAQINTAKRLLEKGKEAVVQEPERSWFQTKEERKKEKIAKALQEFDLALRGKKKRKKFMKDAKKKGEMTAEERSQFEILKAQMFAERLAKRNRRAKRARAMPEEEPVRGPAKKQKQGKKSVFDEELTNTSKKALKQYRAGPSFEERKQLGLPHQRRGGNFKSKSRYKRRK

SEQ ID NO: 195613 - protein, 136 aa, Artificial Sequence
  derived and/or modified sequence
MVLAQRRRGGCEKLRAGPQAVLASGSGFCDNMLADLGLIGTIGEDDEVPVEPESDSGDEEEEGPIVLGRRQKALGKNRSADFNPDFVFTEKEGTYDGSWALADVMSQLKKKRAATTLDEKIEKVRKKRKKKKKKKK

SEQ ID NO: 195614 - DNA, 2391 bp, Artificial Sequence
  derived and/or modified sequence
atggtcctggcccaacggcggagggggggatgtgagaaactcagggctggaccacaagccgttctagcaagtggcagcggcttttgcgacaatatgttggcagacctggggcttatcggcactattggggaggacgacgaggtgcctgtcgaaccggagtcagacagcggggacgaagaagaggagggtcccattgttctgggtagaagacagaaagcacttgggaagaataggtccgcagactttaatccagactttgttttcacagagaaggagggaacatacgacggatcatgggcactggcggacgttatgtcccagctaaaaaagaaaagagcggcaactaccttggacgaaaagattgaaaaagtacgtaagaagcggaaaaccgaagataaggaggctaaaagtggaaagctcgagaaggaaaaagaagcgaaggaaggctccgagcctaaggagcaagaggatttacaggaaaatgacgaagaagggtctgaggatgaggcttcagaaactgactactctagcgccgacgaaaacatcctcacaaaggcggacacactgaaagtcaaggaccgaaagaagaaaaagaaaaaggggcaggaggctgggggattctttgaggacgccagtcagtatgacgagaatctgtccttccaagacatgaacctgtcccggcccctccttaaagccatcacagctatgggtttcaaacagcctactcccatccagaaggcgtgcataccagtggggttgttaggcaaggacatatgtgcatgcgcggctacaggtactggaaaaaccgctgctttcgccttgccagtcttagagcggctcatttacaaaccacgccaagcaccagtgactagggtgttagtcctggtgcctacaagggagctgggaattcaggtgcattcagtgactcgtcagttagcgcagttttgtaacatcacaacgtgtctggcagtgggcggcctagatgtgaaaagtcaggaagctgccctgagggcagcacccgatattctgatagccacacctggacgcttgatagaccacctacataactgcccatcttttcacctgagcagtatcgaggtgcttatacttgacgaggcagacaggatgctggatgagtacttcgaagaacaaatgaaggagatcatcagaatgtgttcacatcaccgccagactatgctcttcagcgctacaatgaccgatgaggttaaggacctggcctccgtgtcactcaagaaccccgtccgcatctttgtcaatagcaacaccgacgtggcaccatttctgagacaggagttcatccgcatcagacccaatcgcgagggggatcgcgaggccattgtagcagccctcctaactagaaccttcactgatcacgttatgctcttcacccagacaaagaagcaggcccaccgaatgcacatcctgctcggtctgatggggctccaggtgggtgagctacacgggaatttgagtcaaacacagcgtctggaagcgctgagacgttttaaggatgagcagatagatattcttgtggccacagacgttgctgcccgtgggctggatattgaaggagtgaaaaccgtgattaatttcacgatgcccaatacaattaagcattatgtccacagggtaggacgcactgctagagccggaagggccgggagaagcgttagcctggtgggagaagacgagagaaagatgctcaaagagattgttaaagcggccaaggcacccgttaaagcgcgtatattaccccaggatgtcatcctgaagttcagggacaaaatagagaaaatggagaaggatgtgtacgcagttctccagctggaagcagaagagaaggagatgcagcagtccgaggcgcaaataaacacagcaaaacggctcttggagaaaggaaaggaggccgtcgttcaagagcctgaacgttcctggttccagaccaaagaggaacggaagaaagagaagatcgcaaaagccctgcaggaattcgacctggcactgaggggcaagaagaagcggaagaaattcatgaaagacgcgaaaaaaaagggtgagatgactgctgaagagaggagccagttcgaaatattaaaggcacagatgttcgctgagaggctcgctaaacggaatcggcgcgctaagcgggcccgtgccatgccagaagaggaacccgttaggggaccggccaagaagcagaagcagggcaaaaaaagtgtttttgatgaggaactaaccaatacatcaaagaaggccctcaagcagtatagagccggcccctcgttcgaagagcgaaaacagctcggactaccacatcagcgacgggggggaaatttcaagtctaaaagtcggtacaaacgacggaagtag

SEQ ID NO: 195615 - DNA, 411 bp, Artificial Sequence
  derived and/or modified sequence
atggtgctggctcaacgcaggcgtgggggttgtgaaaaattgagagccggaccccaggccgtgctggctagtggatctggcttctgcgacaatatgttggccgatcttggcctgattggcaccattggcgaggatgacgaggtgccggtggaacctgaatctgattcaggggacgaggaggaagagggtccgattgtactgggccgccgtcaaaaagcactgggaaaaaatagatcggcggattttaacccagattttgttttcacagaaaaggaaggtacctatgatgggtcgtgggccttagccgacgttatgtcccaattgaaaaaaaaacgggcagctaccacattggacgagaaaattgaaaaggtccggaagaaaagaaaaaagaaaaagaaaaaaaaaaaatag

SEQ ID NO: 195616 - DNA, 2391 bp, Artificial Sequence
  derived and/or modified sequence
atggtgctggcccagaggagaagaggaggctgtgagaagctgcgggccggcccccaggccgtgctggccagcggcagcggcttctgtgacaacatgctggccgacctgggcctgattggcaccatcggggaggatgatgaggtgcctgtggagcctgagagtgacagcggagatgaggaggaggagggccccatcgtgctgggccggcggcagaaggccctgggcaagaacagatctgctgacttcaacccagactttgtgttcacagagaaggagggcacctatgatggctcctgggccctggctgatgtgatgagccagctgaagaagaagagagctgccaccaccctggatgagaagattgagaaggtgaggaagaagaggaagacagaggacaaggaggccaagagcggcaagctggagaaggagaaggaggccaaggagggcagcgagcccaaggagcaggaggacctgcaggagaatgatgaggagggctctgaagatgaggccagcgagacagactacagcagcgcagatgagaacatcctgaccaaggctgacaccctgaaggtgaaggacaggaagaagaagaagaagaagggccaggaggccggcggcttctttgaagatgccagccagtatgatgagaacctgtccttccaggacatgaacctgagccggcccctgctgaaggccatcacagccatgggcttcaagcagcccacccccatccagaaggcctgcatccctgtgggcctgctgggcaaggacatctgtgcctgtgccgccaccggcaccgggaagacagctgcctttgccctgcctgtgctggagcggctcatctacaagccccggcaggcccctgtgaccagggtgctggtgctggtgcccacccgggagctgggcatccaggtgcacagcgtgacccggcagctggcccagttctgcaacatcaccacctgcctggccgtgggcggcctggatgtgaagagccaggaggccgccctgcgggccgccccagacatcctgattgccaccccaggccgcctgattgaccacctgcacaactgccccagcttccacctgagcagcattgaggtgctgatcctggatgaagctgacaggatgctggatgagtactttgaggagcagatgaaggagatcatccgcatgtgcagccaccaccggcagaccatgctgttcagcgccaccatgacagatgaggtgaaggacctggcctctgtgtccctgaagaaccctgtgcgcatctttgtgaacagcaacacagatgtggcccccttcctgcggcaggagttcatccgcatccggcccaaccgggagggggaccgggaggccatcgtggccgccctgctgaccaggaccttcacagaccacgtgatgctgttcacccagaccaagaagcaggcccacaggatgcacatcctgctgggcctgatgggcctgcaggtgggggagctgcacggcaacctgagccagacccagaggctggaggccctgcggcgcttcaaggatgagcagattgacatcctggtggccacagatgtggccgcccggggcctggacattgaaggagtgaagacagtcatcaacttcaccatgcccaacaccatcaagcactacgtgcaccgggtgggccgcacagcccgggccggccgggccggccgctctgtgtccctggtgggagaagatgagaggaagatgctgaaggagatcgtgaaggccgccaaggcccctgtgaaggcccgcatcctgccccaggacgtcatcctgaagttccgggacaagattgagaagatggagaaggatgtgtatgctgtgctgcagctggaggccgaggagaaggagatgcagcagagcgaggcccagatcaacacagccaagaggctgctggagaagggcaaggaggccgtggtgcaggagcctgagaggtcctggttccagaccaaggaggagaggaagaaggagaagatcgccaaggccctgcaggagtttgacctggccctgcggggcaagaagaagaggaagaagttcatgaaggatgccaagaagaagggggagatgacagctgaggagaggagccagtttgagatcctgaaggcccagatgtttgctgagcggctggccaagaggaacagaagagccaagagggcccgggccatgcctgaggaggagcctgtgcggggccctgccaagaagcagaagcagggcaagaagtctgtgtttgatgaggagctgaccaacaccagcaagaaggccctgaagcagtacagagctggccccagctttgaggagaggaagcagctgggcctgccccaccagaggagaggaggcaacttcaagagcaagagccgctacaagaggaggaagtag

SEQ ID NO: 195617 - DNA, 411 bp, Artificial Sequence
  derived and/or modified sequence
atggtgctggcccagaggagaagaggaggctgtgagaagctgcgggccggcccccaggccgtgctggccagcggcagcggcttctgtgacaacatgctggccgacctgggcctgattggcaccatcggggaggatgatgaggtgcctgtggagcctgagagtgacagcggagatgaggaggaggagggccccatcgtgctgggccggcggcagaaggccctgggcaagaacagatctgctgacttcaacccagactttgtgttcacagagaaggagggcacctatgatggctcctgggccctggctgatgtgatgagccagctgaagaagaagagagctgccaccaccctggatgagaagattgagaaggtgaggaagaagaggaagaagaagaagaagaagaagaagtag

SEQ ID NO: 195618 - DNA, 2391 bp, Artificial Sequence
  derived and/or modified sequence
atggtgctggcccagcggcggcggggcggctgcgagaagctgcgggccggcccccaggctgtgctggcttccggatccggtttctgcgacaacatgctggcagacctcggcctgatcggcacgataggcgaggacgacgaggtgccggtggagcctgaatccgactctggggacgaggaggaagagggccctatcgtgctggggagacgccaaaaagctttaggaaagaatcggtcagctgacttcaatcccgacttcgtgtttaccgagaaagaagggacatacgatggctcatgggctcttgctgacgtcatgagtcagctcaaaaaaaagcgggcggcaactaccctagacgaaaagattgagaaagtgaggaagaaacgtaagactgaggacaaagaggccaaatctgggaaactggagaaagagaaggaggccaaggaggggtctgaacctaaagagcaagaggacttacaggaaaacgacgaggagggtagcgaagatgaggccagcgagacggactatagctccgcagacgagaatattttaacaaaggccgacaccttgaaagtgaaggatagaaaaaaaaagaaaaagaagggccaggaagctgggggattttttgaggacgccagccagtacgatgaaaacttgtcgttccaggatatgaacttatctcgccccttactgaaggccatcactgctatgggcttcaagcaacccactcctatccagaaagcatgtataccggttggcctcctgggcaaggacatctgcgcttgtgctgctaccggaacaggaaaaacagccgcctttgctttgcctgtgctggagagattaatctacaagccaagacaagcccctgtaacacgggttctcgtgctggtccccactcgagagctcggtatccaggtgcatagtgtcacacggcagcttgcgcaattctgtaacatcactacttgcctggccgtgggaggacttgacgtcaaatcacaggaggcggccttaagggcggctccggacattctgattgcaacacctggccgccttattgatcatttacataactgccccagcttccacctgtccagtattgaggtgttaatcctagatgaagctgacaggatgctggatgaatacttcgaagagcaaatgaaagaaataataaggatgtgctctcaccatcggcagacaatgctgttctctgccaccatgaccgacgaggtgaaggacctggccagcgtgagcctgaaaaacccagtccggatcttcgtcaactcaaacaccgatgtcgctccttttctgaggcaggagtttatcagaattaggcctaaccgagaaggcgacagggaggcgatcgttgcagccttattgacacgaacttttactgaccatgtgatgctgttcacccagacaaaaaagcaagctcaccggatgcacattttacttggcctgatgggcctacaggttggcgagttacatgggaacctcagtcaaacccagaggttggaagctcttagaaggttcaaggatgaacagatcgatatccttgtcgctacggatgtggcagccagaggactggacatcgagggagtgaaaactgtgattaacttcacaatgcctaatactatcaaacactatgtgcacagggtcggccggaccgccagggctgggagagccggaagatctgtctcgttggtcggggaggatgagagaaagatgctcaaagagatcgtgaaagcggctaaagcacccgtaaaggcccgtatcctgccccaagacgtgattctgaaattccgggacaaaatcgaaaagatggagaaagatgtgtatgccgtgcttcaactggaggcagaagaaaaagaaatgcagcaatcagaggcccagattaacacggcaaagcgcctcttggaaaaagggaaggaggccgtggtccaggagcctgagcgctcctggtttcagacaaaggaggaacgcaaaaaagagaaaatcgctaaggccctgcaagaatttgatctcgctctgcgtggaaagaagaagaggaagaaattcatgaaagacgcaaagaagaaaggcgagatgacagcagaggaacgaagccagttcgaaatcttaaaggcgcaaatgttcgccgaacggctcgccaagagaaacaggcgggccaagagagcccgcgcaatgcctgaagaggaacctgtgcggggaccagccaagaagcagaagcaggggaagaaaagtgtgttcgacgaagagctgaccaacacctccaaaaaagcgttgaaacagtaccgggccggacccagtttcgaggagcgaaagcaattgggccttccacatcagaggagggggggcaacttcaagagtaagagccggtataagagaaggaaatag

SEQ ID NO: 195619 - DNA, 411 bp, Artificial Sequence
  derived and/or modified sequence
atggtgctggcccagcggcggcggggcggctgcgagaagctgcgggccgggccacaggctgttttggcctctggatccggcttctgcgataacatgctcgccgatctgggcctgatcggcaccatcggagaagatgatgaagttcccgtggagccagaaagcgactctggcgacgaggaggaagaaggccccattgtcttaggtcgacgtcagaaagctctcggtaagaaccgcagcgctgattttaacccagactttgtgttcactgaaaaggaagggacgtatgacggctcctgggccctggctgatgtaatgtctcaattgaagaagaagcgcgccgccaccacactggacgagaagattgagaaggtcagaaagaaaaggaaaaagaagaaaaagaaaaagaagtag

SEQ ID NO: 195620 - DNA, 2391 bp, Artificial Sequence
  derived and/or modified sequence
atggtgttggcacagaggaggcggggaggttgcgagaagcttcgcgcaggtccacaggccgtactggcatctggaagtggcttctgcgacaacatgctggcggacctagggctcattggcactatcggtgaagacgacgaggtgccagtcgaaccagagtctgactccggcgacgaggaagaggaaggaccgattgtgctgggacggagacagaaggccttgggaaaaaatcgctccgctgattttaacccagacttcgtttttaccgaaaaagaaggtacatacgatggatcgtgggccctggctgacgttatgtcccagctgaaaaaaaaacgagcggcaaccacactcgatgaaaagatagagaaggtgcgaaagaaacgaaaaaccgaagataaggaggctaaatccgggaaacttgagaaggaaaaagaggctaaagaaggatccgagcctaaagagcaggaggatttacaagagaacgatgaggagggtagtgaggatgaggcaagcgagacagattattcctccgccgacgagaatatcctcacaaaggcagatacactcaaggtgaaggatcgtaaaaagaaaaaaaaaaagggccaggaggcaggagggttttttgaagatgcctcccagtacgatgaaaatcttagctttcaggatatgaatctgtccaggcccctgctaaaagcaatcactgccatgggattcaaacagcccactcccatacagaaagcctgtatccctgtaggcttactgggaaaggatatttgcgcctgcgccgctactggaacaggaaagacagcagcttttgcactgcccgttctcgaacgcctgatctataagccccgtcaggctcctgtaactcgggtgcttgtgttggtgcccacgcgggagcttgggattcaagttcattccgtgacccgacagctcgcacagttttgcaacatcacaacctgtctagccgtgggaggattggatgtgaagtcccaagaggcagctctgagagcggcacccgacattttgatcgctactcctggcagactgatagaccatcttcacaattgtccatcattccatcttagttccattgaggtgctgatcttggatgaggcagatcgtatgctcgatgaatattttgaggagcagatgaaagaaataatccgcatgtgttcacaccatcgacagactatgctgttcagtgccacaatgacggacgaggtgaaagaccttgcaagtgtgagcttaaaaaatccggttcggatatttgtgaattctaatactgacgtggcaccctttctgcgccaggaattcattagaatcagacccaatagggagggggacagggaggcgattgtagccgctttgctcacaaggaccttcaccgatcacgtcatgctttttacccagacaaagaagcaggcacacagaatgcacatcctattaggcctcatggggctccaagtcggggaactgcacggcaatctgtctcagacacaaaggctggaagccctacgtaggttcaaggacgagcagatcgatatactggtggcgactgatgtggctgcgagggggctggacatagagggagtcaagactgttattaactttacaatgccgaatacaattaagcattacgtccatcgagttgggaggacggcacgcgcaggacgggctgggaggtctgtaagcctggtgggagaggacgaacgcaagatgttgaaagaaattgttaaagccgctaaggctcccgttaaggctcggatcttgccccaggacgtcattctgaagttccgggataaaatcgagaaaatggagaaagacgtatacgctgtcctgcagttagaagcagaagagaaagaaatgcagcagtcagaggcccagattaacaccgctaagagactgttggagaaaggaaaagaagccgtggtacaggagcctgagaggtcctggtttcagaccaaggaggagagaaaaaaagaaaaaatagctaaggcgcttcaagaattcgacttggcactgcggggtaagaaaaaaaggaaaaagttcatgaaggatgctaagaaaaaaggcgaaatgactgccgaagaaagatcccagtttgagatcctgaaagcccagatgttcgccgagaggcttgccaaacggaataggagggcgaaacgcgcaagggccatgcccgaagaggaacctgtgagagggcctgccaagaagcaaaaacagggaaagaaaagcgtgttcgatgaggagctgactaacacctcaaagaaggccctcaaacagtatcgggcaggaccctcatttgaggaaagaaaacaactcggcttgccccaccagcgacggggaggcaacttcaaatctaagagtcgatacaagcgaaggaaatag

SEQ ID NO: 195621 - DNA, 411 bp, Artificial Sequence
  derived and/or modified sequence
atggtcctggcccagaggagacgcggaggatgcgaaaaactccgggcagggcctcaagccgtcctggcatctgggtccggattctgtgataatatgctggcagatctaggcctcataggcacaattggagaggatgacgaggttcctgtggagccagagagcgattctggcgatgaggaggaagaagggccaatcgtcctgggaagaagacagaaggctctagggaaaaaccggtcagcggacttcaatcctgatttcgtgtttaccgagaaagagggaacgtacgacggaagctgggccctggcggatgtcatgagccaactgaagaagaagagagcggcaaccaccttggatgagaaaattgaaaaggtgcgcaagaaaagaaagaagaaaaagaagaaaaagaagtag

SEQ ID NO: 195622 - DNA, 2643 bp, Artificial Sequence
  derived and/or modified sequence
aagtgacgcatggtacttgcgcaaagacgacgaggaggctgcgaaaagttaagggccggaccgcaggctgtgctcgcttccggaagtggcttctgcgacaacatgcttgcggacctcggcttaatcggaaccataggcgaggatgacgaggtgccggtggagcccgagtctgactccggggacgaggaagaggaggggcccattgtgctgggcagacgacaaaaagctttggggaagaaccgcagtgctgatttcaaccctgatttcgttttcactgagaaggaggggacgtacgatggcagctgggccctggctgatgtcatgagccaactcaagaagaagagggcagccactacattagatgagaagattgagaaagttcgaaagaaaaggaaaacagaggataaagaagccaagtctgggaagttggaaaaggagaaagaagcaaaggaaggctctgaaccaaaggagcaggaagaccttcaagagaatgatgaggaaggctcagaagatgaagcctcggagactgactactcatcagctgatgagaacatcctcaccaaagcagatacactcaaagtaaaggatcggaagaagaagaagaagaaaggacaggaagcaggaggattttttgaagatgcatctcagtacgatgaaaacctctcgttccaggacatgaacctttcccgccctcttctgaaggccattacagccatgggcttcaagcagcccaccccgatccagaaggcgtgcatacctgtgggtctattggggaaggacatctgtgcctgtgcagccactgggacaggtaaaactgccgcctttgccctgcctgttttggagcgtctgatttataaaccccgccaggctccagtcacccgcgtgctggtgctagtgcccacccgagagctgggcatccaggtgcactctgtcaccagacagctggcccagttctgcaacatcaccacctgcctggctgtgggcggcttggatgtgaagtctcaggaagcagctcttcgggcagcgcctgacatcctcatcgccaccccaggccggctcatcgatcacctccacaactgcccttccttccacctgagcagcatcgaggtgctcatcctggacgaggctgacaggatgctggatgagtactttgaggagcagatgaaggagatcatccgaatgtgttcccaccaccgccagaccatgctcttctcggccaccatgacagacgaggtgaaagatctggcttctgtctccttgaagaatcctgtccggatatttgtgaacagcaacacagatgtggctcccttcctgcggcaggagttcatccggatccggcctaatcgtgaaggagaccgggaagccatcgtggcagctttgttgacgaggaccttcactgaccatgtgatgctgttcacgcaaaccaagaagcaggcccaccgcatgcacatcctcctggggctcatggggctgcaggtgggtgagctccatggcaacttgtcacagacgcagcggctggaggccctccggcgttttaaggatgaacagattgacatcctcgtggccactgatgtggcagcccgtggacttgacattgagggggtcaaaacggtaatcaacttcacaatgcctaataccatcaaacattatgtccaccgggtggggcgaacagcacgtgctggcagggctgggcgctcagtctctctggtgggagaagatgagcggaagatgctgaaggagattgtaaaagctgccaaggcccctgtgaaggccaggatacttccccaagatgtcatcctcaaattccgggacaagattgagaaaatggagaaagatgtgtatgcagttctgcagctagaggcggaggaaaaagagatgcagcagtcagaagcccagatcaatacagcaaagcggctcctggagaaggggaaggaggcagtggtccaagagcccgagaggagctggttccagaccaaagaagagaggaagaaggagaaaattgccaaagctctgcaggaatttgacttggccttaagaggaaagaagaaaaggaagaagtttatgaaggatgccaaaaaaaagggggagatgacagcagaggaaaggtctcagtttgaaatcctcaaggcgcagatgtttgctgaacggctagcgaagaggaatcgcagagccaagcgggcccgagcaatgcccgaggaggagccagtgagaggtcctgccaagaagcaaaagcaggggaagaaatctgtatttgatgaagaactcaccaacacaagcaagaaggccctgaaacagtatcgagctggcccttcctttgaagaaaggaaacagttgggcttgccccaccagagacgaggaggaaactttaaatctaaatccagatacaagaggaggaagtagctgtcgtggcctgaagaaattcatgggggcagcccttaaatcccttccctgtgggaagtcatcctggctggtctgtcttttctccatttgtttaaaaaaaaaacaaaaacaaaaaacaacactttggtgtggtggtatggtacgtagctattttcctaagcatgtctgtcaatctcccttcttgctgattagctttcatatgactatattaaatggaagtatttttgggaaaagagaaaccaa

SEQ ID NO: 195623 - DNA, 469 bp, Artificial Sequence
  derived and/or modified sequence
atgcgcactcttaagaggtcgaacggggagggcggcaggggctctggaacggaagtgacgcatggtacttgcgcaaagacgacgaggaggctgcgaaaagttaagggccggaccgcaggctgtgctcgcttccggaagtggcttctgcgacaacatgcttgcggacctcggcttaatcggaaccataggcgaggatgacgaggtgccggtggagcccgagtctgactccggggacgaggaagaggaggggcccattgtgctgggcagacgacaaaaagctttggggaagaaccgcagtgctgatttcaaccctgatttcgttttcactgagaaggaggggacgtacgatggcagctgggccctggctgatgtcatgagccaactcaagaagaagagggcagccactacattagatgagaagattgagaaagttcgaaagaaaagaaaaaaaaaaaaaaaaaaaaaaaaa

SEQ ID NO: 195624 - DNA, 2391 bp, Artificial Sequence
  derived and/or modified sequence
atggtgctggcccagagaagaagaggcggctgcgagaagctgagagccggcccccaggccgtgctggccagcggcagcggcttctgcgacaacatgctggccgacctgggcctgatcggcaccatcggcgaggacgacgaggtgcccgtggagcccgagagcgacagcggcgacgaggaggaggagggccccatcgtgctgggcagaagacagaaggccctgggcaagaacagaagcgccgacttcaaccccgacttcgtgttcaccgagaaggagggcacctacgacggcagctgggccctggccgacgtgatgagccagctgaagaagaagagagccgccaccaccctggacgagaagatcgagaaggtgagaaagaagagaaagaccgaggacaaggaggccaagagcggcaagctggagaaggagaaggaggccaaggagggcagcgagcccaaggagcaggaggacctgcaggagaacgacgaggagggcagcgaggacgaggccagcgagaccgactacagcagcgccgacgagaacatcctgaccaaggccgacaccctgaaggtgaaggacagaaagaagaagaagaagaagggccaggaggccggcggcttcttcgaggacgccagccagtacgacgagaacctgagcttccaggacatgaacctgagcagacccctgctgaaggccatcaccgccatgggcttcaagcagcccacccccatccagaaggcctgcatccccgtgggcctgctgggcaaggacatctgcgcctgcgccgccaccggcaccggcaagaccgccgccttcgccctgcccgtgctggagagactgatctacaagcccagacaggcccccgtgaccagagtgctggtgctggtgcccaccagagagctgggcatccaggtgcacagcgtgaccagacagctggcccagttctgcaacatcaccacctgcctggccgtgggcggcctggacgtgaagagccaggaggccgccctgagagccgcccccgacatcctgatcgccacccccggcagactgatcgaccacctgcacaactgccccagcttccacctgagcagcatcgaggtgctgatcctggacgaggccgacagaatgctggacgagtacttcgaggagcagatgaaggagatcatcagaatgtgcagccaccacagacagaccatgctgttcagcgccaccatgaccgacgaggtgaaggacctggccagcgtgagcctgaagaaccccgtgagaatcttcgtgaacagcaacaccgacgtggcccccttcctgagacaggagttcatcagaatcagacccaacagagagggcgacagagaggccatcgtggccgccctgctgaccagaaccttcaccgaccacgtgatgctgttcacccagaccaagaagcaggcccacagaatgcacatcctgctgggcctgatgggcctgcaggtgggcgagctgcacggcaacctgagccagacccagagactggaggccctgagaagattcaaggacgagcagatcgacatcctggtggccaccgacgtggccgccagaggcctggacatcgagggcgtgaagaccgtgatcaacttcaccatgcccaacaccatcaagcactacgtgcacagagtgggcagaaccgccagagccggcagagccggcagaagcgtgagcctggtgggcgaggacgagagaaagatgctgaaggagatcgtgaaggccgccaaggcccccgtgaaggccagaatcctgccccaggacgtgatcctgaagttcagagacaagatcgagaagatggagaaggacgtgtacgccgtgctgcagctggaggccgaggagaaggagatgcagcagagcgaggcccagatcaacaccgccaagagactgctggagaagggcaaggaggccgtggtgcaggagcccgagagaagctggttccagaccaaggaggagagaaagaaggagaagatcgccaaggccctgcaggagttcgacctggccctgagaggcaagaagaagagaaagaagttcatgaaggacgccaagaagaagggcgagatgaccgccgaggagagaagccagttcgagatcctgaaggcccagatgttcgccgagagactggccaagagaaacagaagagccaagagagccagagccatgcccgaggaggagcccgtgagaggccccgccaagaagcagaagcagggcaagaagagcgtgttcgacgaggagctgaccaacaccagcaagaaggccctgaagcagtacagagccggccccagcttcgaggagagaaagcagctgggcctgccccaccagagaagaggcggcaacttcaagagcaagagcagatacaagagaagaaagtag

SEQ ID NO: 195625 - DNA, 411 bp, Artificial Sequence
  derived and/or modified sequence
atggtgctggcccagagaagaagaggcggctgcgagaagctgagagccggcccccaggccgtgctggccagcggcagcggcttctgcgacaacatgctggccgacctgggcctgatcggcaccatcggcgaggacgacgaggtgcccgtggagcccgagagcgacagcggcgacgaggaggaggagggccccatcgtgctgggcagaagacagaaggccctgggcaagaacagaagcgccgacttcaaccccgacttcgtgttcaccgagaaggagggcacctacgacggcagctgggccctggccgacgtgatgagccagctgaagaagaagagagccgccaccaccctggacgagaagatcgagaaggtgagaaagaagagaaagaagaagaagaagaagaagaagtag

SEQ ID NO: 195626 - protein, 228 aa, Artificial Sequence
  derived and/or modified sequence
MSYAEKPDEITKDEWMEKLNNLHVQRADMNRLIMNYLVTEGFKEAAEKFRMESGIEPSVDLETLDERIKIREMILKGQIQEAIALINSLHPELLDTNRYLYFHLQQQHLIELIRQRETEAALEFAQTQLAEQGEESRECLTEMERTLALLAFDSPEESPFGDLLHTMQRQKVWSEVNQAVLDYENRESTPKLAKLLKLLLWAQNELDQKKVKYPKMTDLSKGVIEEPK

SEQ ID NO: 195627 - protein, 155 aa, Artificial Sequence
  derived and/or modified sequence
MSYAEKPDEITKDEWMEKLNNLHVQRADMNRLIMNYLVTEGFKEAAEKFRMESGIEPSVDLETLDERIKIREMILKGQIQQVVHDCWRKERVFILSDLPSSISAASHPPSSAGSADVLLLFTHRTVPCSVVGRREVVQGCVHCLRVGTVDGHMAL

SEQ ID NO: 195628 - DNA, 687 bp, Artificial Sequence
  derived and/or modified sequence
atgtcatatgcagagaaaccagacgagatcactaaagacgaatggatggaaaagctcaataatctccacgtccagcgtgccgacatgaatagactgatcatgaactacctggttacagagggctttaaagaagccgcagaaaaatttagaatggagtccgggatcgaaccctccgtcgatttggagacactggacgagaggataaagattagggaaatgattctgaaggggcagatacaggaagccattgcacttattaactccctgcatcctgagttgctcgacactaaccggtacctgtattttcaccttcaacagcaacatttgatagagctcatcagacagcgggaaaccgaagccgctttggaattcgctcagactcagctggctgagcagggggaggagagccgggaatgtctgacagagatggaacgtacactcgccttgttggcattcgattcccctgaagaaagcccctttggggacctcctccacaccatgcagagacagaaagtctggtctgaagtcaaccaggcagttttggattatgaaaacagggaaagcacccctaagcttgcaaaacttctcaagctccttctgtgggcacaaaacgagctggatcagaagaaagtcaagtaccctaaaatgacagacctgagcaagggtgtcattgaagagcctaaatag

SEQ ID NO: 195629 - DNA, 468 bp, Artificial Sequence
  derived and/or modified sequence
atgtcctacgccgagaaaccggatgagatcaccaaagacgagtggatggaaaagctgaacaatcttcacgtgcaacgggctgacatgaaccgactgatcatgaactacttagtcaccgaaggctttaaggaggcagccgaaaagttccgcatggagagcggcattgagccgagcgtggatctggaaaccctagatgagagaattaaaatccgcgagatgatccttaagggtcagatccagcaggttgtgcatgattgttggcggaaggagagagttttcattctgtcagatctaccgagttctatatccgctgcaagtcatcctccctccagcgctggcagcgccgatgtgttgctgctgttcacgcacagaaccgtcccttgctccgtcgtgggccggcgggaggtggtgcaaggctgtgttcattgcctacgcgtggggactgtagatggccatatggccctgtag

SEQ ID NO: 195630 - DNA, 687 bp, Artificial Sequence
  derived and/or modified sequence
atgtcctatgcagagaagccagatgagatcaccaaggatgagtggatggagaagctgaacaacctgcacgtgcagagagctgacatgaacagactcatcatgaactacctggtgacagagggcttcaaggaggccgctgagaagttcaggatggagagcggcatcgagcccagcgtggacctggagaccctggatgagcgcatcaagatccgggagatgatcctgaagggccagatccaggaggccatcgccctgatcaacagcctgcaccctgagctgctggacaccaaccgctacctgtacttccacctgcagcagcagcacctgattgagctgatccggcagcgggagacagaggccgccctggagtttgcccagacccagctggccgagcagggcgaggagagccgggagtgcctgacagagatggagaggaccctggccctgctggcctttgacagccctgaggagagcccctttggagacctgctgcacaccatgcagaggcagaaggtgtggagcgaggtgaaccaggccgtgctggactatgagaaccgggagagcacccccaagctggccaagctgctgaagctgctgctgtgggcccagaatgagctggaccagaagaaggtgaagtaccccaagatgacagacctgagcaaaggagtcatcgaggagcccaagtag

SEQ ID NO: 195631 - DNA, 468 bp, Artificial Sequence
  derived and/or modified sequence
atgtcctatgcagagaagccagatgagatcaccaaggatgagtggatggagaagctgaacaacctgcacgtgcagagagctgacatgaacagactcatcatgaactacctggtgacagagggcttcaaggaggccgctgagaagttcaggatggagagcggcatcgagcccagcgtggacctggagaccctggatgagcgcatcaagatccgggagatgatcctgaagggccagatccagcaggtggtgcatgactgctggaggaaggagagggtcttcatcctgagtgacctgcccagcagcatctctgctgccagccacccccccagcagcgctggcagcgcagatgtgctgctgctcttcacccacaggacagtgccctgcagcgtggtgggcagaagagaggtggtgcagggctgtgtgcactgcctgcgggtgggcaccgtggatggccacatggccctgtag

SEQ ID NO: 195632 - DNA, 687 bp, Artificial Sequence
  derived and/or modified sequence
atgagctacgccgagaagcccgacgagatcaccaaggacgagtggatggagaagctcaacaacctccacgtgcagcgtgccgatatgaatcgactgattatgaactatttagtaactgagggcttcaaggaggccgcggaaaagttccgaatggaatcaggaatagagccgagtgtcgatcttgagacactggatgagagaattaagattcgagaaatgatcctgaagggacagattcaggaggctattgcccttattaacagtcttcaccctgagttgctggatactaaccggtacctgtacttccacttgcagcagcagcatctgattgaactgatacgccagagggagacagaagcagctcttgagtttgcccagacacagctggctgaacaaggagaagaatcaagggagtgtctgacagagatggagcgtaccctcgcccttctggcgttcgactccccagaggaatctccatttggggacctgctgcacacaatgcagaggcaaaaagtatggagtgaggtgaatcaagctgtgctggactatgagaatagagagtctaccccaaaactcgcgaaactgttaaagcttctgctgtgggctcagaatgaactcgatcagaagaaggtcaagtatccaaaaatgacagatttatctaagggcgtgattgaagagcccaagtag

SEQ ID NO: 195633 - DNA, 468 bp, Artificial Sequence
  derived and/or modified sequence
atgagctacgccgagaagcccgacgagatcaccaaggacgagtggatggaaaagttgaataatctgcacgtgcagagggccgatatgaatagactcattatgaattacctagtcacagagggttttaaggaggccgccgagaagttccgaatggagtcgggtatagagccctccgtcgatctggaaactctggatgagcgaattaagatcagggaaatgatcctgaagggccagattcagcaggtggtgcatgattgttggcgaaaggagcgggtatttatactcagcgacctcccatcttctattagcgccgcaagccacccgcccagttctgccggctctgcagacgtactcctgctgttcacccacaggactgtcccttgttccgtggtcgggcgtcgcgaggtggtgcaggggtgcgtccactgtctgagagtcggtacagttgacggccatatggcgctgtag

SEQ ID NO: 195634 - DNA, 687 bp, Artificial Sequence
  derived and/or modified sequence
atgtcctacgcagagaagcctgatgaaatcactaaggatgaatggatggagaagctcaacaacttacacgtgcagcgagctgacatgaatcgcctgatcatgaactaccttgtgactgagggcttcaaggaggccgcagaaaagttcagaatggaatcgggaatcgagccgagtgttgatctggaaacacttgatgaaaggatcaaaattcgcgagatgattttaaaaggccaaatccaagaggcaattgccctgataaactccctccacccggagttgttggatacaaacagatacttatacttccacctccaacagcaacatcttatcgaacttattcggcagagggagacagaagccgctctggagttcgcacagacccaacttgccgagcagggagaagagagcagggagtgtttaacagaaatggagaggacacttgcattactggcctttgattctcccgaagaatccccattcggcgacctgctccatacaatgcagaggcagaaggtatggagtgaggtcaaccaggccgtgctggattacgaaaatcgagaatccactccaaagctggctaaactgctcaaacttctactgtgggcccagaacgaactcgaccagaagaaggttaagtatcctaaaatgacagacctctctaaaggcgtcattgaagagcctaagtag

SEQ ID NO: 195635 - DNA, 468 bp, Artificial Sequence
  derived and/or modified sequence
atgtcctatgccgagaagcctgacgagattaccaaagacgaatggatggagaagttaaataatttgcacgtgcaaagggctgacatgaaccggctgatcatgaattatctcgtgacggaagggttcaaagaggcagccgagaagttccggatggagtccggtatagaacctagcgtggatctggagacgctggacgagaggattaagatcagggagatgatcctgaagggacaaatccagcaggtggtgcacgactgttggcggaaggagagggtgttcatcctatccgatctgcccagcagcatttctgctgcgagccaccctccttccagcgctggctctgctgatgtgctcctcttatttacacataggaccgtgccttgctcagtcgttggcagaagggaggtggttcaaggctgcgtgcactgcctaagagtaggtacagttgacggccacatggccctgtag

SEQ ID NO: 195636 - DNA, 1566 bp, Artificial Sequence
  derived and/or modified sequence
ccgcctccgccgcggcccccacctctgcctccttctactcgggcgccccggcggccgccacctctccccagcccaggagaggctgcggagccgcagccgcccagaccgcgcagcgcgggaggcaggttccgcacgaaataaatcagaatgagttatgcagaaaaacccgatgaaatcacgaaagatgagtggatggaaaagctcaataacttgcatgtccagagagcagacatgaaccgcctcatcatgaactacctggtcacagagggctttaaggaagcagcggagaagtttcgaatggaatctggaatcgaacctagtgtggatctggaaacacttgatgaacgaatcaagatccgggagatgatactgaaaggtcagattcaggaggccatcgccttgatcaacagcctccacccagagctcttggacacaaaccggtatctttacttccatttgcagcaacagcatttgatcgagctgatccgccagcgggagacagaggcggcgctggagtttgcacagactcagctggcggagcagggcgaggagagccgagagtgcctcacagagatggagcgtaccctggcactgctggcctttgacagtcccgaggagtcgcccttcggagacctcctccacaccatgcagaggcagaaggtgtggagtgaagttaaccaagctgtgctagattatgaaaatcgcgagtcaacacccaaactggcaaaattactgaaactactactttgggctcagaacgagctggaccagaagaaagtaaaatatcccaaaatgacagacctcagcaagggtgtgattgaggagcccaagtagcgcctgcgcttgcgtggtggatccaacaccagccctgcgtcgtgggacttgcctcagatcagcctgcgactgcaagattcttactgcagtagagaactctttttctcccttgtacttttttttgacctggcatctttttatagggaaaaatggcctttgtaggcagtggaaaacttgcaaggaaagctgccgtctctttggcagtctgatgcagagcctgcactctggcactcgctgaagaatctggaaggttgcggtttgctcttccagtgttcgggggcctctggctgctgaaggattcggtctaccacggagggctgtgctgttaggctgcatcccactcaaaatacaggaaaagcacgaatcatgattctgctttctgttagcttaggcagacattgggccttcacctacaagtttttccttacccctgtggtttttgtgtttttttttttttctttttccataggaaagaatatataaatttgtaaatcctaattcaaagatggctcatgtgtgagggcattgagtttgatttgttttccctttggtctgggttgtgtggcttttgggggatgcgtgtgagggggctatgtgttttttaattttttaaatatatattttggtgctgtgtgtggtaagagacttgttcctagtggatcaatgaaccatctcttctgggcagttttgttgaaaataaaggtttctctttgatttcaagaatgaccaaaa

SEQ ID NO: 195637 - DNA, 1196 bp, Artificial Sequence
  derived and/or modified sequence
cttctactcgggcgccccggcggccgccacctctccccagcccaggagaggctgcggagccgcagccgcccagaccgcgcagcgcgggaggcaggttccgcacgaaataaatcagaatgagttatgcagaaaaacccgatgaaatcacgaaagatgagtggatggaaaagctcaataacttgcatgtccagagagcagacatgaaccgcctcatcatgaactacctggtcacagagggctttaaggaagcagcggagaagtttcgaatggaatctggaatcgaacctagtgtggatctggaaacacttgatgaacgaatcaagatccgggagatgatactgaaaggtcagattcagcaggtggtgcacgactgttggcggaaggaacgcgtgttcatcctcagtgatctgccctccagcatctcggcagcatctcatcctccatcgtcagctggctctgccgatgtcctgcttctgttcactcacagaactgtcccctgctccgtggtgggcaggagggaagtggtgcagggctgcgtgcattgcctgcgagtcgggacagttgatgggcacatggccttgtagctctgggcacagatgtgtttggattcattgcagcggaccaccgggcactgttgaccccactgagcagtgctaagtgttggtttagtggatgttcgtggaattgctgacccatccaagggcgtcctttggagccagtggagcctgccggcgcatctgaggggcagaatgctgctagcacttgaatctgggatctcgccttattctcaagtagcaaggcatctcgacaagcatggtctaggtctggtggccagcttgccagtacctgagccggtcgggtcatctgcctctgagggaccgtcctcaccgagctcctgcatcccttgagtgttgatcaggaggcgtccacagcattgttctcgcctctgaatgatgcttctttctgtgttggagcctggcgaagttgtgttttcaagccctctacttctctttccagtgggtaggagcttttggcagtgtttactttacctagatggcttatataatccagtaagagatgcaaagataaaattgctgcggttgttacagaagcatggcggcctccagactgacccattggttgccctttagattttgtaaggatgcggtgctggggaggtggtgcttccctacccc

SEQ ID NO: 195638 - DNA, 687 bp, Artificial Sequence
  derived and/or modified sequence
atgagctacgccgagaagcccgacgagatcaccaaggacgagtggatggagaagctgaacaacctgcacgtgcagagagccgacatgaacagactgatcatgaactacctggtgaccgagggcttcaaggaggccgccgagaagttcagaatggagagcggcatcgagcccagcgtggacctggagaccctggacgagagaatcaagatcagagagatgatcctgaagggccagatccaggaggccatcgccctgatcaacagcctgcaccccgagctgctggacaccaacagatacctgtacttccacctgcagcagcagcacctgatcgagctgatcagacagagagagaccgaggccgccctggagttcgcccagacccagctggccgagcagggcgaggagagcagagagtgcctgaccgagatggagagaaccctggccctgctggccttcgacagccccgaggagagccccttcggcgacctgctgcacaccatgcagagacagaaggtgtggagcgaggtgaaccaggccgtgctggactacgagaacagagagagcacccccaagctggccaagctgctgaagctgctgctgtgggcccagaacgagctggaccagaagaaggtgaagtaccccaagatgaccgacctgagcaagggcgtgatcgaggagcccaagtag

SEQ ID NO: 195639 - DNA, 468 bp, Artificial Sequence
  derived and/or modified sequence
atgagctacgccgagaagcccgacgagatcaccaaggacgagtggatggagaagctgaacaacctgcacgtgcagagagccgacatgaacagactgatcatgaactacctggtgaccgagggcttcaaggaggccgccgagaagttcagaatggagagcggcatcgagcccagcgtggacctggagaccctggacgagagaatcaagatcagagagatgatcctgaagggccagatccagcaggtggtgcacgactgctggagaaaggagagagtgttcatcctgagcgacctgcccagcagcatcagcgccgccagccacccccccagcagcgccggcagcgccgacgtgctgctgctgttcacccacagaaccgtgccctgcagcgtggtgggcagaagagaggtggtgcagggctgcgtgcactgcctgagagtgggcaccgtggacggccacatggccctgtag

SEQ ID NO: 195640 - protein, 214 aa, Artificial Sequence
  derived and/or modified sequence
MGAAHSASEEVRELEGKTGFSSDQIEQLHRRFKQLSGDQPTIRKENFNNVPDLELNPIRSKIVRAFFDNRNLRKGPSGLADEINFEDFLTIMSYFRPIDTTMDEEQVELSRKEKLRFLFHMYDSDSDGRITLEEYRNVVEELLSGNPHIEKESARSIADGAMMEAASVCMGQMEPDQVYEGITFEDFLKIWQGIDIETKMHVRFLNMETMALCH

SEQ ID NO: 195641 - protein, 267 aa, Artificial Sequence
  derived and/or modified sequence
MRPRSGPTRNPRLRAFAGVPTRGRTRGQSRRCAAEASAGPERDARPGAPAAGTMGAAHSASEEVRELEGKTGFSSDQIEQLHRRFKQLSGDQPTIRKENFNNVPDLELNPIRSKIVRAFFDNRNLRKGPSGLADEINFEDFLTIMSYFRPIDTTMDEEQVELSRKEKLRFLFHMYDSDSDGRITLEEYRNVVEELLSGNPHIEKESARSIADGAMMEAASVCMGQMEPDQVYEGITFEDFLKIWQGIDIETKMHVRFLNMETMALCH

SEQ ID NO: 195642 - DNA, 645 bp, Artificial Sequence
  derived and/or modified sequence
atgggcgccgcccacagcgccagcgaggaggtgagagagctggagggcaagaccggcttcagcagcgaccagatcgagcagctgcacagaagattcaagcagctgagcggcgaccagcccaccatcagaaaggagaacttcaacaacgtgcccgacctggagctgaaccccatcagaagcaagatcgtgagagccttcttcgacaacagaaacctgagaaagggccccagcggcctggccgacgagatcaacttcgaggacttcctgaccatcatgagctacttcagacccatcgacaccaccatggacgaggagcaggtggagctgagcagaaaggagaagctgagattcctgttccacatgtacgacagcgacagcgacggcagaatcaccctggaggagtacagaaacgtggtggaggagctgctgagcggcaacccccacatcgagaaggagagcgccagaagcatcgccgacggcgccatgatggaggccgccagcgtgtgcatgggccagatggagcccgaccaggtgtacgagggcatcaccttcgaggacttcctgaagatctggcagggcatcgacatcgagaccaagatgcacgtgagattcctgaacatggagaccatggccctgtgccactag

SEQ ID NO: 195643 - DNA, 804 bp, Artificial Sequence
  derived and/or modified sequence
atgagacccagaagcggccccaccagaaaccccagactgagagccttcgccggcgtgcccaccagaggcagaaccagaggccagagcagaagatgcgccgccgaggccagcgccggccccgagagagacgccagacccggcgcccccgccgccggcaccatgggcgccgcccacagcgccagcgaggaggtgagagagctggagggcaagaccggcttcagcagcgaccagatcgagcagctgcacagaagattcaagcagctgagcggcgaccagcccaccatcagaaaggagaacttcaacaacgtgcccgacctggagctgaaccccatcagaagcaagatcgtgagagccttcttcgacaacagaaacctgagaaagggccccagcggcctggccgacgagatcaacttcgaggacttcctgaccatcatgagctacttcagacccatcgacaccaccatggacgaggagcaggtggagctgagcagaaaggagaagctgagattcctgttccacatgtacgacagcgacagcgacggcagaatcaccctggaggagtacagaaacgtggtggaggagctgctgagcggcaacccccacatcgagaaggagagcgccagaagcatcgccgacggcgccatgatggaggccgccagcgtgtgcatgggccagatggagcccgaccaggtgtacgagggcatcaccttcgaggacttcctgaagatctggcagggcatcgacatcgagaccaagatgcacgtgagattcctgaacatggagaccatggccctgtgccactag

SEQ ID NO: 195644 - DNA, 645 bp, Artificial Sequence
  derived and/or modified sequence
atgggggctgcacattcagcatctgaggaagtgagagagttggaggggaaaaccgggttttccagcgatcagattgagcagctgcatagaaggtttaaacagttatctggagatcaacctacgatccgcaaagagaacttcaacaacgtgcctgacctggaactgaacccaatccggtcgaagatcgttcgggcattcttcgacaataggaaccttagaaaaggacccagcggcctggccgacgaaataaactttgaggatttccttacaataatgagttattttcgaccgatcgacactacaatggacgaggagcaggtcgaactctctcgcaaagaaaaactgcggtttttgtttcacatgtacgactctgactcagatggcaggatcaccttagaggagtaccgcaatgtggtggaggaacttctgagcggaaatcctcacatcgaaaaggagtcagcgaggagtattgcagacggtgccatgatggaggccgcgtctgtgtgcatggggcagatggagcctgatcaagtctacgaagggatcacctttgaggacttcctgaaaatatggcaaggtatcgacatcgagaccaagatgcacgtgagatttcttaatatggaaacgatggccctctgtcactag

SEQ ID NO: 195645 - DNA, 804 bp, Artificial Sequence
  derived and/or modified sequence
atgagacctaggagcggtcctacgagaaacccaagattgagagcttttgcaggcgtgccgactaggggacgcacacggggtcagtccagaagatgcgccgccgaagccagtgcaggccctgaaagagacgccaggcctggagctcccgccgcggggacgatgggcgccgcacacagcgcatccgaggaggtgagagaacttgaaggcaagacgggattctcctctgaccaaattgagcagctgcacaggaggtttaaacagctgagcggggatcagccgactatcagaaaagagaacttcaataatgtgcccgatctagagttaaatccgatcagatcaaaaattgtgcgtgcatttttcgataatcgaaatctgcggaagggtccctcaggcctggctgatgagattaattttgaggacttcctcactataatgtcttatttccgtcctatagacaccactatggacgaagagcaggtagaattgtctcgaaaggagaagctccggtttctattccatatgtacgactctgattccgacgggaggatcacccttgaggaatatcgaaacgtggtcgaggagctcctctccgggaatcctcatatcgagaaggagtccgccagaagcatcgccgacggcgccatgatggaagctgcgtcagtgtgcatgggccaaatggaaccagatcaggtgtacgaaggaatcacgtttgaggactttcttaaaatatggcagggaatcgatatcgaaaccaaaatgcatgtccgcttcctgaacatggaaactatggcattgtgccattag

SEQ ID NO: 195646 - DNA, 645 bp, Artificial Sequence
  derived and/or modified sequence
atgggcgccgcccacagcgccagcgaggaggtgcgggagctggagggcaagacaggcttcagcagtgaccagatcgagcagctgcaccggcgcttcaagcagctgagcggggaccagcccaccatcagaaaagaaaacttcaacaacgtgcctgacctggagctgaaccccatccgcagcaagatcgtgcgggccttctttgacaacagaaacctgaggaagggccccagcggcctggctgatgagatcaactttgaggacttcctgaccatcatgagctacttccggcccatcgacaccaccatggatgaggagcaggtggagctgagcaggaaggagaagctgcgcttcctgttccacatgtatgacagcgacagtgatggccgcatcaccctggaggagtacagaaatgtggtggaggagctgctgagcggcaacccccacatcgagaaggagagcgcccggagcattgctgatggagccatgatggaggccgcctctgtgtgcatgggccagatggagccagaccaggtgtatgagggcatcacctttgaggacttcctgaagatctggcagggcatcgacatcgagaccaagatgcacgtgcgcttcctgaacatggagaccatggccctgtgccactag

SEQ ID NO: 195647 - DNA, 804 bp, Artificial Sequence
  derived and/or modified sequence
atgaggcccaggagcggccccaccaggaacccccggctgcgggcctttgctggggtgcccacccggggccgcacccggggccagagccgccgctgtgccgctgaggccagcgctggccctgagagagatgcccggcctggggccccagctgctggcaccatgggcgccgcccacagcgccagcgaggaggtgcgggagctggagggcaagacaggcttcagcagtgaccagatcgagcagctgcaccggcgcttcaagcagctgagcggggaccagcccaccatcaggaaggagaacttcaacaacgtgcctgacctggagctgaaccccatccgcagcaagatcgtgcgggccttctttgacaacagaaacctgaggaagggccccagcggcctggctgatgagatcaactttgaggacttcctgaccatcatgagctacttccggcccatcgacaccaccatggatgaggagcaggtggagctgagcaggaaggagaagctgcgcttcctgttccacatgtatgacagcgacagtgatggccgcatcaccctggaggagtacagaaatgtggtggaggagctgctgagcggcaacccccacatcgagaaggagagcgcccggagcattgctgatggagccatgatggaggccgcctctgtgtgcatgggccagatggagccagaccaggtgtatgagggcatcacctttgaggacttcctgaagatctggcagggcattgatattgagaccaagatgcacgtgcgcttcctgaacatggagaccatggccctgtgccactag

SEQ ID NO: 195648 - DNA, 645 bp, Artificial Sequence
  derived and/or modified sequence
atgggcgccgcccacagcgccagcgaggaggtgcgggagctggagggaaagacggggtttagtagtgatcaaatcgaacagttgcacagaaggttcaagcagctgagtggcgaccaacctacaatccgtaaagaaaacttcaacaacgtgccagatcttgaactcaatccaattagaagcaagatcgtacgtgccttttttgacaatcgaaatctgaggaaggggccctctggcctggctgatgagatcaacttcgaggattttttaacaatcatgtcatattttagacccatagacaccactatggatgaggaacaggtggagctgagcagaaaggaaaagctccgcttcttattccacatgtacgatagcgacagcgacggtaggatcaccctagaagagtaccgaaacgtggttgaagaactgttgtccgggaatccccacatcgaaaaggagtctgccaggtccatcgctgacggcgctatgatggaagcagcctctgtgtgcatgggacagatggaacctgaccaggtttacgaaggcatcacctttgaggacttcctaaaaatttggcaaggcattgatatcgagactaaaatgcatgtcaggttcctgaacatggagacgatggccctctgtcattag

SEQ ID NO: 195649 - DNA, 804 bp, Artificial Sequence
  derived and/or modified sequence
atgcggccccggagcggccccacccggaacccccggctgcgggccttcgccggcgttcctacgagaggcagaaccagagggcagtcgaggaggtgcgccgccgaggcctccgctggacccgagagagatgcccgccctggcgcgccggcggcggggacaatgggagctgcacattccgccagtgaagaggttcgtgagttggaaggcaaaacaggtttttcctccgaccagattgaacagctgcacagacgattcaagcaactatctggtgaccagcctacaatccgcaaggaaaactttaacaacgtgccggatttagagctcaacccaatcaggtcaaaaatagtgcgcgccttcttcgacaatcgtaacttgcgaaaaggaccctcagggctagctgacgagattaattttgaggacttccttactataatgagctacttccgtcccatcgatacaacaatggatgaggaacaagtggaactaagtagaaaagagaaactacgatttctcttccatatgtacgactctgatagtgacgggaggatcaccctggaggagtacaggaacgtcgtggaagaactgttgagcggaaacccccatatagaaaaggaaagcgcacggtccatcgccgacggagcgatgatggaagcggcctccgtgtgcatgggccagatggaacccgaccaagtgtacgaggggattacctttgaagattttttgaaaatctggcagggcatcgacatcgaaacaaagatgcacgttaggttcttaaatatggagaccatggcgttgtgccactag

SEQ ID NO: 195650 - DNA, 645 bp, Artificial Sequence
  derived and/or modified sequence
atgggtgcggctcactcagccagtgaggaggtgagagaactggaaggtaagactggcttctcgtcagatcaaatcgagcagcttcatcgaagattcaagcaactgagtggggaccagccgactatcagaaaggagaattttaataacgtgccagacctggagctgaatccgattcgaagtaaaattgtgcgggcattttttgacaaccggaacttgcgaaagggaccttccggtctagcagatgagattaacttcgaggatttcctgacaataatgtcatattttaggcctatcgataccacaatggatgaggagcaagttgagctctcccggaaagagaaactgaggttcctgtttcacatgtacgactctgactcagacgggcgtatcaccctcgaagaataccggaacgtggtcgaggagcttctgagcggcaacccccacatagaaaaggagagcgctcggtcaatcgctgacggagccatgatggaggcagcgagtgtttgtatgggacaaatggagcctgaccaagtatacgaaggcatcacttttgaggactttttgaaaatctggcagggaatagatatcgagacaaagatgcatgtgaggtttttgaatatggagacaatggccctgtgccactag

SEQ ID NO: 195651 - DNA, 804 bp, Artificial Sequence
  derived and/or modified sequence
atgagacccagaagcggacctactcggaatcccaggttgagggcatttgctggggtgcctactcgcggacggactaggggccagtcacggagatgcgctgcggaagcatccgccggacccgagcgcgatgctcgtccgggtgctcctgccgcagggaccatgggtgccgcacatagcgcttcagaggaagtgcgcgagcttgaggggaaaaccggattcagttctgaccaaatcgaacagctccaccggagatttaaacagttgtcaggagaccagccaaccattcgtaaggagaattttaacaacgtgccagatttagagctgaatcccatcaggtcaaagatagtcagggccttctttgataatcgaaatctgcgcaagggcccttctggccttgcagacgagattaacttcgaggacttcctgactatcatgagctactttcgacccatcgataccacgatggacgaggagcaagttgagttatctcggaaagaaaaactcagatttctttttcacatgtatgactcagattccgacggacgcattaccctggaagaatacaggaacgtggtcgaagagctcctgtctggtaatccccacatcgagaaggagagtgcacgaagcatcgcagacggtgccatgatggaggccgcaagtgtgtgcatgggacagatggagcctgaccaggtatacgaaggcataacatttgaagacttcctgaaaatttggcaggggattgacattgagacgaaaatgcacgttaggttcttaaatatggagactatggcattgtgccactag

SEQ ID NO: 195652 - DNA, 1041 bp, Artificial Sequence
  derived and/or modified sequence
accgcggcgcgccgccctccgccgttatatgaggccccgctccggccccacgcggaacccgcggctccgagccttcgccggcgtcccgacccgaggccggacccgaggccagtcccgccgctgcgcagccgaagccagtgcggggcctgagagggacgcgcgccccggggcccccgccgcgggcaccatgggcgctgcccactccgcgtctgaggaggtgcgggagctcgagggcaagaccggcttctcatcggatcagatcgagcagctccatcggagatttaagcagctgagtggagatcagcctaccattcgcaaggagaacttcaacaatgtcccggacctggagctcaaccccatccgatccaaaattgttcgtgccttcttcgacaacaggaacctgcgcaagggacccagtggcctggctgatgagatcaatttcgaggacttcctgaccatcatgtcctacttccggcccatcgacaccaccatggacgaggaacaggtggagctgtcccggaaggagaagctgagatttctgttccacatgtacgactcggacagcgacggccgcatcactctggaagaatatcgaaatgtggtcgaggagctgctgtcgggaaaccctcacatcgagaaggagtccgctcgctccatcgccgacggggccatgatggaggcggccagcgtgtgcatggggcagatggagcctgatcaggtgtacgaggggatcaccttcgaggacttcctgaagatctggcaggggatcgacattgagaccaagatgcacgtccgcttccttaacatggaaaccatggccctctgccactgacccaccgccacctccgcggagaaactgcactttgcaatggggccgcctccccgcgtagctggagcagcccaggcccggcggacagcctcttcctgcagcgccggtacatagccaaggctcgtctgcgcaccttgtgtcttgtagggtatggtatgtgggacttcgctgtttttatctccaataaaaaaaaaaaaaaggtttgttaatta

SEQ ID NO: 195653 - DNA, 1017 bp, Artificial Sequence
  derived and/or modified sequence
gttatatgaggccccgctccggccccacgcggaacccgcggctccgagccttcgccggcgtcccgacccgaggccggacccgaggccagtcccgccgctgcgcagccgaagccagtgcggggcctgagagggacgcgcgccccggggcccccgccgcgggcaccatgggcgctgcccactccgcgtctgaggaggtgcgggagctcgagggcaagaccggcttctcatcggatcagatcgagcagctccatcggagatttaagcagctgagtggagatcagcctaccattcgcaaggagaacttcaacaatgtcccggacctggagctcaaccccatccgatccaaaattgttcgtgccttcttcgacaacaggaacctgcgcaagggacccagtggcctggctgatgagatcaatttcgaggacttcctgaccatcatgtcctacttccggcccatcgacaccaccatggacgaggaacaggtggagctgtcccggaaggagaagctgagatttctgttccacatgtacgactcggacagcgacggccgcatcactctggaagaatatcgaaatgtggtcgaggagctgctgtcgggaaaccctcacatcgagaaggagtccgctcgctccatcgccgacggggccatgatggaggcggccagcgtgtgcatggggcagatggagcctgatcaggtgtacgaggggatcaccttcgaggacttcctgaagatctggcaggggatcgacattgagaccaagatgcacgtccgcttccttaacatggaaaccatggccctctgccactgacccaccgccacctccgcggagaaactgcactttgcaatggggccgcctccccgcgtagctggagcagcccaggcccggcggacagcctcttcctgcagcgccggtacatagccaaggctcgtctgcgcaccttgtgtcttgtagggtatggtatgtgggacttcgctgtttttatctccaataaaaaaaaaaaaaaggtttgttaatt

SEQ ID NO: 195654 - protein, 816 aa, Artificial Sequence
  derived and/or modified sequence
MAVSLDDDVPLILTLDEGGSAPLAPSNGLGQEELPSKNGGSYAIHDSQAPSLSSGGESSPSSPAHNWEMNYQEAAIYLQEGENNDKFFTHPKDAKALAAYLFAHNHLFYLMELATALLLLLLSLCEAPAVPALRLGIYVHATLELFALMVVVFELCMKLRWLGLHTFIRHKRTMVKTSVLVVQFVEAIVVLVRQMSHVRVTRALRCIFLVDCRYCGGVRRNLRQIFQSLPPFMDILLLLLFFMIIFAILGFYLFSPNPSDPYFSTLENSIVSLFVLLTTANFPDVMMPSYSRNPWSCVFFIVYLSIELYFIMNLLLAVVFDTFNDIEKRKFKSLLLHKRTAIQHAYRLLISQRRPAGISYRQFEGLMRFYKPRMSARERYLTFKALNQNNTPLLSLKDFYDIYEVAALKWKAKKNREHWFDELPRTALLIFKGINILVKSKAFQYFMYLVVAVNGVWILVETFMLKGGNFFSKHVPWSYLVFLTIYGVELFLKVAGLGPVEYLSSGWNLFDFSVTVFAFLGLLALALNMEPFYFIVVLRPLQLLRLFKLKERYRNVLDTMFELLPRMASLGLTLLIFYYSFAIVGMEFFCGIVFPNCCNTSTVADAYRWRNHTVGNRTVVEEGYYYLNNFDNILNSFVTLFELTVVNNWYIIMEGVTSQTSHWSRLYFMTFYIVTMVVMTIIVAFILEAFVFRMNYSRKNQDSEVDGGITLEKEISKEELVAVLELYREARGASSDVTRLLETLSQMERYQQHSMVFLGRRSRTKSDLSLKMYQEEIQEWYEEHAREQEQQRQLSSSAAPAAQQPPGSRQRSQTVT

SEQ ID NO: 195655 - protein, 85 aa, Artificial Sequence
  derived and/or modified sequence
MAVSLDDDVPLILTLDEGGSAPLAPSNGLGQEELPSKNGGSYAIHDSQAPSLSSGGESSPSSPAHNWEMNYQEAAIYLQEGENND

SEQ ID NO: 195656 - protein, 100 aa, Artificial Sequence [sequence omitted]

SEQ ID NO: 195657 - DNA, 2451 bp, Artificial Sequence
  derived and/or modified sequence
atggccgtgagcctggacgacgacgtgcccctgatcctgaccctggacgagggcggcagcgcccccctggcccccagcaacggcctgggccaggaggagctgcccagcaagaacggcggcagctacgccatccacgacagccaggcccccagcctgagcagcggcggcgagagcagccccagcagccccgcccacaactgggagatgaactaccaggaggccgccatctacctgcaggagggcgagaacaacgacaagttcttcacccaccccaaggacgccaaggccctggccgcctacctgttcgcccacaaccacctgttctacctgatggagctggccaccgccctgctgctgctgctgctgagcctgtgcgaggcccccgccgtgcccgccctgagactgggcatctacgtgcacgccaccctggagctgttcgccctgatggtggtggtgttcgagctgtgcatgaagctgagatggctgggcctgcacaccttcatcagacacaagagaaccatggtgaagaccagcgtgctggtggtgcagttcgtggaggccatcgtggtgctggtgagacagatgagccacgtgagagtgaccagagccctgagatgcatcttcctggtggactgcagatactgcggcggcgtgagaagaaacctgagacagatcttccagagcctgccccccttcatggacatcctgctgctgctgctgttcttcatgatcatcttcgccatcctgggcttctacctgttcagccccaaccccagcgacccctacttcagcaccctggagaacagcatcgtgagcctgttcgtgctgctgaccaccgccaacttccccgacgtgatgatgcccagctacagcagaaacccctggagctgcgtgttcttcatcgtgtacctgagcatcgagctgtacttcatcatgaacctgctgctggccgtggtgttcgacaccttcaacgacatcgagaagagaaagttcaagagcctgctgctgcacaagagaaccgccatccagcacgcctacagactgctgatcagccagagaagacccgccggcatcagctacagacagttcgagggcctgatgagattctacaagcccagaatgagcgccagagagagatacctgaccttcaaggccctgaaccagaacaacacccccctgctgagcctgaaggacttctacgacatctacgaggtggccgccctgaagtggaaggccaagaagaacagagagcactggttcgacgagctgcccagaaccgccctgctgatcttcaagggcatcaacatcctggtgaagagcaaggccttccagtacttcatgtacctggtggtggccgtgaacggcgtgtggatcctggtggagaccttcatgctgaagggcggcaacttcttcagcaagcacgtgccctggagctacctggtgttcctgaccatctacggcgtggagctgttcctgaaggtggccggcctgggccccgtggagtacctgagcagcggctggaacctgttcgacttcagcgtgaccgtgttcgccttcctgggcctgctggccctggccctgaacatggagcccttctacttcatcgtggtgctgagacccctgcagctgctgagactgttcaagctgaaggagagatacagaaacgtgctggacaccatgttcgagctgctgcccagaatggccagcctgggcctgaccctgctgatcttctactacagcttcgccatcgtgggcatggagttcttctgcggcatcgtgttccccaactgctgcaacaccagcaccgtggccgacgcctacagatggagaaaccacaccgtgggcaacagaaccgtggtggaggagggctactactacctgaacaacttcgacaacatcctgaacagcttcgtgaccctgttcgagctgaccgtggtgaacaactggtacatcatcatggagggcgtgaccagccagaccagccactggagcagactgtacttcatgaccttctacatcgtgaccatggtggtgatgaccatcatcgtggccttcatcctggaggccttcgtgttcagaatgaactacagcagaaagaaccaggacagcgaggtggacggcggcatcaccctggagaaggagatcagcaaggaggagctggtggccgtgctggagctgtacagagaggccagaggcgccagcagcgacgtgaccagactgctggagaccctgagccagatggagagataccagcagcacagcatggtgttcctgggcagaagaagcagaaccaagagcgacctgagcctgaagatgtaccaggaggagatccaggagtggtacgaggagcacgccagagagcaggagcagcagagacagctgagcagcagcgccgcccccgccgcccagcagccccccggcagcagacagagaagccagaccgtgacctag

SEQ ID NO: 195658 - DNA, 258 bp, Artificial Sequence
  derived and/or modified sequence
atggccgtgagcctggacgacgacgtgcccctgatcctgaccctggacgagggcggcagcgcccccctggcccccagcaacggcctgggccaggaggagctgcccagcaagaacggcggcagctacgccatccacgacagccaggcccccagcctgagcagcggcggcgagagcagccccagcagccccgcccacaactgggagatgaactaccaggaggccgccatctacctgcaggagggcgagaacaacgactag

SEQ ID NO: 195659 - DNA, 303 bp, Artificial Sequence
  derived and/or modified sequence
atggccgtgagcctggacgacgacgtgcccctgatcctgaccctggacgagggcggcagcgcccccctggcccccagcaacggcctgggccaggaggagctgcccagcaagagaagatgctgcatgctgtgcagcagcaagcagaagccctggatcccctgcagagtgatcagcgacgtggcctgcaaggccgccagctgcttcgagggcgccagcggcccctgcgacatcagcatgtgggagtgctacagagtgtgcaagcagatggccgccgccatgcccagcaccacccccagaccctag

SEQ ID NO: 195660 - DNA, 2451 bp, Artificial Sequence
  derived and/or modified sequence
atggccgtctcactagacgacgatgtacctctgatccttactctcgacgaaggaggttctgctcctcttgcccccagtaacggactgggccaggaggaactgccctcaaagaatggagggagttatgccattcacgattcccaggccccatccctgagtagcggaggcgagagctcgccatctagccccgcacataattgggaaatgaactaccaggaagccgccatttacttgcaggaaggtgaaaataatgataaattcttcacacacccgaaggacgccaaggcactggccgcatacttattcgctcataaccatctattctacttaatggaactggccacagcgctgcttctgttacttttgtcactgtgcgaggcgcctgcagttccggctctgcgactgggaatttacgtgcatgctactttagaactttttgccctgatggtcgttgttttcgagctctgcatgaaactgagatggcttggtctacatacgtttatccgccataaaaggactatggtcaaaacttcagtgctcgtggtgcagttcgtagaggccatcgtagtattagtccgccagatgagtcacgtccgggttacgagagccctccggtgtatctttctggttgattgtagatactgtggaggcgtgagacgcaatctccgacaaattttccagtctcttccgccctttatggatattttactcctcctcctgttcttcatgataatatttgctatcctcggcttttatctgttctctccgaaccctagcgatccctatttctcaaccctggagaattccattgtttcattatttgtgctgctgacaacagccaattttcctgatgtgatgatgcccagttactcacggaacccatggtcatgtgtcttcttcatcgtctatttgtccatagagctctatttcatcatgaacctgttgctggcggttgttttcgatacttttaacgatattgaaaaacgtaaatttaagagcttattattacataaaaggactgcaattcaacatgcctaccggttgctgatttcgcaacgacgcccggcgggcatctcgtataggcagttcgagggactcatgcgcttttacaagcctcgcatgagcgcacgggagagatacctgaccttcaaggccctaaatcaaaacaacacacctctcctgagtctcaaagacttctacgatatctacgaagttgccgccctgaagtggaaggcaaagaagaaccgagagcattggttcgatgaactgccccgcaccgcgttacttatttttaaaggcatcaacattcttgtgaaaagcaaagcatttcagtattttatgtaccttgtcgtagccgtaaatggcgtttggatcctcgtggaaacctttatgctcaagggcggtaatttcttttctaagcatgtgccttggtcttatctggtgtttctcacgatttacggggtggagctcttccttaaggttgccggtctgggtcctgtagaatatctttcatccggctggaacctgtttgacttctctgtgacagtgtttgccttcctcggcctgcttgccctggctctgaatatggagccgttttacttcattgtggtgcttagaccgctgcaacttctgcggctctttaagctcaaagaaaggtacagaaatgtgctagacaccatgttcgagctacttccgcgtatggctagcctcggactcacacttttaatcttctattactccttcgctattgtggggatggaattcttttgtggtatagtttttcccaactgttgcaatacgagtaccgtggccgacgcctacaggtggcggaatcatactgtcggaaatcggactgttgtggaagagggctattactacctgaacaattttgataacattctcaatagcttcgtgacgttatttgagttaacagtcgtaaataactggtacatcatcatggagggtgtgacctcccagacctctcactggagtcggttgtatttcatgacattttatatcgtcacaatggtcgttatgaccattatagtggcatttatactggaagcatttgtgttccgaatgaactatagtcggaagaatcaggactcggaggtggatggaggcattacactcgaaaaggagatcagtaaagaggaactcgtcgctgtattggagctgtacagagaagcaaggggcgcaagctctgacgtcaccaggctgctggagaccctcagccagatggagagatatcaacagcactctatggtgttcctgggcaggcggtctcggaccaaatctgacctcagcctcaagatgtaccaggaggagattcaggaatggtacgaggaacacgccagagagcaggagcagcagcgccaactctcaagctccgccgcccctgccgcgcagcaaccacccggttcaagacagcgctctcagactgtgacatag

SEQ ID NO: 195661 - DNA, 258 bp, Artificial Sequence
  derived and/or modified sequence
atggctgtctccttggacgatgatgtcccactgattctgacactcgatgagggggggtccgccccgttggccccttctaatggattgggccaagaggaactcccatcaaaaaacggggggtcctacgcaatccatgattcacaggccccaagtctgtcaagcggcggggagtccagcccctctagccccgcccataactgggagatgaactaccaggaagctgctatttaccttcaggagggtgaaaataatgattag

SEQ ID NO: 195662 - DNA, 303 bp, Artificial Sequence
  derived and/or modified sequence
atggccgtgagcctcgatgacgatgtgccactgatacttactcttgacgaagggggaagtgcgcccttggccccctcaaatggcctgggccaggaagagctgccatctaaaaggcggtgctgtatgctgtgttctagcaaacagaaaccatggatcccgtgtagagtgatctctgatgtcgcatgtaaggccgcttcgtgttttgaaggagctagcggaccctgcgacatttccatgtgggagtgttacagggtctgcaagcaaatggctgctgcgatgcccagcaccacaccaaggccatag

SEQ ID NO: 195663 - DNA, 2451 bp, Artificial Sequence
  derived and/or modified sequence
atggctgtgtccctggatgatgatgtgcccctcatcctgaccctggatgagggcggcagcgcccccctggcccccagcaatggcctgggccaggaggagctgcccagcaagaatggaggcagctatgccatccatgacagccaggcccccagcctgagcagcggcggggagagcagccccagcagccctgcccacaactgggagatgaactaccaggaggccgccatctacctgcaggagggggagaacaatgacaagttcttcacccaccccaaggatgccaaggccctggccgcctacctgtttgcccacaaccacctgttctacctgatggagctggccacagccctgctgctgctgctgctgagcctgtgtgaggccccagctgtgcctgccctgcggctgggcatctacgtgcacgccaccctggagctgtttgccctgatggtggtggtgtttgagctgtgcatgaagctgcgctggctgggcctgcacaccttcatccgccacaagaggaccatggtgaagacctctgtgctggtggtgcagtttgtggaggccatcgtggtgctggtgcggcagatgagccacgtgcgggtgacccgggccctgcgctgcatcttcctggtggactgccgctactgcggcggcgtgagaagaaacctgcggcagatcttccagagcctgccccccttcatggacatcctgctgctgctgctcttcttcatgatcatctttgccatcctgggcttctacctgttcagccccaaccccagcgacccctacttcagcaccctggagaacagcatcgtgtccctgtttgtgctgctgaccacagccaacttcccagatgtgatgatgcccagctacagcaggaacccctggagctgtgtgttcttcatcgtgtacctgagcattgagctgtacttcatcatgaacctgctgctggccgtggtgtttgacaccttcaatgacatcgagaagaggaagttcaagagcctgctgctgcacaagaggacagccatccagcacgcctaccgcctgctgatcagccagaggaggcctgctggcatctcctaccggcagtttgagggcctgatgaggttctacaagcccaggatgtctgcccgggagcgctacctgaccttcaaggccctgaaccagaacaacacccccctgctgagcctgaaggacttctatgacatctatgaggtggccgccctgaagtggaaggccaagaagaaccgggagcactggtttgatgagctgcccaggacagccctgctgatcttcaagggcatcaacatcctggtgaagagcaaggccttccagtacttcatgtacctggtggtggccgtgaatggagtgtggatcctggtggagaccttcatgctgaagggcggcaacttcttcagcaagcacgtgccctggagctacctggtgttcctgaccatctacggcgtggagctgttcctgaaggtggccggcctgggccctgtggagtacctgagcagcggctggaacctgtttgacttctctgtgacagtgtttgccttcctgggcctgctggccctggccctgaacatggagcccttctacttcatcgtggtgctgcggcccctgcagctgctgcggctcttcaagctgaaggagcgctacagaaatgtgctggacaccatgtttgagctgctgcccaggatggccagcctgggcctgaccctgctgatcttctactacagctttgccatcgtgggcatggagttcttctgtggcatcgtgttccccaactgctgcaacaccagcacagtggctgatgcctaccgctggaggaaccacacagtgggcaacagaacagtggtggaggagggctactactacctgaacaactttgacaacatcctgaacagctttgtgaccctgtttgagctgactgtggtgaacaactggtacatcatcatggagggcgtgaccagccagaccagccactggagccggctgtacttcatgaccttctacatcgtgaccatggtggtgatgaccatcatcgtggccttcatcctggaggcctttgtgttcaggatgaactacagcaggaagaaccaggacagcgaggtggatggcggcatcaccctggagaaggagatcagcaaggaggagctggtggccgtgctggagctgtaccgggaggcccggggggccagcagtgatgtgacccggctgctggagaccctgagccagatggagcgctaccagcagcacagcatggtgttcctgggccgccgcagcaggaccaagagtgacctgagcctgaagatgtaccaggaggagatccaggagtggtatgaggagcacgcccgggagcaggagcagcagaggcagctgagcagcagcgctgccccagctgcccagcagcccccaggcagccggcagaggagccagacagtgacctag

SEQ ID NO: 195664 - DNA, 258 bp, Artificial Sequence
  derived and/or modified sequence
atggctgtgtccctggatgatgatgtgcccctcatcctgaccctggatgagggcggcagcgcccccctggcccccagcaatggcctgggccaggaggagctgcccagcaagaatggaggcagctatgccatccatgacagccaggcccccagcctgagcagcggcggggagagcagccccagcagccctgcccacaactgggagatgaactaccaggaggccgccatctacctgcaggagggggagaacaatgactag

SEQ ID NO: 195665 - DNA, 303 bp, Artificial Sequence
  derived and/or modified sequence
atggctgtgtccctggatgatgatgtgcccctcatcctgaccctggatgagggcggcagcgcccccctggcccccagcaatggcctgggccaggaggagctgcccagcaagaggcgctgctgcatgctgtgcagcagcaagcagaagccctggatcccctgcagggtcatcagtgatgtggcctgcaaggccgccagctgctttgagggcgccagcggcccctgtgacatctccatgtgggagtgctacagagtgtgcaagcagatggctgctgccatgcccagcaccaccccccggccctag

SEQ ID NO: 195666 - DNA, 2451 bp, Artificial Sequence
  derived and/or modified sequence
atggccgtgagcctggacgacgacgtgcccctgatcctgaccctggacgaaggtggctcggcaccacttgccccaagcaacggcttaggtcaagaagagctgcctagtaagaatgggggtagttatgctatccacgatagccaagcgcctagccttagtagtggcggggaatcttcaccctcctcccccgcacacaactgggagatgaattaccaggaagctgctatttacctgcaggaaggagaaaacaacgacaagttcttcacacatcccaaagacgccaaagctcttgcggcatatctgttcgcccataaccatctcttctacctcatggaactcgcaactgcactgctgctgctcctcctctctttatgtgaggctcccgctgtccccgctttgaggttggggatttacgtgcacgccaccctggagttgttcgccctaatggtggttgtgttcgagctctgtatgaagctgagatggctcggactccacacattcatcaggcacaaacgaacgatggtgaagacttctgttctcgtcgtacaattcgtagaagcaatagttgtcctcgtccggcagatgtcacacgtcagagtcaccagggccttaagatgtatctttctggtggattgtcggtattgtggcggtgtgcgacgcaacctgcgccagatcttccagagtttgcccccatttatggatatcctgcttctgctgctgtttttcatgattatttttgccatcttaggcttctatctattcagtccgaacccatctgacccatatttctctaccctggagaattctatagtctcactgttcgttctactgaccaccgctaacttcccagacgttatgatgccttcctactctcggaatccttggtcatgcgttttctttatagtttacctgagcattgagctttactttatcatgaatctgctcctggcagttgttttcgatacgttcaacgatatagagaagagaaagtttaagagcctcctgctgcataaacgcactgccatccaacacgcctacagactcttaatcagccagcggaggccagctggtatctcttacagacagtttgaaggattgatgaggttctataaacctcgcatgagtgcccgtgaacgctatttgactttcaaagccctgaaccagaataatacacccctgctctcgctgaaagacttttatgacatttacgaggtggcagccttaaagtggaaggccaaaaagaacagagagcactggttcgatgaactgcccaggacggcactgttaatctttaagggcatcaacatcctcgttaagagcaaagcttttcagtacttcatgtacttggtcgtggccgttaatggtgtgtggatactggtggagaccttcatgttaaagggcggaaactttttctcgaagcacgttccatggtcttacctcgttttcctgaccatatatggcgttgaactttttctgaaggtcgctggattaggcccagttgaatacctctcttccggttggaatctatttgatttctcggtcaccgtgtttgctttcttggggttattggccttggcactcaatatggaacccttctactttatcgtggtcctcaggcctctccagctgctgagattatttaaactgaaagaaaggtatcgaaatgttctggacacgatgtttgagctccttccaagaatggcatccctcgggttgaccttgttgatcttctattattcatttgctatcgtggggatggagttcttctgtgggatcgtctttccaaactgctgtaatacaagcacggtggccgatgcttatcgctggagaaatcacacagtgggtaatcggacagtagtcgaggagggctattattatcttaataacttcgacaacattttgaacagtttcgtcaccctctttgagctcacagttgtcaacaactggtatattataatggaaggagtgacgagccagacatcccactggagtaggctctactttatgaccttttatattgttacaatggtcgttatgacaattatcgtggcctttattctcgaggcctttgtgttccgtatgaactactctagaaagaaccaagactccgaggttgacgggggaattacactcgagaaggaaatctcgaaggaagaactggtggcagtgctcgagctgtaccgggaagcccgaggggcaagttcagacgtgactagactgctggaaaccttatcccaaatggagcggtaccagcagcactcaatggtgttcttgggccgcaggtcccgcaccaaaagcgatttgagtctgaaaatgtatcaggaggagatccaggaatggtacgaagagcatgcaagagaacaagaacagcagagacagttatccagctcagcagccccagccgcccagcagccccctggaagcaggcaacggtctcagacagttacatag

SEQ ID NO: 195667 - DNA, 258 bp, Artificial Sequence
  derived and/or modified sequence
atggccgtgagcctggacgacgacgtgcccctgatcctgaccctggacgaaggggggagtgccccattggcgccctccaacggtctgggacaggaggagttgccctctaagaatgggggctcttacgcaattcatgattcccaggccccctccctttcttcgggcggcgaaagttcacctagtagcccagcccataactgggagatgaactaccaggaagccgctatctatctgcaggaaggggagaacaacgattag

SEQ ID NO: 195668 - DNA, 303 bp, Artificial Sequence
  derived and/or modified sequence
atggccgtgagcctggacgacgacgtgcccctgatcctgaccctggatgaaggcggctctgctccactcgcaccgtctaatggactgggccaggaggagttgccatcaaagcggcgctgctgcatgctctgttcctctaaacagaagccatggatcccgtgcagggttattagcgatgttgcatgtaaagcagcctcttgctttgagggagcttctggtccttgtgacatctcgatgtgggagtgttacagggtgtgcaagcagatggctgcggccatgccatccacaactcctcgtccatag

SEQ ID NO: 195669 - DNA, 2451 bp, Artificial Sequence
  derived and/or modified sequence
atggcggtgagtctggacgatgacgtgcccttgattctcactctcgacgagggtggctcagccccattggcccctagcaacggtcttggccaagaggagttgcctagcaagaacgggggaagctacgccattcatgatagccaagcacccagtctgtccagcggaggcgagtccagtccctctagtccagcccacaactgggagatgaattatcaggaggcggcaatatatctgcaggaaggcgagaacaacgataaatttttcacgcatcctaaagacgctaaagccttagctgcctacctcttcgctcacaaccacctgttctatctcatggagttagcgactgccctgctcctgctgctgctaagcctttgcgaagctcctgcagtgccggctctgcgactgggaatctacgtacatgccacccttgagctttttgcacttatggtggttgtgtttgagctgtgtatgaagctgcgctggctggggcttcataccttcatccggcataagcgtacaatggtgaagacaagcgttttagtggtgcagttcgtggaagctattgtcgttctggttcgtcagatgagtcacgtccgcgttacgcgcgctctgagatgtatattcctcgtggactgccggtattgcggcggagtgcggaggaatcttagacagattttccagagcttgcctcccttcatggacattctcctgctactgttgttctttatgatcatttttgctatcctcggtttttacctgttttcccccaacccgtctgatccatacttttcaaccctggaaaatagcattgtttctctctttgtcctcctcacgaccgctaattttcccgacgtaatgatgccctcctacagccggaacccttggtcttgcgttttcttcatagtttatctgtccatagagctgtactttattatgaacctcctcctggctgtggttttcgacacatttaacgatatcgagaagaggaaattcaagtcactactgctgcacaaaagaactgccatacagcacgcttataggctactgattagtcaacgccgacccgcaggcattagctaccgccagtttgaaggcttgatgcggttttataaacctaggatgagcgccagggagcgctatctcaccttcaaagcccttaatcagaacaatactccactcttaagcctcaaagacttttatgacatctacgaggtggccgctctgaaatggaaagccaagaaaaatcgcgagcactggttcgacgaactccccaggactgccctcctcattttcaaaggaatcaacatcctcgtcaaaagtaaggccttccagtacttcatgtatcttgttgtggcggtgaatggcgtatggatcctcgtggaaaccttcatgctgaagggcggaaactttttctctaagcacgtcccctggagctacctggtctttctgactatttacggagtcgaactctttctcaaagtggctggacttggacctgttgagtacctctccagcggctggaatctgtttgacttcagcgtaacagtgtttgctttcctgggtctgctcgcccttgctcttaatatggagcctttttatttcattgtcgtactccggccactgcagcttctgagactgtttaaactgaaagagcggtacaggaatgtcctggatactatgttcgaactgctgcccagaatggcctctctagggctcacccttctgattttttattactcgttcgcaatcgtcgggatggagttcttttgtgggatcgtttttcccaattgctgtaacacgtcaacggtggccgacgcatatcggtggaggaatcacaccgttgggaatcgcactgtggttgaagagggatattactatctgaacaacttcgacaacatcctcaactcatttgttacccttttcgagctgacagtggtgaacaactggtacataatcatggagggtgtcacctcacagacttcccattggtctcgactttatttcatgaccttttatatcgtcaccatggtggttatgactatcatcgtggcctttatcctcgaggcattcgtgtttagaatgaattactcacgaaagaaccaagactctgaggtggacggaggaattaccctagagaaagagatcagcaaggaggagctggtggccgtcctagagctttatcgggaagcgcgaggggcaagttccgatgtcacccgcctgctggaaacccttagtcaaatggagcggtaccaacagcacagcatggtttttctcggccgacggtccagaacaaagtcagatctgtcactcaaaatgtatcaggaggagatccaggagtggtacgaggaacacgctcgcgagcaggagcaacagcgtcagctctcttcatcagctgcaccagcggctcagcagccacccggatctagacaaaggagccagactgtgacatag

SEQ ID NO: 195670 - DNA, 258 bp, Artificial Sequence
  derived and/or modified sequence
atggccgtgtctctggatgatgacgtgcctcttattttaaccctcgacgaagggggtagtgccccactggcaccatctaatgggctcgggcaagaagaacttccctctaagaacggtgggagctacgccatccatgactcccaggcaccctccctcagttctgggggagagtctagcccgtcctccccagctcataattgggagatgaattaccaggaagcagcaatttatttgcaggagggagagaataacgattag

SEQ ID NO: 195671 - DNA, 303 bp, Artificial Sequence
  derived and/or modified sequence
atggcagtcagcttggatgatgatgtgcctctaattctcacattagacgaagggggatccgccccactggccccatcaaatggactggggcaggaagagttgccctccaaacgtaggtgttgtatgctttgcagctcaaagcagaaaccatggattccatgtagggtgatctccgatgttgcctgcaaggccgcttcttgttttgagggcgctagcggcccttgcgacatctccatgtgggaatgctatagagtttgtaagcaaatggctgctgctatgccctctaccacaccccgaccctag

SEQ ID NO: 195672 - DNA, 2558 bp, Artificial Sequence
  derived and/or modified sequence
ccctttcctcctttggcttaagcctttggcaggacagattttgggctggaggccagcaattcaactgggagggctctgtgccagttcttgcctttctgaagatggcggcagctatgccatccacgactcccaggcccccagtctcagctctgggggtgagagttccccctccagccccgcacacaactgggagatgaattaccaagaggcagcaatctacctccaggaaggcgagaacaacgacaagttcttcacccaccccaaggatgccaaggcgctggcggcctacctctttgcacacaatcacctcttctacctgatggagctggccacggccctgctgctgctgctgctctccctgtgcgaggcccccgccgtccccgcactccggcttggcatctatgtccacgccaccctggagctgtttgccctgatggtggtagtgtttgaactctgcatgaagttacgctggctgggcctccacaccttcatccggcacaagcggaccatggtcaagacctcggtgctggtggtgcagtttgtcgaggccatcgtggtgttggtacggcagatgtcccatgtgcgggtgacccgagcactgcgctgcattttcctggtggactgtcggtattgcggtggcgtccggcgcaacctgcggcagatcttccagtccctgccgcccttcatggacatcctcctgctgctgctgttcttcatgatcatctttgccatcctcggtttctacttgttctcccctaacccttcagacccctacttcagcaccctggagaacagcatcgtcagtctgtttgtccttctgaccacagccaatttcccagatgtgatgatgccctcctactcccggaacccctggtcctgcgtcttcttcatcgtgtacctctccatcgagctgtatttcatcatgaacctgcttctggctgtggtgttcgacaccttcaatgacattgagaaacgcaagttcaagtctttgctactgcacaagcgaaccgctatccagcatgcctaccgcctgctcatcagccagaggaggcctgccggcatctcctacaggcagtttgaaggcctcatgcgcttctacaagccccggatgagtgccagggagcgctatcttaccttcaaggccctgaatcagaacaacacacccctgctcagcctaaaggacttttacgatatctacgaagttgctgctttgaagtggaaggccaagaaaaacagagagcactggtttgatgagcttcccaggacggcgctcctcatcttcaaaggtattaatatccttgtgaagtccaaggccttccagtatttcatgtacttggtggtggcagtcaacggggtctggatcctcgtggagacatttatgctgaaaggtgggaacttcttctccaagcacgtgccctggagttacctcgtctttctaactatctatggggtggagctgttcctgaaggttgccggcctgggccctgtggagtacttgtcttccggatggaacttgtttgacttctccgtgacagtgttcgccttcctgggactgctggcgctggccctcaacatggagcccttctatttcatcgtggtcctgcgccccctccagctgctgaggttgtttaagttgaaggagcgctaccgcaacgtgctggacaccatgttcgagctgctgccccggatggccagcctgggcctcaccctgctcatcttttactactccttcgccatcgtgggcatggagttcttctgcgggatcgtcttccccaactgctgcaacacgagtacagtggcagatgcctaccgctggcgcaaccacaccgtgggcaacaggaccgtggtggaggaaggctactattatctcaataattttgacaacatcctcaacagctttgtgaccctgtttgagctcacagttgtcaacaactggtacatcatcatggaaggcgtcacctctcagacctcccactggagccgcctctacttcatgaccttttacattgtgaccatggtggtgatgacgatcattgtcgcctttatcctcgaggccttcgtcttccgaatgaactacagccgcaagaaccaggactcggaagttgatggtggcatcacccttgagaaggaaatctccaaagaagagctggttgccgtcctggagctctaccgggaggcacggggggcctcctcggatgtcaccaggctgctggagaccctctcccagatggagagataccagcaacattccatggtgtttctgggacggcgatcaaggaccaagagcgacctgagcctgaagatgtaccaggaggagatccaggagtggtatgaggagcatgccagggagcaagagcagcagcgacaactcagcagcagtgcagcccccgccgcccagcagcccccaggcagccgccagcgctcccagaccgttacctagcccagcgcccgaaagccgtctcttctatgcaataacacaatagtattactctactgcgatgtacggaactgcggtgtgtgtacacatactcacgtatatgcacatatttatatacagg

SEQ ID NO: 195673 - protein, 349 aa, Artificial Sequence
  derived and/or modified sequence
MAATAAEAVASGSGEPREEAGALGPAWDESQLRSYSFPTRPIPRLSQSDPRAEELIENEEPVVLTDTNLVYPALKWDLEYLQENIGNGDFSVYSASTHKFLYYDEKKMANFQNFKPRSNREEMKFHEFVEKLQDIQQRGGEERLYLQQTLNDTVGRKIVMDFLGFNWNWINKQQGKRGWGQLTSNLLLIGMEGNVTPAHYDEQQNFFAQIKGYKRCILFPPDQFECLYPYPVHHPCDRQSQVDFDNPDYERFPNFQNVVGYETVVGPGDVLYIPMYWWHHIESLLNGGITITVNFWYKGAPTPKRIEYPLKAHQKVAIMRNIEKMLGEALGNPQEVGPLLNTMIKGRYN

SEQ ID NO: 195674 - protein, 382 aa, Artificial Sequence
  derived and/or modified sequence
MVSVGCVVFLFFFFGVRNRRSFRFRWGPSLAAEMAATAAEAVASGSGEPREEAGALGPAWDESQLRSYSFPTRPIPRLSQSDPRAEELIENEEPVVLTDTNLVYPALKWDLEYLQENIGNGDFSVYSASTHKFLYYDEKKMANFQNFKPRSNREEMKFHEFVEKLQDIQQRGGEERLYLQQTLNDTVGRKIVMDFLGFNWNWINKQQGKRGWGQLTSNLLLIGMEGNVTPAHYDEQQNFFAQIKGYKRCILFPPDQFECLYPYPVHHPCDRQSQVDFDNPDYERFPNFQNVVGYETVVGPGDVLYIPMYWWHHIESLLNGGITITVNFWYKGAPTPKRIEYPLKAHQKVAIMRNIEKMLGEALGNPQEVGPLLNTMIKGRYN

SEQ ID NO: 195675 - DNA, 1050 bp, Artificial Sequence
  derived and/or modified sequence
atggcggcgacagcagctgaggccgtggccagcggcagcggcgaacccagagaggaggcaggggcactgggccccgcctgggacgaaagtcaactgcggagttatagctttccgacccgccccatacctaggctttcgcagtccgacccaagagctgaggagctgatcgagaatgaagagccagtcgtcctgactgacaccaacctggtctaccctgcactgaagtgggatctggagtatctgcaggagaacatcggcaacggggatttcagcgtatactccgcgtcgacgcacaagttcctctactatgacgaaaagaaaatggcaaacttccagaactttaaaccgaggtctaacagagaggagatgaaattccatgagtttgtggagaagctgcaggacattcagcagcgaggtggagaagaacgactgtacctgcagcagaccctgaacgacacggtggggagaaaaatcgtgatggattttctgggcttcaactggaattggataaataaacaacagggcaagcggggttggggtcagctcacctccaatctgctcctgatcggaatggagggcaatgtgactccggctcattatgatgagcagcagaattttttcgcgcagattaagggatataagagatgcatcctgtttccccccgatcagtttgaatgcctgtacccctatcccgttcaccatccatgcgaccggcagtctcaggtggactttgataatcccgattacgaaaggtttcctaacttccagaacgtggtgggctacgaaacagtagtcggcccaggggacgtgctctacatcccgatgtattggtggcaccacatagaaagcctgctcaacggaggtattaccattactgtaaacttttggtataagggcgccccgacccctaaaaggatcgagtaccccctgaaggcccaccaaaaggtagccattatgagaaatatagagaagatgctcggggaagccttgggaaatccacaggaggttggccccctgttgaacaccatgattaaagggcggtacaattag

SEQ ID NO: 195676 - DNA, 1149 bp, Artificial Sequence
  derived and/or modified sequence
atggtctctgtgggatgtgttgtctttctttttttcttcttcggagtccgaaatagaaggtccttccgcttccgatggggcccatcccttgcagcagaaatggctgctactgctgctgaggctgtagctagtggatcaggcgagcctcgcgaggaggccggcgccctaggacctgcttgggatgagagccagttgaggagctacagctttcccacccgcccaatccctcgcctgagtcaaagcgatcccagggctgaggagctgattgagaacgaggagccagttgtgctgaccgacaccaatcttgtatacccagcactaaaatgggaccttgagtacctgcaagaaaacattggaaatggggacttctcggtgtatagcgcttccacccacaagttcctatactatgacgagaagaagatggcgaatttccagaactttaagccccgttctaatcgtgaagaaatgaaatttcacgagtttgttgagaaactgcaggacattcaacagaggggtggggaagagcggttatacctgcagcaaacattgaacgatactgtgggacgcaagattgtgatggacttcctcggattcaactggaattggatcaataagcagcaggggaagcgaggatggggccagctcacaagcaatctcctcctgattggaatggagggcaacgtcacacctgctcactacgacgaacagcagaacttcttcgctcagattaagggctacaagagatgtatcttgttccctcctgatcagtttgaatgtctctatccgtatcctgtacaccacccgtgtgatcgacagagccaggtggatttcgataaccctgactacgagagatttccaaactttcagaacgttgtggggtatgagacagtggtgggccctggtgacgtgctgtatattccaatgtattggtggcaccatatcgagtctctcctgaatggggggattaccattacagtcaatttttggtacaagggggcccccaccccaaaacggatcgaatacccactgaaagcccatcagaaagtggcgattatgcgcaatatcgagaaaatgctgggggaggcgctgggaaacccccaggaggtgggtcctttacttaacactatgataaaaggcaggtataactag

SEQ ID NO: 195677 - DNA, 3019 bp, Artificial Sequence
  derived and/or modified sequence
atggtttccgttgggtgtgtggtttttttgtttttttttttttggggtccggaataggcggagcttccggttccggtgggggccgtccctggcggcggagatggcggcgacagcggcggaggctgtggcctctggctctggagagccccgggaggaggctggagccctcggccccgcctgggatgaatcccagttgcgcagttatagcttcccgactaggcccattccgcgtctgagtcagagcgacccccgggcagaggagcttattgagaatgaggagcctgtggtgctgaccgacacaaatcttgtgtatcctgccctgaaatgggaccttgaatacctgcaagagaatattggcaatggagacttctctgtgtacagtgccagcacccacaagttcttgtactatgatgagaagaagatggccaatttccagaactttaagccgaggtccaacagggaagaaatgaaatttcatgagttcgttgagaaactgcaggatatacagcagcgaggaggggaagagaggttgtatctgcagcaaacgctcaatgacactgtgggcaggaagattgtcatggacttcttaggttttaactggaactggattaataagcaacagggaaagcgtggctgggggcagcttacctctaacctgctgctcattggcatggaaggaaatgtgacacctgctcactatgatgagcagcagaacttttttgctcagataaaaggttacaaacgatgcatcttattccctccggatcagttcgagtgcctctacccataccctgttcatcacccatgtgacagacagagccaggtggactttgacaatcccgactacgagaggttccctaatttccaaaatgtggttggttacgaaacagtggttggccctggtgatgttctttacatcccaatgtactggtggcatcacatagagtcattactaaatggggggattaccatcactgtgaacttctggtataagggggctcccacccctaagagaattgaatatcctctcaaagctcatcagaaagtggccataatgagaaacattgagaagatgcttggagaggccttggggaacccacaagaggtggggcccttgttgaacacaatgatcaagggccgatacaactagcctgccaggggtcaaggcctcctgccaggtgactgctatcccgtccacaccgcttcattgatgaggacaggagactccaagcgctagtattgcacgctgcacttaatggactggactcttgccatggcccaggagtcaggtgtttggagcgaggcagggcagttggcactccactcctatttggagggacttcatacccttgcctcttgtgccccagcaccttctctctctgccccccgcctaaagtcctgcattcagtgtgtggagtcccagcttttggttgtcatcatgtctgtgtgtatgttagtctgtcaacttcggaatgtgtgcgtgtgtgtgcatgcacacgcatgtatgtatctgttccctgttccttctgggtcaggctgtcacttccggctctcagccctatctcctgcaacctcagtgcctcagcctgagagagagatgagatgctcttggactccccactgcatctgggctgcagggccagagctagtctgaccattaggtcagtctgcctcctgacagtttttgcgtagtcaagctctaggcggtatgggaatggctaccgggactctaatggggtgaaagagaggggaggcttgcctttgagagcctatatagccttcctgtgagagaggattagatagggttccaactgggcctacaagctcaagccatacataaaaggaccttgggacataagaaccaatgattgtgcataagttctaaattagagacacatatagtttctctctttcagcaccagctcttgcccctatgctgggtaccaagggagttctcctagctgtggcttctctaggttctaggggtgcaagcctctgtgtgtttgtttgtgtgtgtctgtgtgtgcgtatccacactaggggtgcaagcctctgggtgtgtgtgtgtgtgtgcgtgcgtgtgtgtgtgtgtgtccgtgtgtgtgtgtgtgtgtgtccacactggccagcctccctacttaccaaggttctccactgcttaccttttccagtgggacagtacagtgtgagcccccgggaagtactgcctgacctatcctaagcttttacacttggattttagccatcatatgttggccaggtctcactgcagcctgcccgaggctaactggctagagcctccaggccctatgatgctccctgcccaggccatatcctttattcctgctgagcttcctggctgaatagatgaaatggggtcaagcccaggcagctcattcactacctgtgatccacctcagggcacgggcaaacacataggcttgcgtcttaaagccagctcctctgccagaccccgttgtaatgtgccacaacaccctcaatagtcagggcaactggtggagcatggaagtcgaatttccttttctgttaggagctactcctgggaacccctctcagggctgcagcttacaggtgggcagctgtgattgcacaacttgaagggccatcattcacatctattcagtgggagtggggtccctgggattgggcagtgtggtggccctgtgtctcctcacctctgctcctgtcttcatcaccttctctctggaagggaagaggagttggaaggtctctggttttcttttctttttttttttttttgccaaaggtttacttccagcatctgagctctggctctcacccctgaagctcagttatagtgcactgatgaactgagaggatgcgtgtggatgtgtgtgcatgcctgagtgcgttttttggggaggggtgtttatttttagtaccccattctggggttctctgatgcagtgtggatgtgaagatatggtaccttctcaagtgtagctctttcaaatatagtcaatgctgggaaatgtga

SEQ ID NO: 195678 - DNA, 1462 bp, Artificial Sequence
  derived and/or modified sequence
atggtttccgttgggtgtgtggtttttttgttttttttttttggggtccggaataggcggagcttccggttccggtgggggccgtccctggcggcggagatggcggcgacagcggcggaggctgtggcctctggctctggagagccccgggaggaggctggagccctcggccccgcctgggatgaatcccagttgcgcagttatagcttcccgactaggcccattccgcgtctgagtcagagcgacccccgggcagaggagcttattgagaatgaggagcctgtggtgctgaccgacacaaatcttgtgtatcctgccctgaaatgggaccttgaatacctgcaagagaatattggcaatggagacttctctgtgtacagtgccagcacccacaagttcttgtactatgatgagaagaagatggccaatttccagaactttaagccgaggtccaacagggaagaaatgaaatttcatgagttcgttgagaaactgcaggatatacagcagcgaggaggggaagagaggttgtatctgcagcaaacgctcaatgacactgtgggcaggaagattgtcatggacttcttaggttttaactggaactggattaataagcaacagggaaagcgtggctgggggcagcttacctctaacctgctgctcattggcatggaaggaaatgtgacacctgctcactatgatgagcagcagaacttttttgctcagataaaaggttacaaacgatgcatcttattccctccggatcagttcgagtgcctctacccataccctgttcatcacccatgtgacagacagagccaggtggactttgacaatcccgactacgagaggttccctaatttccaaaatgtggttggttacgaaacagtggttggccctggtgatgttctttacatcccaatgtactggtggcatcacatagagtcattactaaatggggggattaccatcactgtgaacttctggtataagggggctcccacccctaagagaattgaatatcctctcaaagctcatcagaaagtggccataatgagaaacattgagaagatgcttggagaggccttggggaacccacaagaggtggggcccttgttgaacacaatgatcaagggccgatacaactagcctgccaggggtcaaggcctcctgccaggtgactgctatcccgtccacaccgcttcattgatgaggacaggagactccaagcgctagtattgcacgctgcacttaatggactggactcttgccatggcccaggagtcaggtgtttggagcgaggcagggcagttggcactccactcctatttggagggacttcatacccttgcctcttgtgccccagcaccttctctctctgccccccgcctaaagtcctgcattcagtgtgtggagtcccagcttttggttgtcatcatgtctgtgtgtatgttagtctgtc

SEQ ID NO: 195679 - DNA, 1044 bp, Artificial Sequence
  derived and/or modified sequence
aaatgaaactcgacgctctggatagagccaaggaaggctcctgctattcgggggtcctcgagggagccattaaaacctcggcttcctcatttgaggaaacagcctgagccaaggagaaaattgaagtcctctcagctgcagctgctcacccacccccctcccacctccctccacagagaaaagcacccactccattgactctgaggggtcacgagaaggttcgggaaaaagggtcacagtcaagccacccaacccagccggccttctcccatcactacttgggtgcgagcataccctctctgtctcaccccatgccatcatccgggagcctgtggtgctgaccgacacaaatcttgtgtatcctgccctgaaatgggaccttgaatacctgcaagagaatattggcaatggagacttctctgtgtacagtgccagcacccacaagttcttgtactatgatgagaagaagatggccaatttccagaactttaagccgaggtccaacagggaagaaatgaaatttcatgagttcgttgagaaactgcaggatatacagcagcgaggaggggaagagaggttgtatctgcagcaaacgctcaatgacactgtgggcaggaagattgtcatggacttcttaggttttaactggaactggattaataagcaacagggaaagcgtggctgggggcagcttacctctaacctgctgctcattggcatggaaggaaatgtgacacctgctcactatgatgagcagcagaacttttttgctcagataaaaggttacaaacgatgcatcttattccctccggatcagttcgagtgcctctacccataccctgttcatcacccatgtgacagacagagccaggtggactttgacaatcccgactacgagaggttccctaatttccaaaatgtggttggttacgaaacagtggttggccctggtgatgttctttacatcccaatgtactggtggcatcacatagagtcattactaaatggggggattaccatcactgtgaacttctggtataaggg

SEQ ID NO: 195680 - DNA, 1050 bp, Artificial Sequence
  derived and/or modified sequence
atggccgccacagctgctgaggccgtggccagcggcagcggggagccccgggaggaggccggggccctgggccctgcctgggatgagagccagctgcggagctacagcttccccacccggcccatcccccggctgagccagagcgaccccagggctgaggagctgattgaaaatgaggagcctgtggtgctgacagacaccaacctggtgtacccagccctgaagtgggacctggagtacctgcaggagaacattggaaatggagacttctctgtgtacagcgccagcacccacaagttcctgtactatgatgagaagaagatggccaacttccagaacttcaagcccaggagcaaccgggaggagatgaagttccacgagtttgtggagaagctgcaggacatccagcagagaggaggagaggagcggctgtacctgcagcagaccctgaatgacacagtgggcaggaagatcgtgatggacttcctgggcttcaactggaactggatcaacaagcagcagggcaagaggggctggggccagctgaccagcaacctgctgctgattggcatggagggcaatgtgaccccagcccactatgatgagcagcagaacttctttgcccagatcaagggctacaagcgctgcatcctcttccccccagaccagtttgaatgtctgtacccctaccctgtgcaccacccctgtgaccggcagagccaggtggactttgacaacccagactatgagcgcttccccaacttccagaatgtggtgggctatgaaacagtggtgggccctggagatgtgctgtacatccccatgtactggtggcaccacatcgagagcctgctgaatggaggcatcaccatcaccgtgaacttctggtacaagggggcccccacccccaagagaattgagtaccccctgaaggcccaccagaaggtggccatcatgaggaacatcgagaagatgctgggggaggccctgggcaacccccaggaggtgggccccctgctgaacaccatgatcaagggccgctacaactag

SEQ ID NO: 195681 - DNA, 1149 bp, Artificial Sequence
  derived and/or modified sequence
atggtgtctgtgggctgtgtggtgttcctgttcttcttcttcggcgtgaggaacagaagaagcttccgcttccgctggggccccagcctggccgctgagatggccgccacagctgctgaggccgtggccagcggcagcggggagccccgggaggaggccggggccctgggccctgcctgggatgagagccagctgcggagctacagcttccccacccggcccatcccccggctgagccagagcgaccccagggctgaggagctgattgaaaatgaggagcctgtggtgctgacagacaccaacctggtgtacccagccctgaagtgggacctggagtacctgcaggagaacattggaaatggagacttctctgtgtacagcgccagcacccacaagttcctgtactatgatgagaagaagatggccaacttccagaacttcaagcccaggagcaaccgggaggagatgaagttccatgaatttgtggagaagctgcaggacatccagcagaggggcggggaggagcggctgtacctgcagcagaccctgaatgacacagtgggcaggaagatcgtgatggacttcctgggcttcaactggaactggatcaacaagcagcagggcaagaggggctggggccagctgaccagcaacctgctgctgattggcatggagggcaatgtgaccccagcccactatgatgagcagcagaacttctttgcccagatcaagggctacaagcgctgcatcctcttccccccagaccagtttgagtgcctgtacccctaccctgtgcaccacccctgtgaccggcagagccaggtggactttgacaacccagactatgagcgcttccccaacttccagaatgtggtgggctatgagaccgtggtgggccctggagatgtgctgtacatccccatgtactggtggcaccacatcgagagcctgctgaatggaggcatcaccatcaccgtgaacttctggtacaagggggcccccacccccaagagaattgagtaccccctgaaggcccaccagaaggtggccatcatgagaaatattgagaagatgctgggggaggccctgggcaacccccaggaggtgggccccctgctgaacaccatgatcaagggccgctacaactag

SEQ ID NO: 195682 - DNA, 1050 bp, Artificial Sequence
  derived and/or modified sequence
atggccgccaccgccgccgaggccgtggccagcggcagcggcgagcctagggaagaggccggagcccttggcccagcatgggacgagtcccagctccgttcttatagctttcccacccgcccaatcccccgtctgtcccagagtgatccacgggccgaagagcttatagagaacgaagagcctgtggtgttgactgataccaatctggtgtatccagctttgaagtgggatctcgaatatctgcaagagaacattggtaatggagactttagcgtgtattccgccagtacacataagtttctctattacgatgaaaagaagatggctaactttcagaactttaagccccgtagcaaccgtgaagagatgaagttccacgagtttgtggaaaagctgcaggatatccagcagcgcggcggtgaggaacggctttatctgcagcagacactcaacgacaccgtcggaagaaagattgtcatggattttctgggtttcaactggaattggatcaataagcagcagggcaaacgcggatggggccagctcacatccaacctgttgcttatcggcatggaggggaacgtaactcccgctcattatgatgagcagcaaaatttcttcgctcagatcaagggctacaaacgctgtatcctgttccctccagaccaatttgaatgcctgtacccatacccagtgcatcatccgtgtgatcgacagtcgcaggtcgatttcgataatccggactatgagcggttcccgaatttccagaatgtggtcggctacgaaaccgtggtggggcctggcgatgtgctctacataccaatgtattggtggcaccacattgagagcctgctgaatggaggcatcaccattaccgtgaacttctggtacaagggtgcgccaacccccaagagaatcgagtacccactgaaggcccatcagaaggtcgcgatcatgcggaacattgaaaagatgttaggggaggcgctggggaatccccaggaagttggacccttattgaacaccatgataaaaggcagatacaattag

SEQ ID NO: 195683 - DNA, 1149 bp, Artificial Sequence
  derived and/or modified sequence
atggtgagcgtgggctgcgtggtgttcctgttcttcttcttcggcgttcgcaatcgccgatcctttcggtttcgctggggacccagcctcgccgcagaaatggccgccacggcagccgaggcagtagctagcgggtccggggaaccgcgcgaggaggccggagcccttggccccgcttgggatgaatcacagctccggtcatactccttcccaacaaggcctatccctaggctgagtcaatcagatcccagggccgaggagctgattgagaacgaggagcctgtggtgctcaccgatactaacttggtgtaccctgctttgaagtgggacctggaatatctgcaagagaatatcggcaacggagacttctctgtttatagcgcctccactcacaaatttctgtattatgatgaaaaaaaaatggccaacttccagaattttaagccaaggtctaacagagaggagatgaagtttcatgagttcgtggaaaaacttcaagatattcagcagcgaggaggagaggaacggctgtacctccagcaaacactaaacgatactgtaggaaggaagatcgtaatggactttctgggcttcaactggaattggatcaataagcaacagggaaagcgaggttggggacagctcactagcaacttgctcctcatcggcatggagggcaatgtaacaccagcacactacgatgagcagcagaacttcttcgcccagattaagggatacaagcgttgcatcctgtttcccccggatcaatttgaatgcctgtatccttacccagtacaccatccttgtgaccgccagagtcaggtggacttcgataacccagattacgaacgcttcccgaatttccagaatgtagtgggctatgaaaccgttgtggggcccggagacgtactgtatatcccgatgtactggtggcaccatatagaatctttactgaatggcgggatcaccatcaccgtcaacttctggtacaagggggccccaacacctaagagaattgagtaccccctaaaggctcatcaaaaggtggcaatcatgcggaatatagaaaagatgctaggggaagcacttggcaaccctcaggaagtgggccctcttctgaacacgatgattaaaggtcgttacaattag

SEQ ID NO: 195684 - DNA, 1050 bp, Artificial Sequence
  derived and/or modified sequence
atggctgcgacagcagcagaagctgtggcaagcggttccggagaaccaagagaagaagccggagctcttggcccagcctgggatgaaagccagcttagaagttatagctttcctacccgcccaatccctagattgtctcaatccgacccaagagccgaagagttaatcgagaacgaggaacccgtggtgctgactgacaccaatctggtgtacccagccttgaagtgggacctggagtatctgcaggagaatattgggaacggcgacttttccgtttatagcgcctcaacacacaagttcctctactatgatgagaaaaaaatggcaaactttcaaaattttaagccccgatcgaacagagaagagatgaaattccatgagttcgtcgagaagctccaggatatccaacagaggggaggggaagagagactctatctgcaacagaccctaaacgacacagttggtcggaaaatcgtgatggactttctcgggttcaattggaactggattaacaagcagcagggtaaaagaggttggggtcaacttactagcaaccttcttctgattggtatggagggaaacgtgacacctgcccactatgatgagcagcagaactttttcgctcagatcaaaggatacaaaaggtgtatcctatttcctccggatcagtttgagtgcctgtatccctacccagtacaccatccctgcgaccggcagagtcaggtggactttgacaatcctgactacgaacggttccccaacttccagaatgtcgtgggatacgagacagtggtgggccctggtgacgttctgtatatcccaatgtactggtggcaccacatcgagtcgctgctaaatggagggattacgattaccgtgaatttttggtataagggtgcacccacaccgaagcgcatagagtacccacttaaggcgcatcaaaaggtagctattatgcggaatatcgaaaagatgttaggagaggcgctggggaacccacaagaagtgggccctctattaaatactatgatcaagggtcgatataattag

SEQ ID NO: 195685 - DNA, 1149 bp, Artificial Sequence
  derived and/or modified sequence
atggtttccgttgggtgcgtggtttttctgtttttctttttcggcgtccgaaataggaggagctttcggttccgatgggggccatctctggcagcggaaatggcagctactgctgccgaagccgtcgcgtccggaagcggggagccacgagaggaggcgggagccctaggcccagcatgggatgaatctcagctccggtcctactcctttcccacccggcctatcccacgtctcagtcagagcgacccacgagccgaggagctgattgaaaacgaggaacctgttgtactgacagataccaacctggtgtacccggcacttaagtgggatcttgagtatttgcaggagaatattgggaacggagactttagcgtctatagcgcctcgactcataagttcctgtattatgacgaaaaaaagatggcgaattttcagaactttaaaccaagatctaacagagaggaaatgaagttccatgagtttgtggaaaaattgcaagatatacagcagcgtggcggtgaagagagattgtacctgcaacagacccttaacgataccgtcggacgcaagatagtgatggatttcttgggcttcaactggaactggataaacaagcaacagggtaagcgcggatggggtcaactaacaagcaatctccttctcattggtatggagggaaacgttacccctgcacactatgatgagcagcagaattttttcgcgcaaataaaaggctacaaacgctgcatactcttcccaccagatcagttcgagtgtctgtacccttatcccgtgcaccacccgtgcgacagacagtcacaggtggacttcgacaatccagattatgaacggtttccaaacttccagaatgtcgtcgggtatgaaaccgtggttggtcccggtgacgtgctgtatataccaatgtattggtggcaccacatcgagagcctgttgaatggtggcataactatcaccgtgaacttttggtataagggggcacccaccccaaaacggatcgagtatccactgaaggctcatcagaaagtcgctatcatgcgcaatattgagaagatgttgggcgaagctcttgggaatccacaggaggtaggtcctctgctgaatactatgattaagggtcgctataattag

SEQ ID NO: 195686 - DNA, 1050 bp, Artificial Sequence
  derived and/or modified sequence
atggccgccaccgccgccgaggccgtggccagcggcagcggcgagcccagagaggaggccggcgccctgggccccgcctgggacgagagccagctgagaagctacagcttccccaccagacccatccccagactgagccagagcgaccccagagccgaggagctgatcgagaacgaggagcccgtggtgctgaccgacaccaacctggtgtaccccgccctgaagtgggacctggagtacctgcaggagaacatcggcaacggcgacttcagcgtgtacagcgccagcacccacaagttcctgtactacgacgagaagaagatggccaacttccagaacttcaagcccagaagcaacagagaggagatgaagttccacgagttcgtggagaagctgcaggacatccagcagagaggcggcgaggagagactgtacctgcagcagaccctgaacgacaccgtgggcagaaagatcgtgatggacttcctgggcttcaactggaactggatcaacaagcagcagggcaagagaggctggggccagctgaccagcaacctgctgctgatcggcatggagggcaacgtgacccccgcccactacgacgagcagcagaacttcttcgcccagatcaagggctacaagagatgcatcctgttcccccccgaccagttcgagtgcctgtacccctaccccgtgcaccacccctgcgacagacagagccaggtggacttcgacaaccccgactacgagagattccccaacttccagaacgtggtgggctacgagaccgtggtgggccccggcgacgtgctgtacatccccatgtactggtggcaccacatcgagagcctgctgaacggcggcatcaccatcaccgtgaacttctggtacaagggcgcccccacccccaagagaatcgagtaccccctgaaggcccaccagaaggtggccatcatgagaaacatcgagaagatgctgggcgaggccctgggcaacccccaggaggtgggccccctgctgaacaccatgatcaagggcagatacaactag

SEQ ID NO: 195687 - DNA, 1149 bp, Artificial Sequence
  derived and/or modified sequence
atggtgagcgtgggctgcgtggtgttcctgttcttcttcttcggcgtgagaaacagaagaagcttcagattcagatggggccccagcctggccgccgagatggccgccaccgccgccgaggccgtggccagcggcagcggcgagcccagagaggaggccggcgccctgggccccgcctgggacgagagccagctgagaagctacagcttccccaccagacccatccccagactgagccagagcgaccccagagccgaggagctgatcgagaacgaggagcccgtggtgctgaccgacaccaacctggtgtaccccgccctgaagtgggacctggagtacctgcaggagaacatcggcaacggcgacttcagcgtgtacagcgccagcacccacaagttcctgtactacgacgagaagaagatggccaacttccagaacttcaagcccagaagcaacagagaggagatgaagttccacgagttcgtggagaagctgcaggacatccagcagagaggcggcgaggagagactgtacctgcagcagaccctgaacgacaccgtgggcagaaagatcgtgatggacttcctgggcttcaactggaactggatcaacaagcagcagggcaagagaggctggggccagctgaccagcaacctgctgctgatcggcatggagggcaacgtgacccccgcccactacgacgagcagcagaacttcttcgcccagatcaagggctacaagagatgcatcctgttcccccccgaccagttcgagtgcctgtacccctaccccgtgcaccacccctgcgacagacagagccaggtggacttcgacaaccccgactacgagagattccccaacttccagaacgtggtgggctacgagaccgtggtgggccccggcgacgtgctgtacatccccatgtactggtggcaccacatcgagagcctgctgaacggcggcatcaccatcaccgtgaacttctggtacaagggcgcccccacccccaagagaatcgagtaccccctgaaggcccaccagaaggtggccatcatgagaaacatcgagaagatgctgggcgaggccctgggcaacccccaggaggtgggccccctgctgaacaccatgatcaagggcagatacaactag

SEQ ID NO: 195688 - protein, 392 aa, Artificial Sequence
  derived and/or modified sequence
MELVAGCYEQVLFGFAVHPEPEACGDHEQWTLVADFTHHAHTASLSAVAVNSRFVVTGSKDETIHIYDMKKKIEHGALVHHSGTITCLKFYGNRHLISGAEDGLICIWDAKKWECLKSIKAHKGQVTFLSIHPSGKLALSVGTDKTLRTWNLVEGRSAFIKNIKQNAHIVEWSPRGEQYVVIIQNKIDIYQLDTASISGTITNEKRISSVKFLSESVLAVAGDEEVIRFFDCDSLVCLCEFKAHENRVKDMFSFEIPEHHVIVSASSDGFIKMWKLKQDKKVPPSLLCEINTNARLTCLGVWLDKVADMKESLPPAAEPSPVSKEQSKIGKKEPGDTVHKEEKRSKPNTKKRGLTGDSKKATKESGLISTKKRKMVEMLEKKRKKKKIKTMQ

SEQ ID NO: 195689 - DNA, 1179 bp, Artificial Sequence
  derived and/or modified sequence
atggagcttgttgctggctgttacgaacaagtgctgtttggatttgccgtccaccctgaacctgaagcctgcggcgatcacgaacagtggactctggtggcggattttactcaccatgcccacaccgcgtcgctctcagcagttgctgtcaactctagattcgtggtcacagggagcaaagatgagactattcatatatatgacatgaagaagaaaatcgagcacggtgcccttgtacatcactccggaactattacatgcctgaagttttatggcaatcgtcatcttatttccggtgccgaggacgggttgatttgcatttgggacgccaaaaagtgggaatgcctgaaatctatcaaagcacataaaggccaggttacatttcttagtatccacccttctggcaaacttgcactttcagtcggaactgataagacgctgcgcacttggaacctggtagagggtcgcagtgctttcattaaaaatattaagcagaatgcccatatcgtagagtggagcccgaggggtgagcagtacgtagtaattattcagaataagattgacatctaccagttagacactgcctcaatatcaggcaccattaccaatgaaaagagaatctcctctgtcaaatttttatccgagagcgtgttagcagtcgccggtgacgaagaggttatacggttctttgattgcgattcgctggtgtgtctctgtgagtttaaggcccacgaaaatagagttaaggacatgttctcattcgaaattcccgagcaccacgttattgttagcgcaagctcagacggcttcattaagatgtggaaactgaaacaggataaaaaagtccccccctccctactgtgcgaaattaacacaaacgcacgtctcacttgcttaggcgtgtggctggataaagtggccgacatgaaggaatcgctcccccctgctgccgaaccttctccggtgtcaaaagagcagtcgaagatcggtaaaaaggagcccggcgacacagtgcacaaggaggaaaagagatccaagcctaataccaaaaaacgcggtctaactggggattccaaaaaggcaacgaaggaatcgggactgatttccactaaaaaacggaaaatggtggagatgttagagaagaagcgcaaaaagaagaagatcaagaccatgcagtag

SEQ ID NO: 195690 - DNA, 1179 bp, Artificial Sequence
  derived and/or modified sequence
atggagctggtggccggctgctatgagcaggtgctgtttggatttgctgtgcaccctgagcctgaggcctgtggggaccacgagcagtggaccctggtggccgacttcacccaccacgcccacacagccagcctgtctgctgtggccgtgaacagcagatttgtggtgacaggcagcaaggatgagaccatccacatctatgacatgaagaagaagattgaacatggagccctggtgcaccacagcggcaccatcacctgcctgaagttctacggcaacagacacctgatcagcggggctgaagatggcctcatctgcatctgggatgccaagaagtgggagtgcctgaagagcatcaaggcccacaagggccaggtgaccttcctgagcatccaccccagcggcaagctggccctgtctgtgggcacagacaagaccctgcggacctggaacctggtggagggccgcagcgccttcatcaagaacatcaagcagaatgcccacatcgtggagtggagccccagaggagagcagtatgtggtgatcatccagaacaagattgacatctaccagctggacacagccagcatcagcggcaccatcaccaatgagaagaggatcagctctgtgaagttcctgtctgagagcgtgctggccgtggccggagatgaggaggtgatccgcttctttgactgtgacagcctggtgtgcctgtgtgagttcaaggcccatgaaaatagagtgaaggacatgttctcctttgagatccctgagcaccacgtgattgtgtctgccagcagtgatggcttcatcaagatgtggaagctgaagcaggacaagaaggtgccccccagcctgctgtgtgagatcaacaccaatgcccggctgacctgcctgggcgtgtggctggacaaggtggccgacatgaaggagagcctgcccccagctgctgagcccagccctgtgtccaaggagcagagcaagattggcaagaaggagcccggggacacagtgcacaaggaggagaagaggagcaagcccaacaccaagaagaggggcctgactggagacagcaagaaggccaccaaggagagcggcctcatcagcaccaagaagaggaagatggtggagatgctggagaagaagaggaagaagaagaagatcaagaccatgcagtag

SEQ ID NO: 195691 - DNA, 1179 bp, Artificial Sequence
  derived and/or modified sequence
atggagctggtggccggctgctacgagcaggtgctgttcggcttcgccgtgcatccagagccagaggcttgtggtgatcatgagcagtggacattagtggcagattttacccaccatgctcacacagcgtcattaagtgccgttgcggtgaacagccgttttgtggtgactgggtccaaggacgaaaccatacatatatatgatatgaagaaaaagatcgaacacggcgcgctcgtgcatcactcagggaccattacctgtctcaaattttacggtaatcgccaccttataagtggggctgaggatggcctaatctgcatctgggacgccaagaagtgggagtgtttgaagtcaatcaaggcccacaagggtcaagtcacttttctctcaatacacccctccgggaagcttgccctcagcgtggggactgacaaaactctgcgcacgtggaatctggtggagggacgttccgcttttataaagaacatcaaacagaacgctcacattgtcgaatggtctccaagaggcgaacaatatgtcgtaattatccagaacaagattgatatataccagcttgacaccgctagcatctctggaaccatcacaaacgagaaacgcattagctctgtgaagttcctctcggagtccgtgctggccgtggctggcgacgaggaagtaattcgattttttgactgtgacagtctggtttgtctatgcgaatttaaagctcatgaaaaccgagttaaagatatgtttagtttcgagatccccgagcatcacgttattgtgtcagcatcctctgacgggttcattaaaatgtggaaactgaaacaagacaagaaggtgcctccttcactgctttgtgagattaatacaaatgctcggctaacctgtctgggcgtatggcttgataaggtggccgacatgaaagaatccttaccgcccgccgcagagccatccccggtgagtaaggagcagagcaaaataggtaagaaggaaccgggagacacggttcacaaggaagaaaagcggtccaaacctaacacaaagaagcgaggcttaaccggggactccaagaaggcaaccaaagagtccggccttatcagtactaagaaacggaagatggtggagatgctcgaaaaaaagagaaaaaagaagaaaattaagacaatgcagtag

SEQ ID NO: 195692 - DNA, 1800 bp, Artificial Sequence
  derived and/or modified sequence
gctggcaccttcctgagatatgcctgcttgcccccgatttttttctccttgcagtgagaacctcctcatgtggcatctttacttattctcttcttggaaaatccatgtgacctccccgcgcttaaagtgtttccacgttacaggcgacttaaaggcagccctggagcctgacgtataattcgagcgccgatgcagaaaggagtcaggtgtttttttttttttttttttggtttccggttctgtcacctccaggctgagccgggctggcggaagaggcacgtgcgctgctgaatggagctggtcgctggttgctacgagcaggtcctctttgggttcgctgtacacccggagcccgaggcttgcggcgaccacgagcaatggactcttgtggctgacttcactcaccatgctcacactgcctccttgtcagcagtagctgtaaatagtcgttttgtggtcactgggagcaaagatgaaacaattcacatttatgacatgaaaaagaagattgagcatggggctctagtgcatcacagtggtacaataacttgcctgaaattctatggcaacaggcatttaatcagtggagcggaagatggactcatctgtatctgggatgcaaagaaatgggaatgcctgaagtcaattaaagctcacaaaggacaggtgaccttcctttctattcacccatctggcaagttggccctgtcggttggtacagataaaactttaagaacgtggaatcttgtagaaggaagatcagcattcataaaaaatataaaacaaaatgctcacatagtagaatggtccccaagaggagagcagtatgtagttatcatacagaataaaatagacatctatcagcttgacactgcatccattagtggcaccatcacaaatgaaaagagaatttcctctgttaaatttctttcagagtctgtccttgcagtggctggagatgaagaagttataaggttttttgactgtgattcactagtgtgcctctgcgaatttaaagctcatgaaaacagggtaaaggacatgttcagttttgaaattccagagcatcatgttattgtttcagcatcgagtgatggtttcatcaaaatgtggaagcttaagcaggataagaaagttcccccatctttactctgtgaaataaacactaatgccaggctgacgtgtcttggagtgtggctagacaaagtggcagacatgaaagaaagccttcctccagctgcagagccttctcctgtaagtaaagaacagtccaaaattggcaaaaaggagcctggtgacacagtgcacaaagaagaaaagcggtcaaaacctaacacaaagaaacgcggtttaacaggtgacagtaagaaagcaacaaaagaaagtggcctgatatcaaccaagaagaggaaaatggtagaaatgttggaaaagaagaggaaaaagaagaaaataaaaacaatgcagtgaatcacagatgtctcctgaaagaactcttttagatgaaatcattctactcaaatgtaccttaattttttttttttccctgagtaaaagcaagaaatttcttcctttggaaaaaatatatatattaaaaaaccacttttagatggttttttttaaaaaaaaaaaaaaaactggtaaaattacttttggcagacagtgttttatgaattatgtatcatgttgatatataatatgttaatgtgtcatgtaatttttactttgtacaaagcaaataaagatctttctcaaaatatactgtaaaataatataaaatattgaacacattctttatca

SEQ ID NO: 195693 - DNA, 1179 bp, Artificial Sequence
  derived and/or modified sequence
atggagctcgtggccggttgttacgaacaagtgctgttcggattcgcagtgcacccagaacccgaagcatgcggcgaccacgaacaatggaccctggttgccgatttcactcatcacgcacacactgcttccctgagtgcagtagctgtgaacagtcgcttcgtagtcacgggcagcaaggatgagaccatccacatctatgacatgaagaagaagatcgagcacggggctctggtgcaccatagtgggaccatcacatgtctgaagttctacggcaataggcatctaatctcaggtgccgaggacgggttaatttgcatttgggacgcaaagaagtgggaatgcctgaagtctattaaagctcacaagggccaggtgacattcttatccatccatcccagcggcaaactggccctatcggtgggcacagataagactctgcgcacatggaatcttgtcgaaggaagatctgcctttattaagaacattaaacagaacgcacatatagtcgaatggtcacctaggggggagcagtacgtcgtcattattcagaataaaatcgacatatatcaattggatacagcctctataagtggcactatcaccaacgaaaagagaatcagcagtgttaaattcctgtcagagtccgtgctggccgtggctggcgacgaagaagtgatccggttctttgattgtgatagcctggtatgcctgtgcgaattcaaagcgcacgagaatagagtcaaggacatgttctcattcgaaatcccagagcaccacgtcatcgtgagtgcctcgtctgatggcttcattaaaatgtggaaactcaagcaggataaaaaagtgccaccctcattgctgtgtgagatcaacaccaatgccaggctgacatgcttgggagtgtggttggacaaggtggctgatatgaaggagagtctgccccctgccgctgaacccagccctgtgagcaaggagcagtcaaaaattggcaagaaagaacctggggatactgtccacaaagaagaaaagaggagcaagcctaataccaagaaacgcggtctgactggtgatagtaaaaaggctacaaaagaatccggccttatctcaactaagaagcgcaaaatggtggagatgctggagaagaaacgaaaaaaaaagaagataaagactatgcagtag

SEQ ID NO: 195694 - DNA, 1179 bp, Artificial Sequence
  derived and/or modified sequence
atggagctggtggccggctgctacgagcaggtgctgttcggcttcgccgtgcaccccgagcccgaggcctgcggcgaccacgagcagtggaccctggtggccgacttcacccaccacgcccacaccgccagcctgagcgccgtggccgtgaacagcagattcgtggtgaccggcagcaaggacgagaccatccacatctacgacatgaagaagaagatcgagcacggcgccctggtgcaccacagcggcaccatcacctgcctgaagttctacggcaacagacacctgatcagcggcgccgaggacggcctgatctgcatctgggacgccaagaagtgggagtgcctgaagagcatcaaggcccacaagggccaggtgaccttcctgagcatccaccccagcggcaagctggccctgagcgtgggcaccgacaagaccctgagaacctggaacctggtggagggcagaagcgccttcatcaagaacatcaagcagaacgcccacatcgtggagtggagccccagaggcgagcagtacgtggtgatcatccagaacaagatcgacatctaccagctggacaccgccagcatcagcggcaccatcaccaacgagaagagaatcagcagcgtgaagttcctgagcgagagcgtgctggccgtggccggcgacgaggaggtgatcagattcttcgactgcgacagcctggtgtgcctgtgcgagttcaaggcccacgagaacagagtgaaggacatgttcagcttcgagatccccgagcaccacgtgatcgtgagcgccagcagcgacggcttcatcaagatgtggaagctgaagcaggacaagaaggtgccccccagcctgctgtgcgagatcaacaccaacgccagactgacctgcctgggcgtgtggctggacaaggtggccgacatgaaggagagcctgccccccgccgccgagcccagccccgtgagcaaggagcagagcaagatcggcaagaaggagcccggcgacaccgtgcacaaggaggagaagagaagcaagcccaacaccaagaagagaggcctgaccggcgacagcaagaaggccaccaaggagagcggcctgatcagcaccaagaagagaaagatggtggagatgctggagaagaagagaaagaagaagaagatcaagaccatgcagtag

SEQ ID NO: 195695 - protein, 161 aa, Artificial Sequence
  derived and/or modified sequence
MGCCYSSENEDSDQDREERKLLLDPSSPPTKALNGAEPNYHSLPSARTDEQALLSSILAKTASNIIDVSAADSQGMEQHEYMDRARQYSTRLAVLSSSLTHWKKLPPLPSLTSQPHQVLASEPIPFSDLQQVSRIAAYAYSALSQIRVDAKEELVVQFGIP

SEQ ID NO: 195696 - DNA, 486 bp, Artificial Sequence
  derived and/or modified sequence
atgggctgctgctacagcagcgagaacgaggacagcgaccaggacagagaggagagaaagctgctgctggaccccagcagcccccccaccaaggccctgaacggcgccgagcccaactaccacagcctgcccagcgccagaaccgacgagcaggccctgctgagcagcatcctggccaagaccgccagcaacatcatcgacgtgagcgccgccgacagccagggcatggagcagcacgagtacatggacagagccagacagtacagcaccagactggccgtgctgagcagcagcctgacccactggaagaagctgccccccctgcccagcctgaccagccagccccaccaggtgctggccagcgagcccatccccttcagcgacctgcagcaggtgagcagaatcgccgcctacgcctacagcgccctgagccagatcagagtggacgccaaggaggagctggtggtgcagttcggcatcccctag

SEQ ID NO: 195697 - DNA, 486 bp, Artificial Sequence
  derived and/or modified sequence
atgggctgctgctactcttcagaaaatgaggattctgatcaggaccgggaggaacgaaagctcttgctcgaccctagctcaccaccaaccaaagcactcaacggcgccgagcctaattaccactcactaccttctgcccgcacagacgaacaagcactgttatctagcatccttgctaaaaccgcaagtaatatcatagacgtctccgctgcagacagccagggtatggagcagcacgagtatatggatagggcaagacaatactctactaggctggcagtgttgagctcctctctcacccactggaagaaactgccaccactgcccagtctgacgtctcagcctcaccaggttctggcgtcagaacccattccgttttcagacctgcagcaggtgtcaaggatcgcagcctacgcttactccgcccttagccagatccgggtagatgctaaggaagagttagtggtgcagtttggcattccctag

SEQ ID NO: 195698 - DNA, 1179 bp, Artificial Sequence
  derived and/or modified sequence
ggggtattgactgaggcggccaagcggctccgggacagggggtacggggggtgggggcgggtggttgcctgcgggaggccgccgcgggtcatgtgaccggaagggctcctcacggacgccgtccctcctcggcgcggcctgagcgcccggcccgaccccggccatggggtgctgctacagcagcgagaacgaggactcggaccaggaccgagaggagcggaagctgctgctggaccctagcagcccccctaccaaagctctcaatggagccgagcccaactaccacagcctgccttccgctcgcactgatgagcaggccctgctctcttccatccttgccaagacagccagcaacatcattgatgtgtctgctgcagactcacagggcatggagcagcatgagtacatggaccgtgccaggcagtacagcacccgcttggctgtgctgagcagcagcctgacccattggaagaagctgccaccgctgccgtctcttaccagccagccccaccaagtgctggccagtgagcccatcccgttctctgatttgcagcaggtctccaggatagctgcttatgcctacagtgcactttctcagatccgtgtggacgcaaaagaggagctggttgtacagtttgggatcccatgaagagaggggtccttggacagctcttctcctctcttcatcccatctctaccccacccccttggcccccagcctcactgcggcttatacagtaccctaacctgctactaatcacagagaaaaatgtgaagaaggaggagaagaggaaggctagaagcctgagcaagtgagggtagaaccttttgggactggcctttgaagctctggccagggatggggtgggggccaaaaggacagagcctggtatgtcttcatagtcattgagaatgtggagataccagtttgggtggggggtgatcaccaggggacctagggagatccccttcccaccctctctgttggcctcagagtcactcctgccccctctccctgacttggtgctcacatgcacctcactagggtttgtgaccagggtctggatgagcttgaatttgaatgaattgagtttgtatttctagaaccctgggtttttacatgtttggtctttttttgttttggtttgtcaccctcgataaaggaagtatattcatcca

SEQ ID NO: 195699 - DNA, 486 bp, Artificial Sequence
  derived and/or modified sequence
atgggctgctgctacagcagtgaaaatgaagacagcgaccaggaccgggaggagaggaagctgctgctggaccccagcagcccccccaccaaggccctgaatggagctgagcccaactaccacagcctgcccagcgccaggacagatgagcaggccctgctgagcagcatcctggccaagacagccagcaacatcattgatgtgtctgctgctgacagccagggcatggagcagcacgagtacatggaccgggcccggcagtacagcacccggctggccgtgctgagcagcagcctgacccactggaagaagctgccccccctgcccagcctgaccagccagccccaccaggtgctggccagcgagcccatccccttcagtgacctgcagcaggtgtccagaattgctgcctatgcctacagcgccctgagccagatccgggtggatgccaaggaggagctggtggtgcagtttggcatcccctag

SEQ ID NO: 195700 - DNA, 486 bp, Artificial Sequence
  derived and/or modified sequence
atgggctgctgctacagcagcgagaacgaggacagcgaccaggaccgagaggagcgcaagctcctgctagatccctcttctcctcccaccaaagccctgaatggtgccgaacctaattatcactctctcccctccgctagaaccgacgaacaggccttattgtctagtatcctggccaaaacagcctcgaatattatagacgtgtcagccgcggacagccagggcatggagcagcatgaatacatggatagagctagacaatactctactcgtttggccgtcctcagcagttcgctgacacactggaaaaagctcccccctctgccttcacttacctcacaacctcaccaggtgctggcctcagagcctattccattttcagatctacagcaggtcagtcgtatcgctgcgtatgcctactctgctttgagccaaatcagagtggacgccaaagaagaattagttgtccagttcggaatcccttag

SEQ ID NO: 195701 - DNA, 486 bp, Artificial Sequence
  derived and/or modified sequence
atggggtgctgctacagtagcgagaatgaagactcagatcaggaccgggaggaacggaagctcctcctagaccctagctccccccctacgaaggccctcaatggcgcagaacccaactatcacagcctgcccagtgctaggaccgacgagcaggctctcctctcgtcaatcttggctaagactgcctccaacatcattgatgtgagcgccgcagactcccaagggatggaacagcacgaatacatggacagggcgagacaatattctaccaggctggctgtccttagtagtagcctgacccattggaagaagcttccccctcttccatctctcacctctcaaccacaccaggttctggctagcgaacctatccccttttccgacttgcagcaggtgtccagaattgccgcatatgcatactccgcactttcacagattcgtgttgacgctaaagaggagttagtcgtgcagtttggaattccctag

SEQ ID NO: 195702 - protein, 238 aa, Artificial Sequence
  derived and/or modified sequence
MGVENSAKEGDPGTIFFFREGAAVFWNVKDKTMKHVMKVLEKHEIQPYEIALVHWENEELNYIKIEGQSKLHRGEIKLNSELDLDDAILEKFAFSNALCLSVKLAIWEASLDKFIESIQSIPEALKAGKKVKLSHEEVMQKIGELFALRHRINLSSDFLITPDFYWDRENLEGLYDKTCQFLSIGRRVKVMNEKLQHCMELTDLMRNHLNEKRALRLEWMIVILITIEVMFELGRVFF

SEQ ID NO: 195703 - protein, 140 aa, Artificial Sequence
  derived and/or modified sequence
MPFCKTGNLGSILDKFIESIQSIPEALKAGKKVKLSHEEVMQKIGELFALRHRINLSSDFLITPDFYWDRENLEGLYDKTCQFLSIGRRVKVMNEKLQHCMELTDLMRNHLNEKRALRLEWMIVILITIEVMFELGRVFF

SEQ ID NO: 195704 - protein, 449 aa, Artificial Sequence
  derived and/or modified sequence
MPATLLRAVARSHHILSKAHQCRRIGHLMLKPLKEFENTTCSTLTIRQSLDLFLPDKTASGLNKSQILEMNQKKSDTSMLSPLNAARCQDEKAHLPTMKSFGTHRRVTHKPNLLGSKWFIKILKRHFSSVSTETFVPKQDFPQVKRPLKASRTRQPSRTNLPVLSVNEDLMHCTAFATADEYHLGNLSQDLASHGYVEVTSLPRDAANILVMGVENSAKEGDPGTIFFFREGAAVFWNVKDKTMKHVMKVLEKHEIQPYEIALVHWENEELNYIKIEGQSKLHRGEIKLNSELDLDDAILEKFAFSNALCLSVKLAIWEASLDKFIESIQSIPEALKAGKKVKLSHEEVMQKIGELFALRHRINLSSDFLITPDFYWDRENLEGLYDKTCQFLSIGRRVKVMNEKLQHCMELTDLMRNHLNEKRALRLEWMIVILITIEVMFELGRVFF

SEQ ID NO: 195705 - protein, 211 aa, Artificial Sequence
  derived and/or modified sequence
MHCTAFATADEYHLGNLSQDLASHGYVEVTSLPRDAANILVMGVENSAKEGDPGTIFFFREGAAVFWNVKDKTMKHVMKVLEKHEIQPYEIALVHWENEELNYIKIEGQSKLHRGEIKLNSELDLDDAILEKFAFSNALCLSVKLAIWEASLDKFIESIQSIPEALKAGKKVKLSHEEVMQKIGELFALRHRINLSSDFLITPDFYWDREN

SEQ ID NO: 195706 - DNA, 1350 bp, Artificial Sequence
  derived and/or modified sequence
atgcccgccaccctgctgagagccgtggccagaagccaccacatcctgagcaaggcccaccagtgcagaagaatcggccacctgatgctgaagcccctgaaggagttcgagaacaccacctgcagcaccctgaccatcagacagagcctggacctgttcctgcccgacaagaccgccagcggcctgaacaagagccagatcctggagatgaaccagaagaagagcgacaccagcatgctgagccccctgaacgccgccagatgccaggacgagaaggcccacctgcccaccatgaagagcttcggcacccacagaagagtgacccacaagcccaacctgctgggcagcaagtggttcatcaagatcctgaagagacacttcagcagcgtgagcaccgagaccttcgtgcccaagcaggacttcccccaggtgaagagacccctgaaggccagcagaaccagacagcccagcagaaccaacctgcccgtgctgagcgtgaacgaggacctgatgcactgcaccgccttcgccaccgccgacgagtaccacctgggcaacctgagccaggacctggccagccacggctacgtggaggtgaccagcctgcccagagacgccgccaacatcctggtgatgggcgtggagaacagcgccaaggagggcgaccccggcaccatcttcttcttcagagagggcgccgccgtgttctggaacgtgaaggacaagaccatgaagcacgtgatgaaggtgctggagaagcacgagatccagccctacgagatcgccctggtgcactgggagaacgaggagctgaactacatcaagatcgagggccagagcaagctgcacagaggcgagatcaagctgaacagcgagctggacctggacgacgccatcctggagaagttcgccttcagcaacgccctgtgcctgagcgtgaagctggccatctgggaggccagcctggacaagttcatcgagagcatccagagcatccccgaggccctgaaggccggcaagaaggtgaagctgagccacgaggaggtgatgcagaagatcggcgagctgttcgccctgagacacagaatcaacctgagcagcgacttcctgatcacccccgacttctactgggacagagagaacctggagggcctgtacgacaagacctgccagttcctgagcatcggcagaagagtgaaggtgatgaacgagaagctgcagcactgcatggagctgaccgacctgatgagaaaccacctgaacgagaagagagccctgagactggagtggatgatcgtgatcctgatcaccatcgaggtgatgttcgagctgggcagagtgttcttctag

SEQ ID NO: 195707 - DNA, 1350 bp, Artificial Sequence
  derived and/or modified sequence
atgcccgcaactcttctgcgagccgtagctcggtctcatcacatcctgtcaaaggcccaccagtgtaggcgaatcggccacctcatgctgaagccactgaaggaatttgagaatactacctgttcaacacttaccattcgtcaatcgcttgacttgttcctgcccgataaaaccgcttcggggttgaataaatcccagatcctggagatgaaccagaagaaaagtgataccagcatgttgagccccttgaacgcggccagatgccaggacgagaaagcgcatttaccgaccatgaaatcttttggtacccatagaagggttacccataagcctaacctcctgggctcaaagtggtttataaaaatccttaagaggcactttagctctgtgtccacagagactttcgtccccaagcaggattttccgcaggtgaagcgaccgttaaaggccagcaggactagacagccatcccgaaccaatcttcctgtcctctccgtgaatgaggatctgatgcactgcacggcctttgctactgctgacgaatatcatctcggaaatttatcccaggacctggcaagtcacggctacgtagaggtgacaagtcttccacgggatgcggctaatatcctggttatgggggtggagaattccgcgaaagagggggaccccgggacaatctttttctttcgcgagggagccgctgtattctggaacgtgaaagataaaactatgaagcatgttatgaaggtcctcgaaaagcacgagatccagccttacgaaattgccctggttcactgggagaatgaggaactaaattacatcaaaatcgagggccagtcaaagctccatcgtggggagatcaagttgaatagtgagctggatctagatgacgccattcttgagaagttcgcctttagcaatgcactgtgcctgtctgtcaagctggcaatttgggaggcttcccttgacaagttcatagagtcgatccagtctattcctgaggccctaaaagcaggcaagaaggtgaaactgagtcacgaggaggtgatgcaaaagatcggggaactgttcgccctgcggcaccgcataaatttatcaagcgatttcctcatcactccagatttctactgggatagggagaacctggaagggctttacgacaaaacctgccaattcttatccatagggcgcagggtgaaggtcatgaatgagaaattgcagcattgcatggagctcacagacctgatgagaaaccatcttaatgagaagcgggcgctgagactcgagtggatgatagtgattctcataactattgaggtcatgttcgagctaggccgcgtattcttctag

SEQ ID NO: 195708 - DNA, 1350 bp, Artificial Sequence
  derived and/or modified sequence
atgcctgccaccctgctgcgggctgtggcccggagccaccacatcctgagcaaggcccaccagtgcagaagaattggccacctgatgctgaagcccctgaaggagtttgagaacaccacctgcagcaccctgaccatccggcagagcctggacctcttcctgcctgacaagacagccagcggcctgaacaagagccagatcctggagatgaaccagaagaagagtgacacctccatgctgagccccctgaatgctgcccgctgccaggatgagaaggcccacctgcccaccatgaagagctttggcacccacagaagagtgacccacaagcccaacctgctgggcagcaagtggttcatcaagatcctgaagaggcacttcagctctgtgtccacagagacctttgtgcccaagcaggacttcccccaggtgaagaggcccctgaaggccagcaggacccggcagcccagcaggaccaacctgcctgtgctgtctgtgaatgaagacctgatgcactgcacagcctttgccacagcagatgagtaccacctgggcaacctgagccaggacctggccagccacggctacgtggaggtgaccagcctgcccagagatgctgccaacatcctggtgatgggcgtggagaacagcgccaaggagggggaccccggcaccatcttcttcttccgggagggcgctgctgtgttctggaatgtgaaggacaagaccatgaagcacgtgatgaaggtgctggagaagcatgagatccagccctatgaaattgccctggtgcactgggagaatgaggagctgaactacatcaagattgagggccagagcaagctgcacagaggagagatcaagctgaacagcgagctggacctggatgatgccatcctggagaagtttgccttcagcaatgccctgtgcctgtctgtgaagctggccatctgggaggccagcctggacaagttcatcgagagcatccagagcatccctgaggccctgaaggccggcaagaaggtgaagctgagccatgaggaggtgatgcagaagattggagagctgtttgccctgcggcaccgcatcaacctgagcagtgacttcctgatcaccccagacttctactgggaccgggagaacctggagggcctgtatgacaagacctgccagttcctgagcattggaagaagagtgaaggtgatgaatgagaagctgcagcactgcatggagctgacagacctgatgaggaaccacctgaatgagaagagggccctgcggctggagtggatgatcgtcatcctgatcaccatcgaggtgatgtttgagctgggccgggtcttcttctag

SEQ ID NO: 195709 - DNA, 1350 bp, Artificial Sequence
  derived and/or modified sequence
atgcccgccaccctgctgcgggccgtggcccggagccaccacatcctgagcaaagcccaccagtgccgccggattggccatcttatgcttaagccacttaaggaattcgagaatactacatgcagcacattgaccattagacaatccctggatctcttcctgcctgacaagacggccagtgggctgaacaaaagtcaaatccttgagatgaatcagaaaaaaagcgatacgtccatgctgtcacccctgaacgccgctaggtgccaggatgaaaaagcccacctgcccaccatgaagagctttggcacacatagaagggtgacccataagccgaatctgttgggatcaaagtggtttattaagattctcaaaaggcatttcagctctgtgagcacagagacgtttgtgccgaaacaggatttccctcaggtgaaacggcctttgaaagcctcaagaactaggcaaccctcccgcaccaatctgcccgttttgagcgttaacgaggacctcatgcactgcaccgcatttgctaccgccgacgaatatcacctgggaaatctgtcccaggatttagccagtcacggctatgtcgaagtgacctccctgccacgagacgcagccaatatccttgtcatgggggttgaaaattccgccaaagaaggagaccccggtactatattcttcttccgggagggtgctgcggtgttctggaacgtgaaagacaaaactatgaaacacgtgatgaaggtgttggagaagcatgaaattcagccatacgaaatagcactggtgcactgggaaaacgaagagctgaactatatcaagatcgagggccagtcaaagttgcataggggcgaaataaaactcaattccgagttggacctggatgacgctattctagaaaagtttgcattctccaatgctctgtgcttgtccgttaaactggcaatttgggaggccagtcttgacaagttcattgagtctattcagtccatcccagaggcactgaaagctggtaagaaagtaaagctctcacatgaggaggttatgcaaaagatcggcgagctctttgccttaagacatcggattaacctgtccagcgactttctgataaccccagatttctactgggaccgtgaaaatctcgaaggtttgtatgacaaaacttgccaattccttagcattggaagacgggtgaaggtaatgaacgaaaagttgcaacattgcatggaacttactgacctaatgagaaatcacttaaacgagaagagggccctccgactcgaatggatgattgtcatcctgatcacaatcgaggtgatgtttgaattaggacgcgttttcttctag

SEQ ID NO: 195710 - DNA, 1350 bp, Artificial Sequence
  derived and/or modified sequence
atgccggctaccctgctccgcgctgtagccaggagccaccacatcttgagtaaggcccatcaatgtagaagaattggacacctgatgctgaaacctttgaaggaatttgagaatactacctgctctacactgaccatccggcagtccctggacctgtttctcccagataagacagcctctggactaaacaaaagccagatactggagatgaatcagaaaaaatctgacacaagtatgctctcccccctgaacgccgctaggtgccaggatgaaaaagctcacctccctaccatgaagtccttcggcactcatcgtagggtgacgcacaagccaaacctcctgggctctaaatggtttattaaaatcttaaaacgtcatttttcgagcgtcagcacagagacctttgtgcccaaacaggacttcccccaggtgaagcgccctttgaaagccagtcgtaccagacagccatcacgcaccaacttgccagtgctcagtgtgaatgaggacctgatgcactgtacggcctttgctacagcagacgaataccatcttggcaacctaagccaggatctggcctctcacgggtacgtcgaggttacgtcactgcccagggacgctgctaacatcttggtaatgggcgttgagaacagtgccaaagaaggtgaccccggtaccatcttcttctttcgggagggcgctgctgtcttctggaacgtgaaggataagacaatgaagcatgtcatgaaagtcctggagaagcacgaaatccagccatatgaaatcgcattggtgcactgggagaacgaagaattaaattacatcaaaattgaaggacaatctaagctgcaccgcggagaaatcaaattaaattctgagctggacctggatgacgccattttggagaagtttgcattttccaacgccctgtgtctgtctgtcaaactggcaatttgggaagcctctttggataaatttatcgagagcatacaatccatccccgaagccctcaaagctggcaagaaagttaagctttcccacgaggaagtgatgcagaaaattggtgaattgttcgcgttgagacatcggataaatctgtcttcagactttctcataacccctgatttttactgggacagggagaacttggagggtctgtacgataaaacatgccagttcctgtccattgggaggcgggtcaaagttatgaatgaaaaattgcagcactgcatggagctcacggatctgatgagaaaccatctaaatgaaaaaagggcactcaggctagaatggatgattgtgattttgatcaccatcgaagtcatgtttgaattggggcgagtgttcttctag

SEQ ID NO: 195711 - DNA, 1854 bp, Artificial Sequence
  derived and/or modified sequence
gagatgggttggctgcagtagtgagaggctgggggtgcggctctttccctgcagtcctgccgaggaagcgtgcgtccctggcgcttccttcttctcttccggcggagagcttgggatgtggtaatgccagccacactcctcagagccgtggccagatctcatcatatattatcaaaagcacatcagtgccgaagaatcggtcatctaatgttaaaaccacttaaggaatttgaaaatacaacatgcagcacactgacaatacgtcaaagcttggatttgttccttcctgataaaacagctagtggtttgaataagtctcagatcctggaaatgaaccaaaaaaagtcagataccagcatgctgtctccattaaatgctgctcgttgccaagatgaaaaggcacaccttccaaccatgaaatcctttggtactcacaggagagtgacccacaaaccaaatctgttgggttctaaatggtttataaaaatattaaagaggcatttctcatctgtatcaacggaaacatttgttccaaaacaagacttcccacaggtgaagagaccactaaaagcatccaggaccagacagccatccaggaccaaccttccagttctgtctgtgaacgaggacctaatgcactgcacagcatttgcaacggcagatgagtatcatctgggaaatctgtctcaagatctggcctcccacggatatgttgaagtaacaagcttgcctagagatgcagcaaatattttggtgatgggtgtggaaaattctgcaaaagaaggtgatcctggaacaatattcttcttcagggaaggagctgctgtgttttggaatgtgaaagacaaaactatgaagcatgtgatgaaagttctagaaaaacatgaaattcagccctatgaaatcgcactggtacactgggaaaatgaagaacttaactacataaaaatagagggacagtcaaaacttcacaggggggaaatcaagttaaattcagagctggatttagatgatgccattctagagaagtttgctttctccaatgctctatgcctttctgtaaaactggcaatttgggaagcatcactggataaatttattgaatctattcagtcaattcctgaggctttaaaagctgggaagaaagtgaaactatctcatgaagaagttatgcagaaaatcggtgaactctttgctctaaggcaccgtataaacttgagttcagacttcctgattactcctgatttctactgggacagagaaaacctggaaggactttacgataaaacgtgtcaattccttagcattggccgaagagttaaggtcatgaatgaaaaacttcagcactgcatggaactaacagatctaatgcggaatcacctgaatgagaagagggcactccgcttggagtggatgattgtcatcctcattaccatagaggtaatgtttgagctgggacgagtatttttctgatcaagtgataaccaaagtgtcactgcaagagatattcaagttctacaatcaaaaattaaatgttcggcccggcgcggtgcctcatgcctgtaatcccagcactttcggaggccaagaagggtggcttgagatgagatcaggagctcaagacaagcctggccaacatggtgaaaccccatctctactaaaaataccaaaattagccaggtgtgttggcacacgcccgtcatctcagctactcaggaggctgaggcaggagaatctcttgaacttgggaggcggaggttgcagtgagctaagatcacaccactgcactccagccagggcaacagtgagactcagtctcaaaaataaacaataaaataaataaataaatgttca

SEQ ID NO: 195712 - protein, 1022 aa, Artificial Sequence
  derived and/or modified sequence
MYFCWGADSRELQRRRTAGSPGAELLQAASGERHSLLLLTNHRVLSCGDNSRGQLGRRGAQRGELPEPIQALETLIVDLVSCGKEHSLAVCHKGRVFAWGAGSEGQLGIGEFKEISFTPKKIMTLNDIKIIQVSCGHYHSLALSKDSQVFSWGKNSHGQLGLGKEFPSQASPQRVRSLEGIPLAQVAAGGAHSFALSLCGTSFGWGSNSAGQLALSGRNVPVQSNKPLSVGALKNLGVVYISCGDAHTAVLTQDGKVFTFGDNRSGQLGYSPTPEKRGPQLVERIDGLVSQIDCGSYHTLAYVHTTGQVVSFGHGPSDTSKPTHPEALTENFDISCLISAEDFVDVQVKHIFAGTYANFVTTHQDTSSTRAPGKTLPEISRISQSMAEKWIAVKRRSTEHEMAKSEIRMIFSSPACLTASFLKKRGTGETTSIDVDLEMARDTFKKLTKKEWISSMITTCLEDDLLRALPCHSPHQEALSVFLLLPECPVMHDSKNWKNLVVPFAKAVCEMSKQSLQVLKKCWAFLQESSLNPLIQMLKAAIISQLLHQTKTEQDHCNVKALLGMMKELHKVNKANCRLPENTFNINELSNLLNFYIDRGRQLFRDNHLIPAETPSPVIFSDFPFIFNSLSKIKLLQADSHIKMQMSEKKAYMLMHETILQKKDEFPPSPRFILRVRRSRLVKDALRQLSQAEATDFCKVLVVEFINEICPESGGVSSEFFHCMFEEMTKPEYGMFMYPEMGSCMWFPAKPKPEKKRYFLFGMLCGLSLFNLNVANLPFPLALYKKLLDQKPSLEDLKELSPRLGKSLQEVLDDAADDIGDALCIRFSIHWDQNDVDLIPNGISIPVDQTNKRDYVSKYIDYIFNVSVKAVYEEFQRGFYRVCEKEILRHFYPEELMTAIIGNTDYDWKQFEQNSKYEQGYQKSHPTIQLFWKAFHKLTLDEKKKFLFFLTGRDRLHARGIQKMEIVFRCPETFSERDHPTSITCHNILSLPKYSTMERMEEALQVAINNNRGFVSPMLTQS

SEQ ID NO: 195713 - protein, 306 aa, Artificial Sequence
  derived and/or modified sequence
MYFCWGADSRELQRRRTAGSPGAELLQAASGERHSLLLLTNHRVLSCGDNSRGQLGRRGAQRGELPEPIQALETLIVDLVSCGKEHSLAVCHKGRVFAWGAGSEGQLGIGEFKEISFTPKKIMTLNDIKIIQVSCGHYHSLALSKDSQVFSWGKNSHGQLGLGKEFPSQASPQRVRSLEGIPLAQVAAGGAHSFALSLCGTSFGWGSNSAGQLALSGRNVPVQSNKPLSVGALKNLGVVYISCGDAHTAVLTQDGKVFTFGDNRSGQLGYSPTPEKRGPQLVERIDGLVSQIDCGRNSKHGFMTFF

SEQ ID NO: 195714 - protein, 322 aa, Artificial Sequence
  derived and/or modified sequence
MYFCWGADSRELQRRRTAGSPGAELLQAASGERHSLLLLTNHRVLSCGDNSRGQLGRRGAQRGELPEPIQALETLIVDLVSCGKEHSLAVCHKGRVFAWGAGSEGQLGIGEFKEISFTPKKIMTLNDIKIIQVSCGHYHSLALSKDSQVFSWGKNSHGQLGLGKEFPSQASPQRVRSLEGIPLAQVAAGGAHSFALSLCGTSFGWGSNSAGQLALSGRNVPVQSNKPLSVGALKNLGVVYISCGDAHTAVLTQDGKVFTFGDNRSGQLGYSPTPEKRGPQLVERIDGLVSQIDCGRLRGCSSQTHFCWNICQLCDNSSVKLE

SEQ ID NO: 195715 - protein, 364 aa, Artificial Sequence
  derived and/or modified sequence
MYFCWGADSRELQRRRTAGSPGAELLQAASGERHSLLLLTNHRVLSCGDNSRGQLGRRGAQRGELPEPIQALETLIVDLVSCGKEHSLAVCHKGRVFAWGAGSEGQLGIGEFKEISFTPKKIMTLNDIKIIQVSCGHYHSLALSKDSQVFSWGKNSHGQLGLGKEFPSQASPQRVRSLEGIPLAQVAAGGAHSFALSLCGTSFGWGSNSAGQLALSGRNVPVQSNKPLSVGALKNLGVVYISCGDAHTAVLTQDGKVFTFGDNRSGQLGYSPTPEKRGPQLVERIDGLVSQIDCGSYHTLAYVHTTGQVVSFGHGPSDTSKPTHPEALTENFDISCLISAEDFVDVQVKHIFAGTYANFVTTHQ

SEQ ID NO: 195716 - DNA, 3069 bp, Artificial Sequence
  derived and/or modified sequence
atgtacttttgttggggtgccgactctcgggagctgcaaaggagaaggacggcaggcagccccggtgccgagctgttacaagctgcgagtggagagcgtcacagcctgttgttgctgacaaatcatagagtcctttcctgcggggataatagtcgaggccagctagggcggcgaggcgctcagaggggcgagctcccagagccgatacaagcccttgagaccctcatcgtcgatttggtctcatgtgggaaagaacattccctggcggtctgccataaaggtcgagttttcgcttggggggctggatctgagggtcagctcggcataggtgagttcaaagagatctccttcactcctaagaagatcatgacactgaacgacattaaaattattcaggtgtcctgcgggcactaccattctctcgccttgtctaaagactcccaggtattttcttggggaaagaattcccacgggcagttggggctcggaaaagagtttccgtctcaggcctccccacaaagggtaagaagcctcgagggcattcctttggcccaggtggctgcagggggcgcacacagcttcgctctcagcctctgcggcacatcttttggatgggggtccaactccgcaggacagttggctcttagtggacgcaacgtgccggtccaatccaacaagccactctccgtgggcgccctcaaaaatctgggggtggtctacatctcttgcggggatgctcacactgcagtactaacacaagacggcaaggtatttaccttcggagataacagaagcggccaacttgggtattccccaactcctgagaaacgcggccctcagctggtggagagaatcgatggtcttgtaagccagatcgattgcggaagctatcatactctggcctatgtgcataccactgggcaagtcgtctccttcggtcatggcccaagcgacacatcaaagcctacgcacccggaagcgttaactgagaattttgatatctcctgcctcatcagcgctgaagacttcgtagatgtgcaggtgaagcacatttttgcggggacgtacgctaacttcgttacgacccaccaagatacctcctcaactcgcgcaccagggaaaaccctcccagagatctcgaggatctcacagagcatggctgaaaagtggattgccgtcaaacgacgttccacagagcacgagatggctaagtctgaaatacgcatgatcttcagtagccctgcttgcctgacggcctcttttctgaagaaaagaggtactggtgagaccacttccatcgacgtggatctggagatggcgcgggacacttttaagaaattgactaaaaaggaatggatttcttcaatgatcacaacgtgtctggaggatgacctcctccgcgccctaccgtgtcattcgccccaccaggaagctttgagtgtgttcttgctgttaccagagtgtccagtgatgcacgatagtaagaactggaagaacctcgtggtgccatttgctaaggcggtgtgtgagatgagtaaacagtcactgcaggtgctgaagaagtgttgggcctttctccaggagtcctcgttgaaccccctgatacaaatgctgaaagccgctattatttctcaactgttgcaccaaactaaaaccgaacaagatcattgtaatgtcaaagctctgttgggtatgatgaaagagctccacaaggtcaataaggctaattgtcggttacctgaaaatacatttaatataaatgaactgtcaaacctcctgaacttttatatcgatcgcggccgccagctcttccgcgacaaccacttaatccccgccgagaccccatcccccgtgatcttttctgattttccctttatttttaattcgctctcgaagatcaagctcctgcaggcagactcgcacataaaaatgcagatgtcagagaagaaagcatacatgttgatgcacgaaacaattctgcagaaaaaagacgaatttccaccttctcctcggtttatcctgagggtgcgccggtctagactcgtcaaagacgctcttcgacagttatcgcaagccgaagccactgatttctgtaaagtattagtggtggagttcatcaatgagatttgtcccgaaagcggaggcgtcagcagcgagttctttcattgcatgtttgaggagatgactaagccggagtatgggatgtttatgtatcccgagatgggcagctgcatgtggttcccagcaaagcctaaacccgagaaaaagaggtattttctatttggcatgctctgtggacttagtctcttcaacttgaatgttgcaaacctgccattcccattggctctatataaaaagttgctagaccaaaaacccagcttagaggatctaaaggaactcagcccacgtttaggcaaatcgctgcaggaagtcctggacgacgcagctgatgacatcggcgatgctctatgcatcagattctcaattcattgggaccaaaatgacgtagatttgatccctaatggcatttctatccctgttgaccaaactaataaacgcgactacgtaagtaagtacattgactatattttcaatgtatctgtgaaagccgtgtacgaggaatttcagcgcggtttctacagagtatgcgaaaaggaaatcctcaggcatttctaccccgaagagctgatgacagcaattatcggaaacaccgactatgattggaagcagtttgaacagaactcaaaatacgagcaaggctatcagaaaagtcatcccactatccagcttttctggaaagctttccacaaacttacactggacgagaaaaagaaattcctgtttttcctcactggccgcgaccggctgcacgccagggggatccagaagatggagatagtctttcgctgcccagaaacgttttcagaaagagaccatccaacctccatcacctgtcacaacatcctctccttaccgaaatatagtacaatggaacgcatggaagaagcgctgcaggtcgccattaacaataaccgaggttttgtgtcgcccatgctgactcagtcttag

SEQ ID NO: 195717 - DNA, 3069 bp, Artificial Sequence
  derived and/or modified sequence
atgtacttctgctggggcgctgacagccgggagctgcagaggagaagaacagctggcagccctggagctgagctgctgcaggccgccagcggggagcggcacagcctgctgctgctgaccaaccaccgggtgctgagctgtggggacaacagccggggccagctgggcagaagaggagcccagagaggagagctgcctgagcccatccaggccctggagaccctcatcgtggacctggtgtcctgtgggaaggagcacagcctggccgtgtgccacaagggccgggtgtttgcctggggcgccggcagcgagggccagctgggcattggagagttcaaggagatctccttcacccccaagaagatcatgaccctgaatgacatcaagatcatccaggtgtcctgtggccactaccacagcctggccctgagcaaggacagccaggtgttctcctggggcaagaacagccacggccagctgggcctgggcaaggagttccccagccaggccagcccccagagggtgcgcagcctggagggcatccccctggcccaggtggccgccggcggggcccacagctttgccctgagcctgtgtggcaccagctttggctggggcagcaacagcgctggccagctggccctgagcggcagaaatgtgcctgtgcagagcaacaagcccctgtctgtgggcgccctgaagaacctgggcgtggtgtacatcagctgtggagatgcccacacagctgtgctgacccaggacggcaaggtgttcaccttcggggacaacagaagtggccagctgggctacagccccaccccagagaagaggggcccccagctggtggagagaattgatggcctggtgtcccagattgactgtggcagctaccacaccctggcctacgtgcacaccaccggccaggtggtgtcctttggccacggccccagcgacaccagcaagcccacccaccctgaggccctgacagagaactttgacatcagctgcctgatctctgcagaagattttgtggatgtgcaggtgaagcacatctttgctggcacctacgccaactttgtgaccacccaccaggacaccagcagcacccgggcccctgggaagaccctgcctgagatcagccgcatcagccagagcatggccgagaagtggattgctgtgaagagaagaagcacagagcacgagatggccaagtctgagatccgcatgatcttcagcagccctgcctgcctgacagccagcttcctgaagaagaggggcactggagagaccaccagcattgatgtggacctggagatggcccgggacaccttcaagaagctgaccaagaaggagtggatcagctccatgatcaccacctgcctggaggatgacctgctgcgggccctgccctgccacagcccccaccaggaggccctgagcgtcttcctgctgctgcctgaatgtcctgtgatgcatgacagcaagaactggaagaacctggtggtgccctttgccaaggctgtgtgtgagatgagcaagcagagcctgcaggtgctgaagaagtgctgggccttcctgcaggagagcagcctgaaccccctcatccagatgctgaaggccgccatcatcagccagctgctgcaccagaccaagacagagcaggaccactgcaatgtgaaggccctgctgggcatgatgaaggagctgcacaaggtgaacaaggccaactgccgcctgcctgagaacaccttcaacatcaatgagctgagcaacctgctgaacttctacatcgaccggggccggcagctgttccgggacaaccacctgatcccagctgagacccccagccctgtgatcttcagtgacttccccttcatcttcaacagcctgagcaagatcaagctgctgcaggccgacagccacatcaagatgcagatgtctgagaagaaggcctacatgctgatgcatgagaccatcctgcagaagaaggatgagttcccccccagcccccgcttcatcctgcgggtgagaagaagccggctggtgaaggatgccctgcggcagctgagccaggccgaggccacagacttctgcaaggtgctggtggtggagttcatcaatgagatctgcccagagagcggaggagtgagcagcgagttcttccactgcatgtttgaggagatgaccaagccagaatatggcatgttcatgtacccagagatgggcagctgcatgtggttccctgccaagcccaagccagagaagaagcgctacttcctgtttggcatgctgtgtggcctgagcctcttcaacctgaatgtggccaacctgcccttccccctggccctgtacaagaagctgctggaccagaagcccagcctggaggacctgaaggagctgagcccccggctgggcaagagcctgcaggaggtgctggatgatgctgctgatgacattggagatgccctgtgcatccgcttcagcatccactgggaccagaatgatgtggacctgatccccaacggcatcagcatccctgtggaccagaccaacaagagggactatgtgtccaagtacatcgactacatcttcaacgtgtctgtgaaggctgtgtatgaggagttccagaggggcttctacagagtgtgtgagaaggagatcctgcggcacttctacccagaggagctgatgacagccatcatcggcaacacagattatgactggaagcagtttgagcagaacagcaaatatgagcagggctaccagaagagccaccccaccatccagctgttctggaaggccttccacaagctgaccctggatgagaagaagaagttcctgttcttcctgaccggccgggaccggctgcacgcccggggcatccagaagatggagatcgtgttccgctgcccagagaccttcagcgagcgggaccaccccaccagcatcacctgccacaacatcctgagcctgcccaagtacagcaccatggagaggatggaggaggccctgcaggtggccatcaacaacaacagaggatttgtgagccccatgctgacccagagctag

SEQ ID NO: 195718 - DNA, 3069 bp, Artificial Sequence
  derived and/or modified sequence
atgtacttctgctggggcgccgacagccgggagctgcagcggcggcggactgcaggatcgcccggagcagaactgctgcaggcagcatctggagagcgtcattccctgctgcttttaactaaccacagagtgttgtcatgcggcgacaatagcagagggcagttgggcaggcggggagcccaacgcggcgagttacccgagcccattcaggccctcgagaccctcatcgttgatctggtcagctgcgggaaagagcattcgctcgctgtgtgtcacaagggaagggtgttcgcgtggggggctggaagcgaggggcagctgggtattggcgagtttaaagagatcagcttcactcccaaaaaaattatgacacttaacgatattaaaatcatccaggtatcctgcggacactatcactcactcgctctgtccaaggattctcaggtcttctcttggggaaagaacagccacggacaactcgggctgggcaaggagtttcctagccaagcgtcaccacagcgggtgagaagcctggaggggattccccttgctcaggtcgcagctggcggcgctcactcttttgcacttagtctttgtggcaccagtttcggctggggctcaaattccgccggccaactggccctctctgggagaaatgtgcctgttcagtcaaataaacctctgagcgtgggggctttaaaaaatctgggtgtggtgtatattagttgtggagacgcccacacagcagtgctaacacaagatggaaaagtctttactttcggtgacaaccgatctggacagctggggtacagtccaacgcccgagaaaaggggtccacagttggtggagcgcatagacggactggtgagtcagattgactgtggctcttaccataccttggcctatgttcacacaaccggacaagtcgtcagcttcggccacggtccttccgatacatccaaaccaacacacccggaggcactgacagagaattttgacatctcgtgcctgatcagcgccgaggattttgtcgacgttcaggtaaagcacatctttgccggcacgtacgcaaactttgtaaccacccatcaggacacttcttccactcgcgcacccgggaaaactttgcccgaaatctcccgcattagtcagtctatggctgagaaatggattgccgtaaagaggcggtccacagaacatgaaatggccaagagcgaaattaggatgattttcagctctccggcatgtttgacagcttcatttcttaaaaaacgggggactggggagaccacctcaatcgacgtcgacctcgagatggcgagagacactttcaagaaattgacaaaaaaagagtggatctccagtatgattaccacatgtttagaagacgatttgctccgggccttaccctgccattctccacaccaagaagctctgtctgtctttctccttcttcccgaatgcccggtgatgcatgatagtaaaaactggaaaaacctggtggtaccatttgcaaaggcagtgtgcgaaatgagcaagcagagtctgcaagtccttaagaaatgctgggcttttctccaggaatcctccttgaacccgctgatccagatgcttaaagccgcaatcatcagccagctgctccatcagactaaaaccgagcaggatcactgcaacgtgaaagccctgctcggaatgatgaaggagttacacaaagtcaacaaagctaattgtcgactgcctgaaaacactttcaatattaacgagttgtcaaacttgttgaatttttacattgatagggggaggcagctcttcagggataaccacttaattccagcagaaaccccttcaccagtaatattttcggatttccctttcatatttaattcactctctaaaatcaaactccttcaggcagactctcacattaaaatgcagatgtcagaaaagaaggcctatatgctgatgcacgaaaccatcctgcagaaaaaggacgaatttcccccaagtcctcgctttattctcagagtcaggcgcagcaggctggtcaaggacgcattaagacaactaagtcaggcagaggccacagacttttgtaaggtgctggtggtcgagtttatcaacgaaatctgccccgagtctggcggcgtgtcttccgaattcttccactgcatgttcgaggagatgaccaagcccgagtacggtatgtttatgtaccctgaaatgggatcatgcatgtggttcccagccaagccgaaaccagaaaagaaacgctattttctgtttggtatgctctgtggtttgagccttttcaacctcaatgtcgcgaacttgcccttccccctggccctgtacaagaagctgctggaccagaagccatccctggaagatctcaaagaattgagccctcgcctcgggaagagtctccaagaggtgctagacgatgccgctgacgacatcggggacgcattgtgtatccgattctccatccattgggaccagaacgatgtggatcttattcctaacgggatcagcattcctgtcgatcaaacgaacaagagagactatgtgagcaagtacattgattacatcttcaacgtttccgtgaaggccgtctatgaggaatttcagagagggttctaccgggtgtgtgaaaaagagatcctcagacacttttaccctgaagaactgatgacagccattattggcaacacagattatgattggaaacagttcgagcaaaattccaaatatgagcaggggtatcagaagtcccatcctaccatccaattgttctggaaggcttttcataaacttacacttgacgagaaaaagaagttcctgttctttctcaccggccgtgaccgattgcacgccagaggcatacagaagatggaaatcgttttcagatgcccagagaccttcagcgaacgggaccatccgacgagcattacctgtcacaacatcctgtccctccccaagtactctaccatggagaggatggaggaggcgctacaagtggccataaataataaccgggggtttgtgtcccctatgttaacacagagctag

SEQ ID NO: 195719 - DNA, 3069 bp, Artificial Sequence
  derived and/or modified sequence
atgtacttctgttggggcgctgatagcagggagttgcagcgcagacggacagctggatcaccgggagctgagctgctccaggccgcttcaggagaaaggcacagcttgctgctattgaccaatcaccgtgttctttcatgtggtgacaacagtcgcggtcagctcggacggaggggcgctcaacgcggagagctacctgagcccatccaggccctggaaaccctgatcgtagacttagtgtcatgcggcaaggaacattctttggcggtgtgtcacaaagggcgagtttttgcctggggggcagggagcgaagggcagcttggcattggtgagttcaaggaaattagctttactcccaagaagatcatgaccctgaatgatatcaagatcattcaggtgtcctgtggccattaccattcgctcgccttaagcaaggattctcaggtcttctcttgggggaagaattcgcacggacagctgggtttgggcaaggaatttccctcccaagcgagcccacagcgggtacggtcactggaggggatccccctggcccaggtggctgctggaggcgctcattcctttgccctgagcctgtgtggaacatccttcggatggggctcaaattcggcaggtcaactggctctgagcgggagaaacgtacctgtacagtccaacaagccactttccgttggtgcactaaaaaatttaggcgtcgtctacatcagttgtggcgacgctcatacagctgtcttgacacaggacgggaaagtgtttacattcggggataatcgctccgggcagttggggtacagccctaccccagaaaaacgcggtcctcaactcgtggaacggatcgatggactggtgtcacagatcgactgtggtagttatcatacactggcctacgtgcataccaccggccaggtggtctctttcggacatggtccctctgacacatccaagcctacgcaccccgaagctcttactgaaaactttgatatatcctgtctgatcagcgctgaggacttcgtggacgtgcaggtcaagcatattttcgccggaacatacgcgaattttgtcacgactcaccaagatacctccagcactcgtgccccaggtaagaccctgccagaaatttcgagaataagccagtcaatggcagaaaaatggattgctgtgaagcggaggtcaaccgagcatgagatggccaagagcgagatccggatgatcttttcttcccctgcttgtctgactgctagcttcctaaagaaaaggggtacaggcgaaaccacatctatcgatgtggacctggaaatggcacgcgacacttttaagaaacttaccaagaaggaatggatttcctcaatgatcactacatgtctggaggatgacctgttgcgggcactcccatgtcattctccacatcaggaggccctcagcgtgtttctcttactgccagaatgtccagtgatgcacgatagtaaaaactggaagaacctggtcgtccctttcgcaaaggccgtgtgtgagatgtcaaagcagagcctgcaagtgctcaaaaagtgctgggctttcctgcaggagtcctctttgaaccccttaatccaaatgctgaaggcagccatcattagtcagttgctccaccagaccaaaacagaacaggatcactgcaacgttaaggcgctgttgggcatgatgaaagagttgcataaggtgaataaagcaaattgcaggctgccggaaaacacgtttaacatcaatgagctcagcaacctgctgaacttttatattgacagagggaggcagctgttccgcgacaatcatctgatccctgctgagacgcctagccctgtgattttcagtgactttcccttcatcttcaactcactgtctaaaatcaaactcctccaggccgactctcatattaaaatgcaaatgtccgagaagaaagcctacatgcttatgcatgaaaccatcctgcagaaaaaggacgagttcccccctagccccagatttatcctgcgcgtacgtcgctcacgcctggtaaaggatgccctgagacagctgagccaggcagaggctaccgacttctgcaaggtcctcgttgtggaatttattaatgaaatttgcccggagtccggaggcgtgagctccgaattcttccattgcatgtttgaggagatgactaaaccagagtatggaatgtttatgtatcctgaaatggggtcatgtatgtggttcccagcaaagccaaaaccagaaaagaagcgttatttcctgtttggaatgctgtgtggcctgagcctgtttaacctcaatgtcgctaatttgccattccctctggccctgtacaaaaaacttctcgatcagaagcccagcctggaagatctcaaggagctatctcctagactcgggaaatctctccaggaggttctggatgatgcagctgacgacatcggcgatgcactttgcatcaggttctcaatccactgggatcagaacgacgttgacctaatccccaacggaatctctatcccagtagatcagaccaacaagcgggactatgtatcgaagtatatcgattacattttcaacgtttccgtgaaggccgtatatgaggaatttcagcggggattctatagagtgtgcgagaaggagattctgcgacatttctatccagaggaacttatgactgccattatcggcaacaccgactacgattggaagcagtttgagcagaatagcaagtacgagcaaggttaccagaagagtcaccctaccattcaactgttctggaaagctttccataagttgaccctggacgaaaaaaagaaattcttattcttcttgacaggaagagatagactgcatgccaggggcatccaaaaaatggagatagtgtttcggtgtcctgaaacatttagtgagcgtgaccaccccacatctatcacatgccacaacattctcagcctcccaaagtattctaccatggaacgaatggaagaagccctgcaggtggcaatcaacaacaacaggggctttgtgtctccgatgttgacacaatcatag

SEQ ID NO: 195720 - DNA, 3779 bp, Artificial Sequence
  derived and/or modified sequence
ggagcctgtcgcagcgggaccgacggaatccggagcaggcgacagggcgcagaagcgggatgtacttctgttggggcgccgactccagggagctgcagcgccggaggacggcgggcagccccggggctgagctactgcaggcggccagcggggagcgccactctctgctgctgctgaccaaccacagggtcctctcgtgcggagacaacagcaggggtcagctgggccgcaggggcgcgcagcgcggggagctgccagaaccaattcaggcattggaaaccctaattgttgatctcgtgagctgcgggaaggagcactccctggctgtgtgccacaaaggaagggtcttcgcatggggagctggttctgaagggcagctggggattggagaattcaaggaaataagtttcacacctaagaaaataatgactctgaatgatataaaaataatacaagtttcctgtggacactaccactccctggcattatcaaaagatagccaagtgttttcgtggggaaagaacagccatgggcagctgggcttggggaaggagttcccctcccaagccagcccgcagagggtgaggtccctggaggggatcccactggctcaggtggctgccggaggggctcacagctttgccctgtctctctgtgggacttcgtttggctggggaagtaacagtgccgggcagctggccctcagtgggcgtaatgtcccagtgcaaagcaacaagcctctctcagtcggtgcactgaagaatctaggtgtggtttatatcagctgtggtgatgcacacactgcggtgcttacccaggacgggaaagtgttcacatttggagacaatcgctctggacagctgggatacagccccactcctgagaagagaggtccacaacttgtggaaagaattgatggcctagtttcgcagatagattgtggaagttatcacaccctggcatatgtgcacaccactggtcaggtggtatcttttggtcatggaccaagtgacacaagcaagccaactcatccggaggccctgacagagaactttgacattagctgcctgatttctgctgaagacttcgtggatgttcaagtcaaacacatttttgctggaacatatgccaactttgtgacaactcatcaggatactagttccacacgtgctcccgggaaaaccctgccagaaataagccgaattagccagtccatggcagaaaaatggatagcagtgaaaagaagaagtactgaacatgaaatggctaaaagtgaaattagaatgatattttcatctcctgcttgtctgactgcaagttttttaaagaaaagaggaactggagaaacgacttccattgatgtggacttagaaatggcaagagataccttcaagaagttaacaaaaaaggaatggatttcttccatgataactacgtgtctcgaggatgatctgctcagagctcttccatgccattctccacaccaagaagctttatcagttttcctcctgctcccagaatgtcctgtgatgcatgattctaagaactggaagaacctggtggttccatttgcaaaggctgtgtgtgaaatgagtaaacaatctttgcaagtcctaaagaagtgttgggcatttttgcaagaatcttctctgaatccgctgatccagatgcttaaagcagccatcatctctcagctgcttcatcagactaaaaccgaacaggatcactgtaatgttaaagctcttttaggaatgatgaaagaactgcataaggtaaacaaagctaactgtcgactaccagaaaatactttcaacataaatgaactctccaacttattaaacttttatatagatagaggaagacagctctttcgggataaccacctgatacctgcagaaacccccagtcctgttattttcagtgattttccatttatctttaattcgctatccaaaattaaattattgcaagctgattcacatataaagatgcagatgtcagaaaagaaagcatacatgcttatgcatgaaacaattctgcaaaaaaaggatgaatttcctccatcacccagatttatacttagagtcagacgaagtcgcctggttaaagatgctctgcgtcaattaagtcaagctgaagctactgacttctgcaaagtattagtggttgaatttattaatgaaatttgtcctgagtctggaggggttagttcagagttcttccactgtatgtttgaagagatgaccaagccagaatatggaatgttcatgtatcctgaaatgggttcctgcatgtggtttcctgccaagcctaaacctgagaagaaaagatatttcctctttggaatgctgtgtggactctccttattcaatttaaatgttgctaaccttcctttcccactggctctgtataaaaaacttctggaccaaaagccatcattggaagatttaaaagaactcagtcctcggttggggaagagtttgcaagaagttctagatgatgctgctgatgacattggagatgcgctctgcatacgcttttctatacactgggaccaaaatgatgttgacttaattccaaatgggatctccatacctgtggaccaaaccaacaagagagactatgtttctaagtatattgattacattttcaacgtctctgtaaaagcagtttatgaggaatttcagagaggattttatagagtctgtgagaaggagatacttagacatttctaccctgaagaactaatgacagcaatcattggaaatactgattatgactggaaacagtttgaacagaattcaaagtatgagcaaggataccaaaaatcacatcctactatacagttgttttggaaggctttccacaaactaaccttggatgaaaagaaaaaattcctctttttccttacaggacgtgataggctgcatgcaagaggcatacagaaaatggaaatagtatttcgctgtcctgaaactttcagtgaaagagatcacccaacatcaataacttgtcataatattctctccctccctaagtattctacaatggaaagaatggaggaagcacttcaagtagccatcaacaacaacagaggatttgtctcacccatgctcacacagtcataatcacctctgagagactcagggtgggctttctcacacttggatccttctgttcttccttacacctaaataatacaagagattaatgaatagtggttagaagtagttgagggagagattgggggaatggggagatgatgatgatggtcaaagggtgcaaaatctcacacaagactgaggcaggagaatagggtacagagatagggatctaaggatgacttggacacactccctggcactgaagagtctgaacactggcctgtgattggtccattccaggaccttcatttgcataaggtatcaaaccacatcagcctctgattggccatgggccagacctgcactctggccaatgattggttcattccaggacattcatttgcataaggagtcaaaccacaccagtcttggattggctgtgagccaattcacctcagtctctaattggctgtgagtcagtctttcatttacatagggtgtaaccatcaagaaacctctacagggtacttaagccccagaagattttgctaccagggctcttgagccacttgctctagcccactcccaccctgtggaatgtactttcacttttgctgcttcactgccttgtgctccaataaatccactccttcaccacccattcatgcatgtcgc

SEQ ID NO: 195721 - DNA, 3069 bp, Artificial Sequence
  derived and/or modified sequence
atgtacttctgctggggcgccgacagcagagagctgcagagaagaagaaccgccggcagccccggcgccgagctgctgcaggccgccagcggcgagagacacagcctgctgctgctgaccaaccacagagtgctgagctgcggcgacaacagcagaggccagctgggcagaagaggcgcccagagaggcgagctgcccgagcccatccaggccctggagaccctgatcgtggacctggtgagctgcggcaaggagcacagcctggccgtgtgccacaagggcagagtgttcgcctggggcgccggcagcgagggccagctgggcatcggcgagttcaaggagatcagcttcacccccaagaagatcatgaccctgaacgacatcaagatcatccaggtgagctgcggccactaccacagcctggccctgagcaaggacagccaggtgttcagctggggcaagaacagccacggccagctgggcctgggcaaggagttccccagccaggccagcccccagagagtgagaagcctggagggcatccccctggcccaggtggccgccggcggcgcccacagcttcgccctgagcctgtgcggcaccagcttcggctggggcagcaacagcgccggccagctggccctgagcggcagaaacgtgcccgtgcagagcaacaagcccctgagcgtgggcgccctgaagaacctgggcgtggtgtacatcagctgcggcgacgcccacaccgccgtgctgacccaggacggcaaggtgttcaccttcggcgacaacagaagcggccagctgggctacagccccacccccgagaagagaggcccccagctggtggagagaatcgacggcctggtgagccagatcgactgcggcagctaccacaccctggcctacgtgcacaccaccggccaggtggtgagcttcggccacggccccagcgacaccagcaagcccacccaccccgaggccctgaccgagaacttcgacatcagctgcctgatcagcgccgaggacttcgtggacgtgcaggtgaagcacatcttcgccggcacctacgccaacttcgtgaccacccaccaggacaccagcagcaccagagcccccggcaagaccctgcccgagatcagcagaatcagccagagcatggccgagaagtggatcgccgtgaagagaagaagcaccgagcacgagatggccaagagcgagatcagaatgatcttcagcagccccgcctgcctgaccgccagcttcctgaagaagagaggcaccggcgagaccaccagcatcgacgtggacctggagatggccagagacaccttcaagaagctgaccaagaaggagtggatcagcagcatgatcaccacctgcctggaggacgacctgctgagagccctgccctgccacagcccccaccaggaggccctgagcgtgttcctgctgctgcccgagtgccccgtgatgcacgacagcaagaactggaagaacctggtggtgcccttcgccaaggccgtgtgcgagatgagcaagcagagcctgcaggtgctgaagaagtgctgggccttcctgcaggagagcagcctgaaccccctgatccagatgctgaaggccgccatcatcagccagctgctgcaccagaccaagaccgagcaggaccactgcaacgtgaaggccctgctgggcatgatgaaggagctgcacaaggtgaacaaggccaactgcagactgcccgagaacaccttcaacatcaacgagctgagcaacctgctgaacttctacatcgacagaggcagacagctgttcagagacaaccacctgatccccgccgagacccccagccccgtgatcttcagcgacttccccttcatcttcaacagcctgagcaagatcaagctgctgcaggccgacagccacatcaagatgcagatgagcgagaagaaggcctacatgctgatgcacgagaccatcctgcagaagaaggacgagttcccccccagccccagattcatcctgagagtgagaagaagcagactggtgaaggacgccctgagacagctgagccaggccgaggccaccgacttctgcaaggtgctggtggtggagttcatcaacgagatctgccccgagagcggcggcgtgagcagcgagttcttccactgcatgttcgaggagatgaccaagcccgagtacggcatgttcatgtaccccgagatgggcagctgcatgtggttccccgccaagcccaagcccgagaagaagagatacttcctgttcggcatgctgtgcggcctgagcctgttcaacctgaacgtggccaacctgcccttccccctggccctgtacaagaagctgctggaccagaagcccagcctggaggacctgaaggagctgagccccagactgggcaagagcctgcaggaggtgctggacgacgccgccgacgacatcggcgacgccctgtgcatcagattcagcatccactgggaccagaacgacgtggacctgatccccaacggcatcagcatccccgtggaccagaccaacaagagagactacgtgagcaagtacatcgactacatcttcaacgtgagcgtgaaggccgtgtacgaggagttccagagaggcttctacagagtgtgcgagaaggagatcctgagacacttctaccccgaggagctgatgaccgccatcatcggcaacaccgactacgactggaagcagttcgagcagaacagcaagtacgagcagggctaccagaagagccaccccaccatccagctgttctggaaggccttccacaagctgaccctggacgagaagaagaagttcctgttcttcctgaccggcagagacagactgcacgccagaggcatccagaagatggagatcgtgttcagatgccccgagaccttcagcgagagagaccaccccaccagcatcacctgccacaacatcctgagcctgcccaagtacagcaccatggagagaatggaggaggccctgcaggtggccatcaacaacaacagaggcttcgtgagccccatgctgacccagagctag

SEQ ID NO: 195722 - protein, 337 aa, Artificial Sequence
  derived and/or modified sequence
MEQPWPPPGPWSLPRAEGEAEEESDFDVFPSSPRCPQLPGGGAQMYSHGIELACQKQKEFVKSSVACKWNLAEAQQKLGSLALHNSESLDQEHAKAQTAVSELRQREEEWRQKEEALVQREKMCLWSTDAISKDVFNKSFINQDKRKDTEDEDKSESFMQKYEQKIRHFGMLSRWDDSQRFLSDHPYLVCEETAKYLILWCFHLEAEKKGALMEQIAHQAVVMQFIMEMAKNCNVDPRGCFRLFFQKAKAEEEGYFEAFKNELEAFKSRVRLYSQSQSFQPMTVQNHVPHSGVGSIGLLESLPQNPDYLQYSISTALCSLNSVVHKEDDEPKMMDTV

SEQ ID NO: 195723 - protein, 308 aa, Artificial Sequence
  derived and/or modified sequence
MEQPWPPPGPWSLPRAEGEAEEESDFDVFPSSPRCPQLPGGGAQMYSHGIELACQKQKEFVKSSVACKWNLAEAQQKLGSLALHNSESLDQEHAKAQTAVSELRQREEEWRQKEEALVQREKMCLWSTDAISKDVFNKSFINQDKRKDTEDEDKSESFMQKYEQKIRHFGMLSRWDDSQRFLSDHPYLVCEETAKYLILWCFHLEAEKKGALMEQIAHQAVVMQFIMEMAKNCNVDPRGCFRLFFQKAKAEEEGYFEAFKNELEAFKSRVRLYSQSQSFQPMTVQNHVPHSGVGSIGLLESLPQAPRF

SEQ ID NO: 195724 - DNA, 1014 bp, Artificial Sequence
  derived and/or modified sequence
atggagcagccctggcccccccccggcccctggagcctgcccagagccgagggcgaggccgaggaggagagcgacttcgacgtgttccccagcagccccagatgcccccagctgcccggcggcggcgcccagatgtacagccacggcatcgagctggcctgccagaagcagaaggagttcgtgaagagcagcgtggcctgcaagtggaacctggccgaggcccagcagaagctgggcagcctggccctgcacaacagcgagagcctggaccaggagcacgccaaggcccagaccgccgtgagcgagctgagacagagagaggaggagtggagacagaaggaggaggccctggtgcagagagagaagatgtgcctgtggagcaccgacgccatcagcaaggacgtgttcaacaagagcttcatcaaccaggacaagagaaaggacaccgaggacgaggacaagagcgagagcttcatgcagaagtacgagcagaagatcagacacttcggcatgctgagcagatgggacgacagccagagattcctgagcgaccacccctacctggtgtgcgaggagaccgccaagtacctgatcctgtggtgcttccacctggaggccgagaagaagggcgccctgatggagcagatcgcccaccaggccgtggtgatgcagttcatcatggagatggccaagaactgcaacgtggaccccagaggctgcttcagactgttcttccagaaggccaaggccgaggaggagggctacttcgaggccttcaagaacgagctggaggccttcaagagcagagtgagactgtacagccagagccagagcttccagcccatgaccgtgcagaaccacgtgccccacagcggcgtgggcagcatcggcctgctggagagcctgccccagaaccccgactacctgcagtacagcatcagcaccgccctgtgcagcctgaacagcgtggtgcacaaggaggacgacgagcccaagatgatggacaccgtgtag

SEQ ID NO: 195725 - DNA, 927 bp, Artificial Sequence
  derived and/or modified sequence
atggagcagccctggcccccccccggcccctggagcctgcccagagccgagggcgaggccgaggaggagagcgacttcgacgtgttccccagcagccccagatgcccccagctgcccggcggcggcgcccagatgtacagccacggcatcgagctggcctgccagaagcagaaggagttcgtgaagagcagcgtggcctgcaagtggaacctggccgaggcccagcagaagctgggcagcctggccctgcacaacagcgagagcctggaccaggagcacgccaaggcccagaccgccgtgagcgagctgagacagagagaggaggagtggagacagaaggaggaggccctggtgcagagagagaagatgtgcctgtggagcaccgacgccatcagcaaggacgtgttcaacaagagcttcatcaaccaggacaagagaaaggacaccgaggacgaggacaagagcgagagcttcatgcagaagtacgagcagaagatcagacacttcggcatgctgagcagatgggacgacagccagagattcctgagcgaccacccctacctggtgtgcgaggagaccgccaagtacctgatcctgtggtgcttccacctggaggccgagaagaagggcgccctgatggagcagatcgcccaccaggccgtggtgatgcagttcatcatggagatggccaagaactgcaacgtggaccccagaggctgcttcagactgttcttccagaaggccaaggccgaggaggagggctacttcgaggccttcaagaacgagctggaggccttcaagagcagagtgagactgtacagccagagccagagcttccagcccatgaccgtgcagaaccacgtgccccacagcggcgtgggcagcatcggcctgctggagagcctgccccaggcccccagattctag

SEQ ID NO: 195726 - DNA, 1014 bp, Artificial Sequence
  derived and/or modified sequence
atggagcagccctggccacctcctggtccttggagtctgccaagggcggagggtgaggcagaagaagaatcagactttgatgtgttcccctcatctccccggtgtccccagctgcccggcggcggcgcccaaatgtactcccacgggattgaactcgcttgtcagaaacaaaaagagtttgttaagagctccgtagcttgtaagtggaatctcgcagaggcccagcaaaagctggggagtttagctttgcataactctgagtctcttgaccaggagcatgctaaagcccagaccgctgtaagcgagctccgtcagcgagaagaagagtggaggcaaaaggaggaggcccttgtgcaaagggaaaaaatgtgcctctggtccacagatgctatttccaaggacgtttttaataaatcgttcatcaaccaggacaagaggaaggacactgaagacgaagacaagagtgaatcctttatgcaaaagtacgagcaaaaaattaggcattttggaatgctctcccggtgggatgactctcagaggtttctgtctgaccacccttatctcgtatgtgaagaaaccgctaaatatttaatattgtggtgtttccacttggaggcagagaaaaagggagcgctgatggagcagatcgcacaccaagccgttgtgatgcaatttataatggagatggcaaaaaactgcaacgtcgatccacgggggtgcttccgtctgttctttcagaaggcaaaggcggaggaagaaggctatttcgaggcctttaaaaacgaacttgaggctttcaagtcacgagtgaggctttacagccaatcccaatcctttcaaccgatgactgtgcagaatcacgtcccgcacagtggcgttgggagtatcgggctgttagagtctttgccccagaatcccgactacctccagtacagtattagcactgccctatgtagtctgaatagtgtagtgcataaggaggacgacgagccgaaaatgatggacaccgtgtag

SEQ ID NO: 195727 - DNA, 927 bp, Artificial Sequence
  derived and/or modified sequence
atggagcagccttggcccccaccaggtccttggagtctaccacgggccgaaggtgaggcagaagaagagtcggattttgatgtatttcctagctccccccggtgcccacagctgcccggcgggggggcccagatgtattcccacggaattgaactcgcatgccaaaaacagaaggaatttgtgaagtctagtgttgcatgcaagtggaatctagcagaggcccaacagaagctgggatccctcgctctccacaacagtgaatcacttgatcaggaacacgcaaaagcccaaactgcagtgtctgaacttcggcaacgggaagaggagtggcgccagaaagaggaggccctagtgcagagggagaaaatgtgcctgtggtctacggacgccatctccaaggacgtgtttaacaagagctttattaatcaggataaaagaaaggataccgaagatgaggataaatctgaatctttcatgcagaaatacgagcagaagatccgtcatttcggcatgcttagtcgttgggacgactcacagaggttcttaagcgatcatccctatttggtgtgcgaagagaccgccaagtacctgatcttgtggtgtttccacctggaggccgaaaaaaaaggggctctcatggaacagatcgcacatcaggccgttgtcatgcagttcataatggaaatggccaagaactgcaacgtggatccacggggttgtttcaggctcttcttccagaaggctaaagctgaggaggaagggtacttcgaagctttcaagaacgagctggaagctttcaaaagccgcgttaggttgtattcccagtctcagagcttccaacctatgaccgttcaaaatcatgtaccgcattcaggagtcggttccattggacttcttgaatctctgccccaggctcccagattttag

SEQ ID NO: 195728 - DNA, 1014 bp, Artificial Sequence
  derived and/or modified sequence
atggagcagccctggcccccacctggcccctggagcctgcccagggctgagggggaggccgaggaggagagtgactttgatgtgttccccagcagcccccgctgcccccagctgcccggcggcggggcccagatgtacagccacggcatcgagctggcctgccagaagcagaaggagtttgtgaagagctctgtggcctgcaagtggaacctggccgaggcccagcagaagctgggcagcctggccctgcacaacagcgagagcctggaccaggagcacgccaaggcccagacagctgtgtctgagctgcggcagcgggaggaggagtggaggcagaaggaggaggccctggtgcagcgggagaagatgtgcctgtggagcacagatgccatcagcaaggatgtgttcaacaagagcttcatcaaccaggacaagaggaaggacacagaagatgaggacaagtctgagagcttcatgcagaagtatgagcagaagatccgccacttcggcatgctgagccgctgggatgacagccagcgcttcctgagtgaccacccctacctggtgtgtgaggagacagccaagtacctgatcctgtggtgcttccacctggaggccgagaagaagggggccctgatggagcagatcgcccaccaggccgtggtgatgcagttcatcatggagatggccaagaactgcaatgtggacccccggggctgcttccgcctcttcttccagaaggccaaggccgaggaggagggctactttgaggccttcaagaatgagctggaggccttcaagagccgggtgcggctgtacagccagagccagagcttccagcccatgacagtgcagaaccacgtgccccacagcggcgtgggcagcatcggcctgctggagagcctgccccagaacccagactacctgcagtacagcatcagcacagccctgtgcagcctgaacagcgtggtgcacaaggaggatgatgagcccaagatgatggacacagtgtag

SEQ ID NO: 195729 - DNA, 927 bp, Artificial Sequence
  derived and/or modified sequence
atggagcagccctggcccccacctggcccctggagcctgcccagggctgagggggaggccgaggaggagagtgactttgatgtgttccccagcagcccccgctgcccccagctgcccggcggcggggcccagatgtacagccacggcatcgagctggcctgccagaagcagaaggagtttgtgaagagctctgtggcctgcaagtggaacctggccgaggcccagcagaagctgggcagcctggccctgcacaacagcgagagcctggaccaggagcacgccaaggcccagacagctgtgtctgagctgcggcagcgggaggaggagtggaggcagaaggaggaggccctggtgcagcgggagaagatgtgcctgtggagcacagatgccatcagcaaggatgtgttcaacaagagcttcatcaaccaggacaagaggaaggacacagaagatgaggacaagtctgagagcttcatgcagaagtatgagcagaagatccgccacttcggcatgctgagccgctgggatgacagccagcgcttcctgagtgaccacccctacctggtgtgtgaggagacagccaagtacctgatcctgtggtgcttccacctggaggccgagaagaagggggccctgatggagcagatcgcccaccaggccgtggtgatgcagttcatcatggagatggccaagaactgcaatgtggacccccggggctgcttccgcctcttcttccagaaggccaaggccgaggaggagggctactttgaggccttcaagaatgagctggaggccttcaagagccgggtgcggctgtacagccagagccagagcttccagcccatgacagtgcagaaccacgtgccccacagcggcgtgggcagcatcggcctgctggagagcctgccccaggccccccgcttctag

SEQ ID NO: 195730 - DNA, 3502 bp, Artificial Sequence
  derived and/or modified sequence
tttcttccgccgtccgccggtggcgaggcccaggctgtcgccgggtgtgcagcggcgtcgcggccagtagagggattctgggtaacggcccggacccccggctgggcttctggctcggcgcagcaggttccattcacgccaagtctgttggcagtggcagttgtagggccaagggcggttgtaggacccggagcagccggacatggaacaaccgtggccgcctccgggaccctggagcctccctcgggccgagggtgaggctgaggaagagagtgacttcgacgtgttccccagttctccccgctgcccgcagctgccaggcggcggcgcccagatgtatagccatggaattgaattggcttgccaaaagcagaaagagtttgtgaagagctctgtggcgtgcaaatggaatcttgctgaagctcaacagaaacttggtagcttagcactgcataattctgagtccttggatcaggagcatgccaaagcacaaacagcagtatcagaactgaggcaacgggaagaagagtggcgacagaaagaagaagctctagtacaaagagagaagatgtgtctgtggagcacggatgccattagcaaggatgtttttaataagagttttattaatcaagataaaagaaaagacacagaagatgaagataaatcagaatcatttatgcaaaaatatgagcaaaaaatcagacattttggtatgttgagtcgatgggatgatagccagagatttttgtctgaccatccataccttgtatgtgaagaaactgctaaatatcttattttatggtgttttcacctggaagctgagaagaaaggggctttaatggaacaaatagcacatcaagctgttgtaatgcagtttattatggaaatggccaaaaactgtaatgtggatccaagagggtgttttcgtttatttttccagaaagccaaagcagaggaagaaggttattttgaagcattcaaaaatgaacttgaagctttcaagtcaagagtaagactttattctcaatcacaaagttttcaacctatgacagttcagaatcatgttccccattctggtgttggatctataggtttattagaatccttaccacagaatccagattatcttcagtattctatcagtacagctctctgcagcttaaactcggtggtacataaagaagatgatgaacccaaaatgatggacactgtataatttggttaagactgctgaggccaagtgctattttgttacaagaaaggaagaacttggctattttcttgacacttttatgggtgctgcactttatttttgttcggtttttgatgggagggaaagagtactgaaatgttttgtaaattttttttaatgtgctgctaggttttttgttttgttttgttctgaagagaagagtggtaccatatgttgcaggaagtcaaactggactttttgtggctactaaatttgcttttaatcttattgttctcaattttggaatcaagtatgaaaatctgcacaaatgcaatgtttacaagaactggttgattctgggaggcatctgctacagtctctttttatatggatatgtacatgtcctattctacaaaaatgattaaagataaaaacatacttgtatcccactgctactttagctgtcaaatttggtgtttcatcacattaaaagcaataaatcagtagttggtaatgtactttactaaataagttggggggtacaatttttaaaagtcttaactcttaaatacttgactttcggcaccatcagttaaatccttgactataatacaaatttgatatatacattacatttaccctcaaattattctcaaaactatattccttagaatttgattttaccctgctgactttaagagttataataatatcaaatgtgatgagctaatatagattttctttttaaataagaataacttcaagctcactctttcttaacatagtctgggatctctcagggagtaagttttaaaagaatactaatggcttgtaagaacaaacaggaataataatctgatttttaaatttgtagttattttactcatgttgccttttaatttttgttattttggtttattttttgatgtagccttttaaaaaaggagtcttaaaaatgattttttttttaaaggcaagagaaatcttgtagtgctaactgccttgagctgccaattacctatttctgagaatttggtgactcttattggtaatgatggcatttacaacatttggcatttcccctttttcagctcagttaccatagaatacttccaagctttactacttcctctgtaagtcatttcagttatgccaggatatttgatgattttgtttatgtagaattaggtaacaaagccaattatgctatccttattattgaaggattaatcttatgacttaacataagctttggttatatttgggtgtagtctttggctaagtacccattaaggctagtagcaaacacttggaaggtggctaactgggactgggaatacgtgtctcaacttgagaaaccaaatagtgcgaagggactcagggtggccagacctgtgaccttggcctcatttgtatcttgttttcgctgaggtgatcagacacttagtaccctagaaatggactggaattattgaatcttcttctgtaacatcacaatcttcctggttttcagaataaacgtttttgtgcttttgatataaatatatactctataataaaatgtttgactaatttatatagtagtgtttgtcagcctgtactttttttttttttaaacccatgacctagtcgtagacatttttttctttttgttctgttctgaagcaagctcttatttttccctttctaccaaattgagagaatgggcagacacaggagccatattcctagtttcacagaaatgttacttgaattattattttcccttctttcccaggatttgcctgtaagcattcaaattgttttgaatttcattttgccttctctaagttagaggtatttaatgactgaagactggcaggagagaaagtatcaacaaactgagtaaactattcttgaggggcactgaaaagatgttctttgaaacttgatttatatatttttacttgcaaaagaatatactgtgttttgagtatgaaagtgtgattgggtctgttgtgggaaccactgactgatgccataatttgcacttaaaggctataaattacatagttagccgtactttagtactagaaacagtaaattgacatccttgaactaattcctaccttttttttgtttctgaagaaataaagagtatattaagcaaagggataatttatatttcaggttggacaatttaccctaaacaaattaaaccatggaaagtgcaaacacatgaatgaaacatttttttacatcaaagtatcatcaaagattcttgtttcatttgataaaattaatatttgaataaaaaaatttttaaatcaa

SEQ ID NO: 195731 - DNA, 1244 bp, Artificial Sequence
  derived and/or modified sequence
ccgactatttcttccgccgtccgccggtggcgaggcccaggctgtcgccgggtgtgcagcggcgtcgcggccagtagagggattctgggtaacggcccggacccccggctgggcttctggctcggcgcagcaggttccattcacgccaagtctgttggcagtggcagttgtagggccaagggcggttgtaggacccggagcagccggacatggaacaaccgtggccgcctccgggaccctggagcctccctcgggccgagggtgaggctgaggaagagagtgacttcgacgtgttccccagttctccccgctgcccgcagctgccaggcggcggcgcccagatgtatagccatggaattgaattggcttgccaaaagcagaaagagtttgtgaagagctctgtggcgtgcaaatggaatcttgctgaagctcaacagaaacttggtagcttagcactgcataattctgagtccttggatcaggagcatgccaaagcacaaacagcagtatcagaactgaggcaacgggaagaagagtggcgacagaaagaagaagctctagtacaaagagagaagatgtgtctgtggagcacggatgccattagcaaggatgtttttaataagagttttattaatcaagataaaagaaaagacacagaagatgaagataaatcagaatcatttatgcaaaaatatgagcaaaaaatcagacattttggtatgttgagtcgatgggatgatagccagagatttttgtctgaccatccataccttgtatgtgaagaaactgctaaatatcttattttatggtgttttcacctggaagctgagaagaaaggggctttaatggaacaaatagcacatcaagctgttgtaatgcagtttattatggaaatggccaaaaactgtaatgtggatccaagagggtgttttcgtttatttttccagaaagccaaagcagaggaagaaggttattttgaagcattcaaaaatgaacttgaagctttcaagtcaagagtaagactttattctcaatcacaaagttttcaacctatgacagttcagaatcatgttccccattctggtgttggatctataggtttattagaatccttaccacaggctccaagattttaagaccagctttagccagtttaatctgttgtctacattgtgagaaggaaagtcttattcaaaagacaatgtgaggagagtcctatatttagttttaaacctcataaagtg

SEQ ID NO: 195732 - DNA, 1014 bp, Artificial Sequence
  derived and/or modified sequence
atggagcagccctggcccccccccggcccctggagcctgccccgggcggagggcgaggcagaagaggaatctgattttgacgtcttcccaagtagccctcggtgcccacagctccctgggggaggtgcacagatgtattctcacggaatagaattagcttgccagaagcagaaggaattcgtaaaatccagtgtggcttgtaaatggaacttggcggaagcacagcaaaaacttggctccttagcgctgcataactccgaatctctcgatcaggagcatgctaaagcgcagactgctgtgagcgagcttcgccaacgggaggaggaatggcgccagaaggaagaggcactcgtccaaagagaaaaaatgtgcctatggtctaccgatgccatttccaaggatgtctttaacaaatctttcataaatcaagataaaaggaaagataccgaggacgaagataaatcggagagcttcatgcagaaatatgagcagaagatcaggcatttcggcatgctgtcaagatgggatgactcgcagaggtttctgtcagatcacccttatctggtctgtgaagaaacagctaaatacttgatcttatggtgtttccacctggaggcagagaagaaaggggccctgatggaacagattgctcaccaagccgtagtgatgcagttcataatggaaatggcgaagaattgcaacgtcgaccctcgggggtgctttaggttgttcttccagaaggcaaaggcagaagaggaggggtactttgaagcatttaagaatgaactggaagcgttcaagtcccgggtgcggctctacagtcagagccagtctttccagcccatgacggtgcagaaccacgtgccccatagcggagtgggctctatcggcctgctggaatccctgccacagaacccagattacctgcaatacagtataagtacagcgctgtgcagcctgaactccgtagtgcacaaggaagatgacgagcccaaaatgatggacaccgtgtag

SEQ ID NO: 195733 - DNA, 927 bp, Artificial Sequence
  derived and/or modified sequence
atggagcagccctggcccccccccggcccctggagcctgccccgggcagagggcgaggcagaggaggaatccgacttcgacgtcttccctagttcccctcgctgtccgcagttaccggggggaggcgcacagatgtacagccacgggatagaattggcctgtcaaaaacagaaagagttcgtgaaatcttcagtcgcctgtaaatggaatctggccgaagcccagcaaaaattaggctcactggctctgcacaactccgaatcgttagatcaggagcacgccaaggcccagacagctgtcagcgaactgcggcagcgtgaagaggagtggaggcagaaagaggaagccctggtgcagcgcgagaagatgtgtctttggagcactgatgctatctcgaaggatgtcttcaataaatccttcatcaatcaggacaaaaggaaagacactgaagatgaggataagtcagagtcgttcatgcagaagtatgaacagaagatccgccatttcggaatgctttctaggtgggatgattcccaacgattcctgtccgaccacccatacctcgtgtgcgaagagaccgccaagtacctgatactgtggtgtttccatcttgaggcagaaaaaaaaggtgctcttatggaacaaattgcccatcaagctgtggtgatgcagtttatcatggagatggctaagaactgtaacgtggatcccaggggctgctttcggctattcttccaaaaggccaaagcagaagaagagggatactttgaggcatttaagaacgagctggaagcctttaaatccagagtgcggctctattctcagagccaatccttccagcccatgacagtgcagaaccatgtacctcacagcggtgtgggcagcatcggcctgctagagagcctcccacaagccccaagattctag

SEQ ID NO: 195734 - DNA, 1014 bp, Artificial Sequence
  derived and/or modified sequence
atggaacaaccttggcctcctccaggtccatggagccttccacgcgctgagggagaagctgaggaggagagtgatttcgacgtgtttccctcaagcccacgctgtcctcagctgcctgggggaggggcacagatgtattcgcatggcatcgaactcgcgtgccagaagcagaaggagtttgtgaagtccagcgtcgcctgtaaatggaacctggccgaggctcagcagaagcttgggtccctcgctctgcataatagtgagtccctggaccaggagcacgctaaagctcaaactgccgtctcggagctgaggcagcgcgaggaggaatggaggcagaaggaagaggccctcgtgcaacgcgagaagatgtgtttatggtcaacagatgctatctccaaggacgtctttaataagtccttcatcaatcaggacaagagaaaggacaccgaggatgaagacaagtctgaatcatttatgcaaaaatacgagcaaaaaatacggcacttcggcatgttgtcacgctgggacgacagtcagcggttcctgtccgaccatccttatctcgtgtgtgaagagacagccaagtaccttattctgtggtgttttcatctggaggcggaaaaaaaaggcgcattgatggagcagatagcccatcaggctgtcgttatgcaattcatcatggagatggcaaagaattgtaacgtggatcctcgcggttgtttcaggctcttcttccagaaagcaaaggccgaagaggagggctattttgaggcttttaaaaacgaactggaagctttcaagagtagggtaaggctgtactcccaatctcaatcttttcagcccatgaccgtccagaaccacgtgccacactctggtgtgggctctattggcttgctagagagcctgccgcagaatcccgactatctacagtactctattagcactgcgctttgttcacttaattccgtggtgcacaaggaagacgacgaacccaaaatgatggataccgtctag

SEQ ID NO: 195735 - DNA, 927 bp, Artificial Sequence
  derived and/or modified sequence
atggaacagccatggcctcccccagggccttggtcgctcccaagggctgaaggcgaagcagaggaggagtccgatttcgacgtattcccttcatcccccaggtgtccccaactgccaggcggtggagctcaaatgtactcacatggaatagaacttgcttgccagaagcagaaggagttcgttaagagctccgtggcctgcaagtggaatctggctgaggcccagcaaaaactcggttctctggccctgcataattcggaaagcttggatcaggaacatgcaaaagcacagaccgctgtatctgagctgcgtcagcgggaagaagagtggcgccagaaggaggaagcccttgtgcagagggaaaagatgtgcctgtggagtacggatgccatttccaaggatgtgttcaacaaatcatttataaatcaggataaacgcaaggacaccgaggacgaggacaagtctgaaagcttcatgcagaagtacgagcagaaaatccgtcattttggaatgctgtcccggtgggacgacagccaacgctttctgtccgatcacccatatctggtatgcgaagaaactgccaaatacctcattctgtggtgcttccacctagaggccgaaaaaaagggtgccttgatggagcaaatagctcatcaggccgttgtgatgcagttcatcatggagatggctaaaaattgcaatgtcgatcctaggggctgcttcagactgttctttcagaaggccaaggcagaggaggaaggttactttgaagcattcaagaacgagctcgaagcttttaaatctcgtgtgcggctgtattcgcagagccaaagcttccagcccatgaccgtgcagaaccatgtcccacactctggagtcggcagcatcgggcttcttgagagtctgccgcaagctccccgattttag

SEQ ID NO: 195736 - protein, 132 aa, Artificial Sequence
  derived and/or modified sequence
MGPRVLQPPLLLLLLALLLAALPCGAEEASPLRPAQVTLSPPPAVTNGSQPGAPHNSTHTRPPGASGSALTRSFYVILGFCGLTALYFLIRAFRLKKPQRRRYGLLANTEDPTEMASLDSDEETVFESRNLR

SEQ ID NO: 195737 - DNA, 399 bp, Artificial Sequence
  derived and/or modified sequence
atggggccaagggtcctgcagcctccattactgctccttctgttggccctccttttagctgcactgccctgcggggcagaggaagcgtcaccattgaggcccgctcaggtgactctgagtccacccccagccgttactaacggctctcaaccaggggcaccccacaattcaacacacacccgccctcctggcgcttcaggttccgctctcacgaggtcgttttacgtgatcctgggcttctgtgggcttaccgccctttacttcctgattcgggcttttagactcaagaaaccccaacgtcgccgatacgggctgctggccaatacagaggatccaacagaaatggcaagcctggattcggatgaagagaccgtgtttgaatccagaaatctgcgctag

SEQ ID NO: 195738 - DNA, 961 bp, Artificial Sequence
  derived and/or modified sequence
cggggcccggcgtcaagctccgcctccgcgccccattggctggcatcacctccgcgcgcctgactgacagcgcgcataggggcggggcgccgccaccgcttccgccgggccatggggccgcgcgtgctgcagccgccgctgctgctgctcctgctggcgctgctgctggcggcgctgccgtgcggtgccgaagaggcctcgccgctgcgccccgcgcaggtcacgttgtcgccgccgccggccgtgacgaacgggagccagccgggcgcgccacacaacagcacgcacacgcgtccgccgggggcgtcgggctcggcgctgacgcgctccttctacgtgatcctgggcttctgcggcctgaccgcgctctacttcctgatccgggcgtttaggttgaagaagcctcagcggaggcgatacggcctcctcgccaacactgaggaccccacggagatggcctcgctggacagcgacgaggagacggtgtttgagtcccggaatctgagatgatgctgagccagggaggcggcccttccagcagccatgagggaaggacaggagatggggcccaccccagtgcccagcaaccccctgctccaccgctcattcccctgctggccccggggctggtctcacccagtgccaacccgagagctccttttggaacctgcacagcccgccgacctgttgccacctgcacccaccgctggaccatgcagcctcgcctcctggatgctgtcccagcctggccgagggtcccaggtgaagactggagggaccccaacagccaccgcccaggacgctgaggctcccttgcctgactgtgacttgtgcctctctcctgcccccgtggggacatggcagcccagagccaaggctgggtgggcaggtgacccaaggaacctttctgggaacaccttctcgccgggctgggaacaataaatgcagccatgtctctgca

SEQ ID NO: 195739 - DNA, 399 bp, Artificial Sequence
  derived and/or modified sequence
atgggcccacgagttcttcaacctcctctgcttctgctgctgctcgccctgttgctggcagctctgccttgtggcgcggaggaagcctctcctctgaggcctgctcaagtgactctttcaccccccccagccgtgactaatggaagtcagcccggagctccccataattctactcacacccggcctcctggcgcttctggatccgcattaacaaggtccttttacgtgatcctgggcttctgtggccttactgcattgtactttcttatccgggcttttagactgaagaaaccacagcgacgacgttacgggctactcgccaacactgaggacccaacagagatggcctcattagactccgacgaggagactgtgtttgaatcaaggaatctgcgctag

SEQ ID NO: 195740 - DNA, 399 bp, Artificial Sequence
  derived and/or modified sequence
atgggaccccgagtgctgcaaccccctttactgttgctgctgctagccctgctcttggctgcccttccttgcggtgccgaggaagcaagccctttgagaccagctcaagtgacattatcgcctccccccgccgtgaccaatggaagccaacccggcgccccccataacagtactcacaccaggccgccaggcgcctcaggatcggccctcacccgctcattttacgtgattctagggttttgtggcctaaccgccctgtattttttaattagagcttttcggctgaagaaaccccaaagaagaaggtacggactacttgccaacactgaagaccccaccgaaatggccagcctagattccgacgaagaaacagtgtttgagtctcgcaatctgcgttag

SEQ ID NO: 195741 - DNA, 399 bp, Artificial Sequence
  derived and/or modified sequence
atgggccccagagtgctgcagccccccctgctgctgctgctgctggccctgctgctggccgccctgccctgcggcgccgaggaggccagccccctgagacccgcccaggtgaccctgagccccccccccgccgtgaccaacggcagccagcccggcgccccccacaacagcacccacaccagaccccccggcgccagcggcagcgccctgaccagaagcttctacgtgatcctgggcttctgcggcctgaccgccctgtacttcctgatcagagccttcagactgaagaagccccagagaagaagatacggcctgctggccaacaccgaggaccccaccgagatggccagcctggacagcgacgaggagaccgtgttcgagagcagaaacctgagatag

SEQ ID NO: 195742 - DNA, 399 bp, Artificial Sequence
  derived and/or modified sequence
atgggtccccgcgtactgcagccccctcttctgctgttgctgttggcactgttgctggccgctcttccgtgtggcgcggaagaagcttcacccctccgccctgcacaggtgaccttgtccccgccacctgctgtaaccaacggctctcagccaggggccccacacaattccacacacactaggccacccggagccagcggtagtgcgcttacgcggtccttttacgttatcctgggattctgcggactaactgcgctctattttttaattagagcttttagactcaagaaaccgcagagaagaaggtacgggctactggccaatacagaagatcccacggagatggcttcactggacagtgatgaggagaccgtcttcgaaagccgaaatctgcgctag

SEQ ID NO: 195743 - DNA, 399 bp, Artificial Sequence
  derived and/or modified sequence
atgggcccccgggtgctgcagccccccctgctgctgctgctgctggccctgctgctggccgccctgccctgtggggctgaggaggccagccccctgcggcctgcccaggtgaccctgagccccccacctgctgtgaccaacggcagccagcccggggccccccacaacagcacccacacccggcccccaggggccagcggcagcgccctgaccaggagcttctacgtgatcctgggcttctgtggcctgacagccctgtacttcctgatccgggccttccggctgaagaagccccagaggagaagatatggcctgctggccaacacagaggaccccacagagatggccagcctggacagtgatgaggagaccgtgtttgagagcaggaacctgaggtag

SEQ ID NO: 195744 - DNA, 399 bp, Artificial Sequence
  derived and/or modified sequence
atgggcccccgggtgctgcagccccccctgctgctgctgctgctggccctgctcctggccgcactgccctgcggggcagaagaggcttctccgctgagacccgcccaggtgacactgtccccccctcccgcggtcacaaacggttcccagccgggtgctcctcataatagcacccatacacggccgcctggagcttctggcagcgctttgaccaggtccttttacgtgattctgggattttgcgggctgacagcgctttattttctgattcgagcctttagacttaagaagccacagaggagaagatacgggctgctcgccaatacagaagatcctacagagatggcaagcctcgatagcgacgaggagacggtattcgaaagtagaaatctgcggtag

SEQ ID NO: 195745 - DNA, 651 bp, Artificial Sequence
  derived and/or modified sequence
acccgctctccagcctgcgcctggggttggaggtgcccagcgcgccgcctcttaactcgggggtgacgctgcccgtttcccaggttgaagaagcctcagcggaggcgatacggcctcctcgccaacactgaggaccccacggagatggcctcgctggacagcgacgaggagacggtgtttgagtcccggaatctgagatgatgctgagccagggaggcggcccttccagcagccatgagggaaggacaggagatggggcccaccccagtgcccagcaaccccctgctccaccgctcattcccctgctggccccggggctggtctcacccagtgccaacccgagagctccttttggaacctgcacagcccgccgacctgttgccacctgcacccaccgctggaccatgcagcctcgcctcctggatgctgtcccagcctggccgagggtcccaggtgaagactggagggaccccaacagccaccgcccaggacgctgaggctcccttgcctgactgtgacttgtgcctctctcctgcccccgtggggacatggcagcccagagccaaggctgggtgggcaggtgacccaaggaacctttctgggaacaccttctcgccgggctgggaacaataaatgcagccatgtctctgc

SEQ ID NO: 195746 - RNA, 399 nt, Artificial Sequence
  derived and/or modified sequence
augggcccacgaguucuucaaccuccucugcuucugcugcugcucgcccuguugcuggcagcucugccuuguggcgcggaggaagccucuccucugaggccugcucaagugacucuuucaccccccccagccgugacuaauggaagucagcccggagcuccccauaauucuacucacacccggccuccuggcgcuucuggauccgcauuaacaagguccuuuuacgugauccugggcuucuguggccuuacugcauuguacuuucuuauccgggcuuuuagacugaagaaaccacagcgacgacguuacgggcuacucgccaacacugaggacccaacagagauggccucauuagacuccgacgaggagacuguguuugaaucaaggaaucugcgcuag

SEQ ID NO: 195747 - RNA, 399 nt, Artificial Sequence
  derived and/or modified sequence
augggaccccgagugcugcaacccccuuuacuguugcugcugcuagcccugcucuuggcugcccuuccuugcggugccgaggaagcaagcccuuugagaccagcucaagugacauuaucgccuccccccgccgugaccaauggaagccaacccggcgccccccauaacaguacucacaccaggccgccaggcgccucaggaucggcccucacccgcucauuuuacgugauucuaggguuuuguggccuaaccgcccuguauuuuuuaauuagagcuuuucggcugaagaaaccccaaagaagaagguacggacuacuugccaacacugaagaccccaccgaaauggccagccuagauuccgacgaagaaacaguguuugagucucgcaaucugcguuag

SEQ ID NO: 195748 - protein, 290 aa, Artificial Sequence
  derived and/or modified sequence
MANPKLLGMGLSEAEAIGADSARFEELLLQASKELQQAQTTRPESTQIQPQPGFCIKTNSSEGKVFINICHSPSIPPPADVTEEELLQMLEEDQAGFRIPMSLGEPHAELDAKGQGCTAYDVAVNSDFYRRMQNSDFLRELVITIAREGLEDKYNLQLNPEWRMMKNRPFMGSISQQNIRSEQRPRIQELGDLYTPAPGRAESGPEKPHLNLWLEAPDLLLAEVDLPKLDGALGLSLEIGENRLVMGGPQQLYHLDAYIPLQINSHESKAAFHRKRKQLMVAMPLLPVPS

SEQ ID NO: 195749 - DNA, 873 bp, Artificial Sequence
  derived and/or modified sequence
atggctaacccaaagctactgggcatggggctgtcagaagccgaggctattggggcggattctgctcgctttgaggagcttctccttcaggccagtaaggagttacagcaggcccagaccacacggcccgaatctacgcaaattcagccccagcctggcttttgcataaagaccaactccagcgaagggaaggtgtttattaacatctgccacagtcccagcatccctccacctgccgatgtgacggaggaggagctgctgcagatgctggaagaggatcaggccggtttcaggattcctatgtctttgggcgagccccatgcagagctggacgctaagggacaaggatgcaccgcatacgatgtggccgtgaactcagatttttataggagaatgcaaaactctgattttttacgggaactggttatcactattgcccgggaaggtcttgaagacaagtataatctgcagctgaaccctgagtggcgaatgatgaaaaatcgtccttttatgggcagcatcagccagcagaacatccggtctgagcagaggcccagaatccaagagttaggcgatttgtacaccccagctccagggcgcgccgagagtgggcccgaaaagccacaccttaatctctggctggaagccccggatctcctgctggccgaggttgacttgcctaaactggatggcgccctgggcttgtccctggagataggcgagaacagactcgtgatggggggacctcagcagctctaccacctggatgcttatatcccccttcagattaacagtcatgagagtaaggccgctttccaccggaagagaaagcagttgatggtggcgatgccactgctgcccgttccctcttag

SEQ ID NO: 195750 - DNA, 873 bp, Artificial Sequence
  derived and/or modified sequence
atggccaaccccaagctgctgggcatgggcctgtctgaggccgaggccatcggggctgacagcgccaggtttgaggagctgctgctgcaggccagcaaggagctgcagcaggcccagaccaccaggcctgagagcacccagatccagccccagcccggcttctgcatcaagaccaacagcagcgagggcaaggtgttcatcaacatctgccacagccccagcatccccccaccagcagatgtgacagaggaggagctgctgcagatgctggaggaggaccaggccggcttccgcatccccatgagcctgggggagccccacgccgagctggatgccaagggccagggctgcacagcctatgatgtggccgtgaacagcgacttctacagaaggatgcagaacagcgacttcctgcgggagctggtgatcaccatcgcccgggagggcctggaggacaagtacaacctgcagctgaaccctgagtggaggatgatgaagaaccggcccttcatgggcagcatcagccagcagaacatccgctctgagcagaggccccgcatccaggagctgggggacctgtacaccccagcccctggccgggcagagagcggccctgagaagccccacctgaacctgtggctggaggccccagacctgctgctggccgaggtggacctgcccaagctggatggagccctgggcctgagcctggagattggagaaaatcggctggtgatgggcggcccccagcagctgtaccacctggatgcctacatccccctgcagatcaacagccatgagagcaaggccgccttccacaggaagaggaagcagctgatggtggccatgcccctgctgcctgtgcccagctag

SEQ ID NO: 195751 - DNA, 873 bp, Artificial Sequence
  derived and/or modified sequence
atggccaaccccaagctgctgggcatgggcctgagcgaggccgaggcaatcggcgccgacagcgccaggttcgaggagctccttcttcaggcctctaaagagctgcagcaagctcagaccactcgaccagagtctactcagatacagccccagccggggttttgcattaagactaattcaagcgaaggcaaggttttcataaatatctgccactctcccagcatccccccacctgccgacgtcactgaggaggagctgctccagatgctcgaagaggaccaggctggcttccgcatcccgatgtcactgggggaaccccacgcagaattagatgcgaaggggcagggctgcacagcttacgatgtagcagtgaacagtgatttttatagacggatgcaaaattccgatttcctgagagagctcgtgatcactattgcgagagaaggactggaggataagtacaaccttcaactcaaccccgaatggaggatgatgaaaaacaggccgttcatgggatcaataagccagcaaaacatcagatctgagcagcgcccccgcatacaggaactgggcgatctctacacccctgcacccggtcgggcagaaagcgggccagagaagcctcatttaaacctgtggctggaggctccagatttgctgctggctgaggtagacctccccaagctggacggggcactgggactgagtcttgagattggcgagaatcgcctcgtaatgggcggcccacagcagctctaccacctcgatgcatatattcccctacagatcaactcacacgaatctaaagcggccttccaccgaaagaggaagcaattaatggtcgccatgcctctcctccctgtgcctagttag

SEQ ID NO: 195752 - DNA, 1246 bp, Artificial Sequence
  derived and/or modified sequence
atactccagtcctgtgtttaccgatagaccggaagtgtggcttcgtttacagttcggcacgtaggacggagggtagtgcgtctagagacacatattccccacggatttgacgatggtgttcggtcttgaatggaaatgtagtcttaggccagtcttaggtttttgaacaggatagtaggtatccggagtcgattgagggccagagcaggcactggggttcggatcctgggcaaagtttcccacgttgagggtctcgaggacgcctagatctctttcccagggccatggcgaacccgaagctgctgggaatggggctaagcgaggcggaggcgatcggtgctgattcggcgcgatttgaggagctgctgctgcaggcctcgaaggagctccagcaagcccagacaaccagaccagaatcgacacaaatccagcctcagcctggtttctgcataaagaccaactcctcggaagggaaggttttcatcaacatctgccactccccctctatccctcctcccgccgacgtgaccgaggaggagctgcttcagatgctagaggaggaccaagctgggtttcgcatccccatgagtctgggagagcctcatgcagaactggatgcaaaaggccagggatgtaccgcctacgacgtagctgtcaacagcgacttctaccggaggatgcagaacagcgatttcttgcgggagctcgtgatcaccatcgccagggagggccttgaggacaaatacaacttgcagctgaatccggaatggcgcatgatgaagaaccggccattcatgggctccatctcgcagcagaacatccgctcggagcagcgtcctcggatccaggagctgggggacctgtacacgcccgcccccgggagagctgagtcagggcctgaaaagcctcacctgaacctgtggctggaagcccccgacctcctcttggccgaagttgacctccccaaactggatggagccctggggctgtcgctggagatcggggagaaccgcctggtgatggggggcccccagcagctgtatcatctagacgcttatatcccgctgcagatcaactctcatgagagcaaggcagccttccaccggaagagaaagcaattaatggtggccatgccgcttctgccggtgccttcttgatcagggtgtctccttgtgcttctgagatgtggagaagaggctgctggcttccctaaaagttgaaataaaagatttttgcctttgttctg

SEQ ID NO: 195753 - DNA, 873 bp, Artificial Sequence
  derived and/or modified sequence
atggccaaccccaaacttcttggcatgggcctgtctgaggcggaagccatcggggctgacagtgcccgttttgaggagctactcctgcaagcttccaaggagctgcagcaggctcagaccacaaggccagaatccacgcagatccagccccagcctgggttctgcatcaaaactaactctagcgaggggaaggtgtttattaacatttgtcacagcccgagtatccccccacctgctgacgtcactgaagaggaactgctgcaaatgttagaggaagatcaagcaggattccgcatacctatgtccttgggcgaaccccacgccgagctggacgcaaaaggacagggatgcactgcttatgatgtggctgttaatagtgacttctatcgcagaatgcaaaatagtgactttctgcgagaactggtgataactatcgccagagaagggctggaggataagtacaacctgcagctgaaccctgagtggcgtatgatgaaaaaccgccctttcatgggatccattagccaacagaatattaggagcgagcagagaccgcgaatccaggagctgggtgacctgtataccccagcaccaggcagagctgagtccggccctgagaaaccacacctgaacttgtggctggaggcccctgacctgctgttagccgaagttgacttgccaaaactggacggcgctctaggtctgagcctggagatcggcgaaaatagactggtgatgggaggcccacaacagctctaccacctcgacgcatatattccccttcagatcaacagccacgaatccaaggcggctttccaccgcaaacgtaagcagctgatggtcgccatgccactgttgcctgtgccttcctag

SEQ ID NO: 195754 - DNA, 873 bp, Artificial Sequence
  derived and/or modified sequence
atggccaaccccaagctgctgggcatgggcctgagcgaggccgaggccatcggcgccgacagcgccagattcgaggagctgctgctgcaggccagcaaggagctgcagcaggcccagaccaccagacccgagagcacccagatccagccccagcccggcttctgcatcaagaccaacagcagcgagggcaaggtgttcatcaacatctgccacagccccagcatccccccccccgccgacgtgaccgaggaggagctgctgcagatgctggaggaggaccaggccggcttcagaatccccatgagcctgggcgagccccacgccgagctggacgccaagggccagggctgcaccgcctacgacgtggccgtgaacagcgacttctacagaagaatgcagaacagcgacttcctgagagagctggtgatcaccatcgccagagagggcctggaggacaagtacaacctgcagctgaaccccgagtggagaatgatgaagaacagacccttcatgggcagcatcagccagcagaacatcagaagcgagcagagacccagaatccaggagctgggcgacctgtacacccccgcccccggcagagccgagagcggccccgagaagccccacctgaacctgtggctggaggcccccgacctgctgctggccgaggtggacctgcccaagctggacggcgccctgggcctgagcctggagatcggcgagaacagactggtgatgggcggcccccagcagctgtaccacctggacgcctacatccccctgcagatcaacagccacgagagcaaggccgccttccacagaaagagaaagcagctgatggtggccatgcccctgctgcccgtgcccagctag

SEQ ID NO: 195755 - protein, 302 aa, Artificial Sequence
  derived and/or modified sequence
MSEDEEKVKLRRLEPAIQKFIKIVIPTDLERLRKHQINIEKYQRCRIWDKLHEEHINAGRTVQQLRSNIREIEKLCLKVRKDDLVLLKRMIDPVKEEASAATAEFLQLHLESVEELKKQFNDEETLLQPPLTRSMTVGGAFHTTEAEASSQSLTQIYALPEIPQDQNAAESWETLEADLIELSQLVTDFSLLVNSQQEKIDSIADHVNSAAVNVEEGTKNLGKAAKYKLAALPVAGALIGGMVGGPIGLLAGFKVAGIAAALGGGVLGFTGGKLIQRKKQKMMEKLTSSCPDLPSQTDKKCS

SEQ ID NO: 195756 - protein, 41 aa, Artificial Sequence
  derived and/or modified sequence
MSEDEEKVKLRRLEPAIQKFIKIVIPTDLERLRKHQINIEK

SEQ ID NO: 195757 - DNA, 909 bp, Artificial Sequence
  derived and/or modified sequence
atgagcgaggacgaggagaaggtgaagctgagaagactggagcccgccatccagaagttcatcaagatcgtgatccccaccgacctggagagactgagaaagcaccagatcaacatcgagaagtaccagagatgcagaatctgggacaagctgcacgaggagcacatcaacgccggcagaaccgtgcagcagctgagaagcaacatcagagagatcgagaagctgtgcctgaaggtgagaaaggacgacctggtgctgctgaagagaatgatcgaccccgtgaaggaggaggccagcgccgccaccgccgagttcctgcagctgcacctggagagcgtggaggagctgaagaagcagttcaacgacgaggagaccctgctgcagccccccctgaccagaagcatgaccgtgggcggcgccttccacaccaccgaggccgaggccagcagccagagcctgacccagatctacgccctgcccgagatcccccaggaccagaacgccgccgagagctgggagaccctggaggccgacctgatcgagctgagccagctggtgaccgacttcagcctgctggtgaacagccagcaggagaagatcgacagcatcgccgaccacgtgaacagcgccgccgtgaacgtggaggagggcaccaagaacctgggcaaggccgccaagtacaagctggccgccctgcccgtggccggcgccctgatcggcggcatggtgggcggccccatcggcctgctggccggcttcaaggtggccggcatcgccgccgccctgggcggcggcgtgctgggcttcaccggcggcaagctgatccagagaaagaagcagaagatgatggagaagctgaccagcagctgccccgacctgcccagccagaccgacaagaagtgcagctag

SEQ ID NO: 195758 - DNA, 126 bp, Artificial Sequence
  derived and/or modified sequence
atgagcgaggacgaggagaaggtgaagctgagaagactggagcccgccatccagaagttcatcaagatcgtgatccccaccgacctggagagactgagaaagcaccagatcaacatcgagaagtag

SEQ ID NO: 195759 - DNA, 909 bp, Artificial Sequence
  derived and/or modified sequence
atgagcgaggacgaggaaaaggtgaaactgagaagattggagcctgcgatccagaagtttattaaaatcgttattccgacagacctggagagattgcgaaagcaccagatcaatatcgagaaatatcagcgatgtaggatctgggataagctgcatgaagagcatattaatgccggacgtactgtacaacagcttcggagtaacatcagagagatcgaaaagctgtgtctcaaggtacgtaaagacgatttggtcctcctgaaaaggatgatagaccccgtcaaggaggaggctagtgccgccacggccgagttccttcagctacacctagagtctgtggaggaacttaaaaagcagttcaacgatgaagaaaccctcctgcagccgcctttaacacgatctatgaccgtaggtggcgcattccacaccacagaggctgaggcatcctctcagtctttgacacaaatatacgcactgcctgaaattcctcaggaccaaaacgccgccgaatcctgggaaaccctagaagcagacctgattgagctgtcacaactcgtcacagacttctctctgctcgtgaactcacagcaggagaagatcgactcgattgctgatcacgtcaatagcgcagccgtaaacgtggaggagggcacaaagaacctgggcaaggccgccaaatataagctcgccgcactgcctgtggctggtgctctgattggcggcatggtgggcgggcctatcgggcttctggctggctttaaagtggccggaattgcagctgcgctcggcggcggcgttcttggcttcacgggcggtaaactgatccagaggaagaaacagaaaatgatggagaaactgacatctagttgcccagatctgcccagccagacagataagaaatgctcatag

SEQ ID NO: 195760 - DNA, 909 bp, Artificial Sequence
  derived and/or modified sequence
atgagcgaggacgaggagaaagtgaagctgcgtaggttggagcctgccatccagaaattcattaagatcgtaatcccaaccgatctggagcggctgcgcaagcaccaaattaacatcgaaaagtatcagaggtgtcggatctgggacaaactccacgaggaacatattaacgccggccgcaccgtgcagcaactgagatcaaacatccgagagatcgaaaagctgtgtctaaaagtacgcaaagacgacctggttcttttgaagagaatgatcgatcccgtgaaagaagaagcatctgccgccactgccgagtttctccagcttcaccttgagtcagtagaagaactcaaaaagcaattcaatgacgaggaaaccctgctgcagccccctctcactaggagcatgacagtggggggggcattccatacaaccgaagctgaagccagctcccagtctctcacccaaatttatgccctacctgagatcccacaggaccagaacgccgcagaaagctgggaaacattagaagccgacttaatcgagctttctcaactggtcactgatttctctctcctcgtgaattcacagcaggaaaaaatcgactctatagccgatcatgttaacagcgccgcagtgaatgtagaggagggaactaaaaacctggggaaagcagcaaagtataaacttgcagctctccctgtggcaggggcgctgattggaggcatggtgggggggcccatcgggctcctggctggtttcaaggtggcgggcattgccgcagctcttggtggaggtgtattaggatttaccgggggcaagctgattcagcggaagaagcagaagatgatggagaagcttacttcatcctgccccgatctgccatctcagacggataagaagtgtagttag

SEQ ID NO: 195761 - DNA, 126 bp, Artificial Sequence
  derived and/or modified sequence
atgagtgaggacgaggagaaggtaaaactgcgaaggttggaaccagcgatacagaaattcatcaagattgttattccgacggacctggagcgactgcgcaagcaccagattaacattgaaaagtag

SEQ ID NO: 195762 - DNA, 126 bp, Artificial Sequence
  derived and/or modified sequence
atgtctgaagacgaggagaaggttaagcttagacggctcgagcccgcaatacagaaattcataaaaattgtgataccgaccgatttggaacgcctgcggaagcaccagatcaacattgagaagtag

SEQ ID NO: 195763 - DNA, 909 bp, Artificial Sequence
  derived and/or modified sequence
atgtcggaggacgaagagaaagtgaagctgaggcggctggagccggctattcagaagttcataaagatcgtgatccccactgatctggagcgattgagaaaacatcagattaatatcgaaaagtatcagcgttgccggatctgggataaattgcatgaagagcatatcaatgcaggacgaaccgtacagcagctcagaagcaatatacgcgaaatagagaagctctgcttaaaagtacgaaaggacgatcttgtcctgctgaaacgaatgatagacccggtcaaagaggaagcctccgcggccacagctgagtttcttcaactgcatttggaatccgtggaagaactgaagaagcagttcaacgatgaagaaactctgctgcaaccacctctgacccgaagtatgactgttgggggcgcctttcacactactgaagccgaagcctcttcccagagtctcactcagatttacgcactgccagagatcccgcaggatcaaaatgccgctgagtcttgggaaactcttgaggctgacctgatcgaacttagtcagctggttacagatttcagcctgctagtcaatagccagcaggagaaaattgactctattgctgatcacgtgaacagtgccgccgtcaatgtggaggagggcacaaaaaatctcgggaaggccgctaaatacaagctagccgcgctccccgtggctggcgcactcataggcgggatggtcggtggtcccatcgggctcctcgccggatttaaggtggcggggatcgcagctgcactaggcggcggcgtgctgggctttacaggtggcaagctcatccaaagaaaaaagcagaagatgatggagaagcttactagctcctgtcctgatctgccatctcagacagataaaaagtgctcttag

SEQ ID NO: 195764 - DNA, 909 bp, Artificial Sequence
  derived and/or modified sequence
atgtctgaagatgaggagaaggtgaagctgcggcggctggagcccgccatccagaagttcatcaagatcgtcatccccacagacctggagcggctgaggaagcaccagatcaacatcgagaagtaccagcgctgccgcatctgggacaagctgcacgaggagcacatcaatgccggccgcacagtgcagcagctgcggagcaacatccgggagattgagaagctgtgcctgaaggtgaggaaggatgacctggtgctgctgaagaggatgattgatcctgtgaaggaggaggccagcgctgccacagctgagttcctgcagctgcacctggagagcgtggaggagctgaagaagcagttcaatgatgaggagaccctgctgcagccccccctgaccaggtccatgacagtgggcggggccttccacaccacagaggccgaggccagcagccagagcctgacccagatctatgccctgcctgagatcccccaggaccagaatgctgctgagagctgggagaccctggaggccgacctgattgagctgagccagctggtgacagacttcagcctgctggtgaacagccagcaggagaagattgacagcattgctgaccacgtgaacagcgctgctgtgaatgtggaggagggcaccaagaacctgggcaaggccgccaagtacaagctggccgccctgcctgtggccggggccctgattggaggcatggtgggcggccccatcggcctgctggccggcttcaaggtggccggcattgctgctgccctgggcggcggcgtgctgggcttcaccggcggcaagctgatccagaggaagaagcagaagatgatggagaagctgaccagcagctgcccagacctgcccagccagacagacaagaagtgcagctag

SEQ ID NO: 195765 - DNA, 126 bp, Artificial Sequence
  derived and/or modified sequence
atgtctgaagatgaggagaaggtgaagctgcggcggctggagcccgccatccagaagttcatcaagatcgtcatccccacagacctggagcggctgaggaagcaccagatcaacatcgagaagtag

SEQ ID NO: 195766 - DNA, 909 bp, Artificial Sequence
  derived and/or modified sequence
atgagcgaggacgaggagaaggtgaagctgcggcggctggagcccgccatccagaagttcatcaagattgtgattccaaccgatctcgaaagacttcggaaacatcagattaatatcgagaagtatcagagatgtcggatctgggacaaactgcacgaagaacacattaatgccggtcgcacggtccagcagctgcgcagtaatattagagagattgagaagctgtgtctgaaggtccggaaagacgatctggtgttactgaaacggatgatcgacccagttaaggaggaggctagtgctgcaaccgcagaattcttgcaactgcaccttgagtcggttgaggagcttaaaaaacaatttaatgatgaggagacattgctgcagccccctctgacacgcagtatgactgtcggaggggcgttccatactacggaggccgaggcatcatcacagtctctcactcagatttatgcactgccagagatccctcaggatcaaaatgccgcagagtcttgggaaaccctcgaggccgatctgattgagctatcacagctggtgaccgatttttccttgctggtgaactcccagcaggagaagatcgatagtattgcagaccatgtcaatagcgccgctgtgaatgtcgaagaaggtaccaagaatctgggcaaagcggctaaatacaaattagccgcgctacccgtagcaggcgcgttaattggcggtatggtggggggccccatcgggctcctcgccggcttcaaggtggccggaatcgcagccgccttaggcggaggagtgcttgggtttactggtgggaaactcatacagcgcaagaagcaaaagatgatggagaagcttacaagcagttgtccagacctcccctctcagacagacaagaaatgttcttag

SEQ ID NO: 195767 - DNA, 909 bp, Artificial Sequence
  derived and/or modified sequence
atgagcgaggacgaggagaaggtgaagctgcggcggctggagcccgctatccagaaatttatcaaaattgtcattcctaccgatcttgagagactgcgcaagcaccagataaatattgaaaagtaccaacgatgtagaatctgggataaactgcacgaggagcacataaacgccggccgcactgtgcagcaattgcgtagcaatatccgagagatcgagaaactctgtctgaaggtgagaaaagatgacttggtgttgctgaaacgcatgatcgaccctgtgaaggaggaagcttccgctgctaccgccgaatttctgcagctgcatcttgagagtgttgaagagctcaaaaagcaatttaacgacgaagaaacactgttacagccccccctgacccgctccatgacggtgggcggcgctttccatacaaccgaggcggaagccagctcccagagcttgacccagatctatgcgctgcccgaaatacctcaagaccaaaatgcagccgagagttgggagactctcgaggccgatctgatcgagctgtctcagttggtaaccgattttagcctcctcgtcaatagccaacaggagaaaatcgactcaatcgccgaccacgtgaacagtgcagctgtcaatgtcgaggaaggcacaaaaaacctcgggaaggcggctaagtacaagctagcagccttgcccgtagctggagctctaatagggggaatggtaggcgggcctattgggttactggctggtttcaaggtggccggcattgcagctgccctgggagggggggtgttgggttttaccggggggaaactgatacaaaggaaaaaacaaaagatgatggagaaactgacctcaagctgtccagacctgcctagtcagaccgataaaaaatgctcatag

SEQ ID NO: 195768 - DNA, 126 bp, Artificial Sequence
  derived and/or modified sequence
atgagcgaggacgaggagaaggtgaagctgcggcggctggagcccgccattcagaaattcatcaagatcgtcatcccaaccgaccttgagaggctgagaaagcaccagatcaacatcgagaagtag

SEQ ID NO: 195769 - DNA, 126 bp, Artificial Sequence
  derived and/or modified sequence
atgagcgaggacgaggagaaggtgaagctgcggcggctggagcccgcaatccagaagttcattaagatagtgattcctaccgacttggagagactcaggaagcaccaaattaacattgaaaagtag

SEQ ID NO: 195770 - DNA, 909 bp, Artificial Sequence
  derived and/or modified sequence
atgagcgaggacgaggagaaggtgaagctgcggcggctggagcccgcaatccagaaattcatcaaaatcgtgatacccacagacttggaacggctgcgcaagcatcaaatcaatattgagaagtatcagcgttgccgcatctgggataagctgcacgaggagcatatcaatgccggacgcaccgtgcagcagttgagaagcaatatccgcgaaatcgaaaagctgtgtttaaaagtgcggaaggatgatttggtattgctgaaaagaatgattgacccagtcaaggaggaggcctccgcggcaactgccgagtttctccagctgcacctggagagtgtggaggaactgaagaagcagttcaacgacgaggagaccttgttacagccccctctcaccaggtcaatgacagtgggcggagcattccacacaactgaagcagaagcaagttcccagtctctgactcagatttatgccttacctgagatcccacaggatcagaatgcggcagaaagttgggaaacactcgaggcagatctcattgagctgagtcagttagtgacagacttttctctcctggtgaacagccaacaggagaagatcgatagcatagcggaccacgtgaatagtgctgctgtgaatgtggaagagggcactaagaacctcggaaaggctgctaaatacaagttagcagctctgcccgtggcaggtgcactaataggaggaatggttggggggccgattgggttgctggctggctttaaagtcgcaggtattgccgccgctctgggaggcggggtgctggggttcaccgggggcaaactgatccagcgcaaaaagcaaaagatgatggagaaactaacatcttcttgcccggacttaccttcccagacagacaagaaatgcagctag

SEQ ID NO: 195771 - DNA, 909 bp, Artificial Sequence
  derived and/or modified sequence
atgagcgaagatgaggaaaaagtgaagctgcgcagattggaaccagctatacagaaattcatcaaaatcgtaattcccaccgacctggaacgcctgagaaagcaccagatcaacatcgagaagtaccagcgatgtagaatttgggataaactgcatgaggaacacatcaatgccggacgtacggtgcagcagcttaggagcaatatccgagagattgaaaaactatgcctcaaggtgagaaaggacgacctcgtgttgctcaagaggatgattgatccagttaaagaggaagcatcagctgccaccgctgaatttctccaactccacctagaaagcgtagaggagttgaagaaacagttcaatgatgaggagactctgctgcagccacccctgacccggtctatgacagttggtggcgcatttcataccaccgaagccgaggcctcaagccagagcctcacccagatatatgccctccccgagatcccccaagatcagaacgctgccgaatcatgggagacgctcgaggcggatctcatcgaattgtcacaactcgtgacagactttagcctgcttgtcaactcccagcaggagaagatagatagcatcgctgaccacgtcaactccgccgcagtgaatgtggaagaaggaacaaaaaacctaggtaaggccgcaaagtacaagcttgccgcacttccagtggccggagcgctcatcggaggcatggtgggagggcctatcgggctgctggccggatttaaggtagccggtatagctgccgctctgggaggcggagtccttggatttaccgggggaaagttgatacagcgaaagaagcagaagatgatggaaaaactgacgtcatcgtgtccagatttgccgagccagaccgataagaagtgcagctag

SEQ ID NO: 195772 - DNA, 909 bp, Artificial Sequence
  derived and/or modified sequence
atgtctgaggacgaggagaaggttaagcttagaaggcttgagcccgcaattcagaagtttatcaagatcgtcattcctacagacctggaacggctaagaaagcatcagattaacattgaaaagtatcagaggtgccgcatctgggataagcttcacgaggaacacattaatgcagggaggaccgtgcagcagctccgcagcaacatccgcgagatcgaaaagctttgtttgaaagtgaggaaagatgatctcgtgctcctcaagcgtatgatcgaccctgttaaggaggaagcgtccgccgctactgctgaatttcttcagctgcaccttgagtcggttgaggagctgaagaagcagtttaacgacgaggagacgctgctgcagcctcctctaaccaggtctatgactgtgggcggtgcgttccacacaacagaggccgaagcgagctctcagagcttaacgcagatttacgctttgcccgaaattcctcaagaccagaatgcggctgagagttgggagaccttagaagctgacctaatcgaattatcacagctggtgaccgacttcagtctgttggtcaattcacagcaggaaaaaattgattcaatagcggaccatgtcaactccgcagccgtcaatgtggaagaaggtacgaagaatcttgggaaggccgcaaaatataagctcgccgctttaccagtggctggcgctcttattggcggaatggtcggaggaccaatcggacttctggccggatttaaggtcgctggaatagcagctgctctgggagggggtgtgctgggttttactgggggtaagctgatccaacgcaaaaagcagaaaatgatggagaagcttacttcaagttgcccagacctcccctcccagacagacaagaagtgctcttag

SEQ ID NO: 195773 - DNA, 126 bp, Artificial Sequence
  derived and/or modified sequence
atgagcgaagacgaagagaaggtgaaattgagaagattggaaccagctatccagaaattcattaaaatcgtgatcccgactgacctggagaggctgagaaaacaccagatcaatattgagaagtag

SEQ ID NO: 195774 - DNA, 126 bp, Artificial Sequence
  derived and/or modified sequence
atgtcagaagacgaagagaaagtcaaactgcggagactggaaccagccattcagaagttcatcaagatcgtgataccaacagacttggagcgcctgcgaaaacatcagatcaatattgaaaaatag

SEQ ID NO: 195775 - DNA, 909 bp, Artificial Sequence
  derived and/or modified sequence
atgtccgaggatgaggagaaagtcaaacttcgccgactcgaacctgctattcagaaatttataaagatagttatacccaccgatttagagcgtctgaggaagcaccaaattaacatagagaagtatcaaaggtgtagaatctgggacaagctgcacgaagaacacatcaatgctggtcgaaccgtgcagcaactacggtctaatatcagggagatcgaaaaactgtgtctgaaagtcaggaaggatgatctcgtgctgctaaaacgaatgattgatcctgtcaaggaagaagcctccgcggcaaccgccgaatttttgcagttacatctcgagtcggtcgaggagctgaaaaagcagttcaacgacgaagaaacacttttacagcctcccctcactcgcagcatgactgtgggtggagcattccacacgaccgaggctgaggctagctctcagagcttaactcagatatatgctctgcctgaaatcccccaggaccagaatgccgctgagagctgggagaccttggaggctgatctgatcgagttatctcagctggtgactgacttctcactccttgtgaattcccagcaggaaaagatagacagcattgcagatcacgttaactctgccgcagtgaatgttgaagagggcaccaagaatctcgggaaagcagcaaaatacaaacttgccgcactccctgttgcaggggcactaattgggggaatggtaggcggacctatcgggctcctggctggatttaaagtagcagggattgctgctgccctgggaggcggagtgctggggttcaccggcggaaagttgatacagcgtaagaagcagaagatgatggagaaactcacaagctcatgccctgacttgccttcccaaactgataagaagtgctcctag

SEQ ID NO: 195776 - DNA, 2708 bp, Artificial Sequence
  derived and/or modified sequence
ctcgtgatgccccgccccgtcgctcctgcgcctgcgccgtgcccaccgaccggcctcgagcgccccggcgggaggtttttctatatgagtggagaagacagctgttaccagggaggtcatacaacatttttttaggatgtctgaagatgaagaaaaagtgaaattacgccgtcttgaaccagctatccagaaattcattaagatagtaatcccaacagacctggaaaggttaagaaagcaccagataaatattgagaagtatcaaaggtgcagaatctgggacaagttgcatgaagagcatatcaatgcaggacgtacagttcagcaactccgatccaatatccgagaaattgagaaactttgtttgaaagtccgaaaggatgacctagtacttctgaagagaatgatagatcctgttaaagaagaagcatcagcagcaacagcagaatttctccaactccatttggaatctgtagaagaacttaagaagcaatttaatgatgaagaaactttgctacagcctcctttgaccagatccatgactgttggtggagcatttcatactactgaagctgaagctagttctcagagtttgactcagatatatgccttacctgaaattcctcaagatcaaaatgctgcagaatcgtgggaaaccttagaagcggacttaattgaacttagccaactggtcactgacttctctctcctagtgaattctcagcaggagaagattgacagcattgcagaccatgtcaacagtgctgctgtgaatgttgaagagggaaccaaaaacttagggaaggctgcaaaatacaagctggcagctctgcctgtggcaggtgcactcatcgggggaatggtagggggtcctattggcctccttgcaggcttcaaagtggcaggaattgcagctgcacttggtggtggggtgttgggcttcacaggtggaaaattgatacaaagaaagaaacagaaaatgatggagaagctcacttccagctgtccagatcttcccagccaaactgacaagaaatgcagttaaaaaccaaatttcagtattattggtgccaacatgtctatcctgaggacctttgctgctgttggacactccgtcaccttttggaacacaagtatatcaagatagtggctactgatgttcaagtgggattgaagtgtgataaatggatatattttgttgtttgctggggtgttcatggagatgttaagagattgaggccctgggctgagggtatataatgtatgtcaggtaaagtttgaagactgccaaggagcagattttctccctggaaatgtgaaaactgaacctataactctgataaggacttgagatgtgtagaaacgttgggttatggaagactagtttcttccataaccctgaattggagaccttaatgctaagtgtagattattgaggtttgttagtgaggaaaagaataagagttcagaagcctttgttatcagatagcgaaatcagggcctagtgaggagcacaggtcgactacataatggagtccattggcgaaccctattgcaatttggtccaactatatcttctggtgaaggaaattaatgatgtaagaaaatgcaagaggctcaacttctcttccaaaaatcttctggcttctgaactcttcctctgcctctctttaaataaataacacagaatttcaagtggtaggagacttattaagccagtcaccaagcttggtctgtcagcctgtcttctaacacctcaaagatcttgtgccctgtgctgtccctcccttgtaattatgaaaagttctttggtttctggggtgaattctacccatgtataatgaggaattctctcataaccttttttgtcttgtctgtcatctctgttcatcccttcctataacctctaggtaaaaagaaaagaaaaaaagaaatttcgagatattttcaacattgttagagtttgggctaaaatgagcaaggagaaaaaaaccaccaagaacatttcctggggcatgttccagttttgaggggtgatatatctgccagatagggggtatctgacccagtcttcttttcagctggtctctggggggagctgagaactcgcttgctacctcacatccttttccccagactttttatctcctatgcatccctttgctttctatagctggtgtttcttccccaaaatggcgttcccatgcttacctttctcacattctagacaatgatggacaaagacgcatgcaagactcagacccggggaatggtgtggtgctaatctcaacacctgacattcacagcaagcatggcccagcccaactgcatgtctatctcaaaccgcagaaaggctttaatactggaaaaaaagaattcaagactacaggcagctcccctctgtaccccaactcatttaaaataggaggaatcactttttgccttacttaacgcttttttctgagcacagggatgggcacctgcaccccagaaggtgtgagctgtctctctgccaggagctaaggttcattaggggattggatggtttatcacttctttctttctgagtttacttttagtaacttttattgatggctacctttcatgtccctgtctaaagagactttctctttcatacgtcttaaatctcatcaatgaaatccagtgaaacagcaccatttcttagtatcattaaataactagaaagt

SEQ ID NO: 195777 - DNA, 2523 bp, Artificial Sequence
  derived and/or modified sequence
aaggggctctctggaggccgcctttgggggcgtcgggccctcacaggcttggtgggcctggcgcccgtgtggcgcgcgcaagaggcgctgggcggcaagtagggcattggatccgaagtgcgagcgccatggtggctcctcctgtttttcagaagtggcggagcctcgcttggtttcgtttttggaagctttattggaagctggtatagggaggccgcagacgatgcgagcaggacggcctcccggggtcgcggggtggaaaagtttccggcgcgcgtcctgtctctggcgcgctgtaggccccgggtcgccagggtcgctggcgtctgggtcccgggacagacccgcgcatccgttcgctggtgggggcgtttggtgtgtgtggcccaggtgtgctgtgggtgacactgcgaggaatgacgcgacgctcgatggtagtgaggctcggaggactgggagcgagaggccggaagcccctgctcgccaaacccagaggtggttggcagaaggtcccacaccttggctccctccttttagctaaccgaggttcagagaggagactttactttgacttttctctccaaattcggtatctcttccataagtcagaaacattaagcggcgggccggaagaaatcgggcgccactagtatcctgaaaagtgggagctctgggccgatggaaggtttttctatatgagtggagaagacagctgttaccagggaggtcatacaacatttttttaggatgtctgaagatgaagaaaaagtgaaattacgccgtcttgaaccagctatccagaaattcattaagatagtaatcccaacagacctggaaaggttaagaaagcaccagataaatattgagaagtatcaaaggtgcagaatctgggacaagttgcatgaagagcatatcaatgcaggacgtacagttcagcaactccgatccaatatccgagaaattgagaaactttgtttgaaagtccgaaaggatgacctagtacttctgaagagaatgatagatcctgttaaagaagaagcatcagcagcaacagcagaatttctccaactccatttggaatctgtagaagaacttaagaagcaatttaatgatgaagaaactttgctacagcctcctttgaccagatccatgactgttggtggagcatttcatactactgaagctgaagctagttctcagagtttgactcagatatatgccttacctgaaattcctcaagatcaaaatgctgcagaatcgtgggaaaccttagaagcggacttaattgaacttagccaactggtcactgacttctctctcctagtgaattctcagcaggagaagattgacagcattgcagaccatgtcaacagtgctgctgtgaatgttgaagagggaaccaaaaacttagggaaggctgcaaaatacaagctggcagctctgcctgtggcaggtgcactcatcgggggaatggtagggggtcctattggcctccttgcaggcttcaaagtggcaggaattgcagctgcacttggtggtggggtgttgggcttcacaggtggaaaattgatacaaagaaagaaacagaaaatgatggagaagctcacttccagctgtccagatcttcccagccaaactgacaagaaatgcagttaaaaaccaaatttcagtattattggtgccaacatgtctatcctgaggacctttgctgctgttggacactccgtcaccttttggaacacaagtatatcaagatagtggctactgatgttcaagtgggattgaagtgtgataaatggatatattttgttgtttgctggggtgttcatggagatgttaagagattgaggccctgggctgagggtatataatgtatgtcaggtaaagtttgaagactgccaaggagcagattttctccctggaaatgtgaaaactgaacctataactctgataaggacttgagatgtgtagaaacgttgggttatggaagactagtttcttccataaccctgaattggagaccttaatgctaagtgtagattattgaggtttgttagtgaggaaaagaataagagttcagaagcctttgttatcagatagcgaaatcagggcctagtgaggagcacaggtcgactacataatggagtccattggcgaaccctattgcaatttggtccaactatatcttctggtgaaggaaattaatgatgtaagaaaatgcaagaggctcaacttctcttccaaaaatcttctggcttctgaactcttcctctgcctctctttaaataaataacacagaatttcaagtggtaggagacttattaagccagtcaccaagcttggtctgtcagcctgtcttctaacacctcaaagatcttgtgccctgtgctgtccctcccttgtaattatgaaaagttctttggtttctggggtgaattctacccatgtataatgaggaattctctcataaccttttttgtcttgtctgtcatctctgttcatcccttcctataacctctaggt

SEQ ID NO: 195778 - DNA, 542 bp, Artificial Sequence
  derived and/or modified sequence
cgggccctcacaggcttggtgggcctggcgcccgtgtggcgcgcgcaagaggcgctgggcggcaagtagggcattggatccgaagtgcgagcgccatggtggctcctcctgtttttcagaagtggcggagcctcgcttggtttcgtttttggaagctttattggaagctggtatagggaggccgcagacgatgcgagcaggacggcctcccggggtcgcggggtggaaaagtttccggcgcgcgtcctgtctctggcgcgctgtaggccccgggtcgccagggtcgctggcgtctgggtcccgggacagacccgcgcatccgttcgctggtgggggcgtttggtgtgtgtggcccaggtttttctatatgagtggagaagacagctgttaccagggaggtcatacaacatttttttaggatgtctgaagatgaagaaaaagtgaaattacgccgtcttgaaccagctatccagaaattcattaagatagtaatcccaacagacctggaaaggttaagaaagcaccagataaatattgagaag

SEQ ID NO: 195779 - DNA, 568 bp, Artificial Sequence
  derived and/or modified sequence
accgaccggcctcgagcgccccggcgggagagatgggattttggcatgttgcccaggctggccatgaactcctgggctcaagtggtcctcccgccttggcctcccaaagtgctggtattacagacatgagccaccgtacccggccccttcattcacaatttttcataaagattcagtggctccacaaagtctgtttttctatatgagtggagaagacagctgttaccagggaggtcatacaacatttttttaggatgtctgaagatgaagaaaaagtgaaattacgccgtcttgaaccagctatccagaaattcattaagatagtaatcccaacagacctggaaaggttaagaaagcaccagataaatattgagaagtatcaaaggtgcagaatctgggacaagttgcatgaagagcatatcaatgcaggacgtacagttcagcaactccgatccaatatccgagaaattgagaaactttgtttgaaagtccgaaaggatgacctagtacttctgaagagaatgatagatcctgttaaagaagaagcatcagcagcaacagcagaatt

SEQ ID NO: 195780 - DNA, 2424 bp, Artificial Sequence
  derived and/or modified sequence
gggctctctggaggccgcctttgggggcgtcgggccctcacaggcttggtgggcctggcgcccgtgtggcgcgcgcaagaggcgctgggcggcaagtagggcattggatccgaagtgcgagcgccatggtggctcctcctgtttttcagaagtggcggagcctcgcttggtttcgtttttggaagctttattggaagctggtatagggaggccgcagacgatgcgagcaggacggcctcccggggtcgcggggtggaaaagtttccggcgcgcgtcctgtctctggcgcgctgtaggccccgggtcgccagggtcgctggcgtctgggtcccgggacagacccgcgcatccgttcgctggtgggggcgtttggtgtgtgtggcccaggtgtgctgtgggtgacactgcgaggaatgacgcgacgctcgatggtagtgaggctcggaggactgggagcgagaggccggaagcccctgctcgccaaacccagaggtggttggcagaaggtcccacaccttggctccctccttttagctaaccgaggttcagagaggagactttactttgacttttctctccaaattcggtttttctatatgagtggagaagacagctgttaccagggaggtcatacaacatttttttaggatgtctgaagatgaagaaaaagtgaaattacgccgtcttgaaccagctatccagaaattcattaagatagtaatcccaacagacctggaaaggttaagaaagcaccagataaatattgagaagtatcaaaggtgcagaatctgggacaagttgcatgaagagcatatcaatgcaggacgtacagttcagcaactccgatccaatatccgagaaattgagaaactttgtttgaaagtccgaaaggatgacctagtacttctgaagagaatgatagatcctgttaaagaagaagcatcagcagcaacagcagaatttctccaactccatttggaatctgtagaagaacttaagaagcaatttaatgatgaagaaactttgctacagcctcctttgaccagatccatgactgttggtggagcatttcatactactgaagctgaagctagttctcagagtttgactcagatatatgccttacctgaaattcctcaagatcaaaatgctgcagaatcgtgggaaaccttagaagcggacttaattgaacttagccaactggtcactgacttctctctcctagtgaattctcagcaggagaagattgacagcattgcagaccatgtcaacagtgctgctgtgaatgttgaagagggaaccaaaaacttagggaaggctgcaaaatacaagctggcagctctgcctgtggcaggtgcactcatcgggggaatggtagggggtcctattggcctccttgcaggcttcaaagtggcaggaattgcagctgcacttggtggtggggtgttgggcttcacaggtggaaaattgatacaaagaaagaaacagaaaatgatggagaagctcacttccagctgtccagatcttcccagccaaactgacaagaaatgcagttaaaaaccaaatttcagtattattggtgccaacatgtctatcctgaggacctttgctgctgttggacactccgtcaccttttggaacacaagtatatcaagatagtggctactgatgttcaagtgggattgaagtgtgataaatggatatattttgttgtttgctggggtgttcatggagatgttaagagattgaggccctgggctgagggtatataatgtatgtcaggtaaagtttgaagactgccaaggagcagattttctccctggaaatgtgaaaactgaacctataactctgataaggacttgagatgtgtagaaacgttgggttatggaagactagtttcttccataaccctgaattggagaccttaatgctaagtgtagattattgaggtttgttagtgaggaaaagaataagagttcagaagcctttgttatcagatagcgaaatcagggcctagtgaggagcacaggtcgactacataatggagtccattggcgaaccctattgcaatttggtccaactatatcttctggtgaaggaaattaatgatgtaagaaaatgcaagaggctcaacttctcttccaaaaatcttctggcttctgaactcttcctctgcctctctttaaataaataacacagaatttcaagtggtaggagacttattaagccagtcaccaagcttggtctgtcagcctgtcttctaacacctcaaagatcttgtgccctgtgctgtccctcccttgtaattatgaaaagttctttggtttctggggtgaattctacccatgtataatgaggaattctctcataaccttttttgtcttgtctgtcatctctgttcatcccttcctataacctctaggt

SEQ ID NO: 195781 - protein, 922 aa, Artificial Sequence
  derived and/or modified sequence
MASPGHSDLGEVAPEIKASERRTAVAIADLEWREMEGDDCEFRYGDGTNEAQDNDFPTVERSRLQEMLSLLGLETYQVQKLSLQDSLQISFDSMKNWAPQVPKDLPWNFLRKLQALNADARNTTMVLDVLPDARPVEKESQMEEEIIYWDPADDLAADIYSFSELPTPDTPVNPLDLLCALLLSSDSFLQQEIALKMALCQFALPLVLPDSENHYHTFLLWAMRGIVRTWWSQPPRGMGSFREDSVVLSRAPAFAFVRMDVSSNSKSQLLNAVLSPGHRQWDCFWHRDLNLGTNAREISDGLVEISWFFPSGREDLDIFPEPVAFLNLRGDIGSHWLQFKLLTEISSAVFILTDNISKKEYKLLYSMKESTTKYYFILSPYRGKRNTNLRFLNKLIPVLKIDHSHVLVKVSSTDSDSFVKRIRAIVGNVLRAPCRRVSVEDMAHAARKLGLKVDEDCEECQKAKDRMERITRKIKDSDAYRRDELRLQGDPWRKAAQVEKEFCQLQWAVDPPEKHRAELRRRLLELRMQQNGHDPSSGVQEFISGISSPSLSEKQYFLRWMEWGLARVAQPRLRQPPETLLTLRPKHGGTTDVGEPLWPEPLGVEHFLREMGQFYEAESCLVEAGRLPAGQRRFAHFPGLASELLLTGLPLELIDGSTLSMPVRWVTGLLKELHVRLERRSRLVVLSTVGVPGTGKSTLLNTMFGLRFATGKSCGPRGAFMQLITVAEGFSQDLGCDHILVIDSGGLIGGALTSAGDRFELEASLATLLMGLSNVTVISLAETKDIPAAILHAFLRLEKTGHMPNYQFVYQNLHDVSVPGPRPRDKRQLLDPPGDLSRAAAQMEKQGDGFRALAGLAFCDPEKQHIWHIPGLWHGAPPMAAVSLAYSEAIFELKRCLLENIRNGLSNQNKNIQQLIELVRRL

SEQ ID NO: 195782 - DNA, 2769 bp, Artificial Sequence
  derived and/or modified sequence
atggccagccccggccacagcgacctgggcgaggtggcccccgagatcaaggccagcgagagaagaaccgccgtggccatcgccgacctggagtggagagagatggagggcgacgactgcgagttcagatacggcgacggcaccaacgaggcccaggacaacgacttccccaccgtggagagaagcagactgcaggagatgctgagcctgctgggcctggagacctaccaggtgcagaagctgagcctgcaggacagcctgcagatcagcttcgacagcatgaagaactgggccccccaggtgcccaaggacctgccctggaacttcctgagaaagctgcaggccctgaacgccgacgccagaaacaccaccatggtgctggacgtgctgcccgacgccagacccgtggagaaggagagccagatggaggaggagatcatctactgggaccccgccgacgacctggccgccgacatctacagcttcagcgagctgcccacccccgacacccccgtgaaccccctggacctgctgtgcgccctgctgctgagcagcgacagcttcctgcagcaggagatcgccctgaagatggccctgtgccagttcgccctgcccctggtgctgcccgacagcgagaaccactaccacaccttcctgctgtgggccatgagaggcatcgtgagaacctggtggagccagccccccagaggcatgggcagcttcagagaggacagcgtggtgctgagcagagcccccgccttcgccttcgtgagaatggacgtgagcagcaacagcaagagccagctgctgaacgccgtgctgagccccggccacagacagtgggactgcttctggcacagagacctgaacctgggcaccaacgccagagagatcagcgacggcctggtggagatcagctggttcttccccagcggcagagaggacctggacatcttccccgagcccgtggccttcctgaacctgagaggcgacatcggcagccactggctgcagttcaagctgctgaccgagatcagcagcgccgtgttcatcctgaccgacaacatcagcaagaaggagtacaagctgctgtacagcatgaaggagagcaccaccaagtactacttcatcctgagcccctacagaggcaagagaaacaccaacctgagattcctgaacaagctgatccccgtgctgaagatcgaccacagccacgtgctggtgaaggtgagcagcaccgacagcgacagcttcgtgaagagaatcagagccatcgtgggcaacgtgctgagagccccctgcagaagagtgagcgtggaggacatggcccacgccgccagaaagctgggcctgaaggtggacgaggactgcgaggagtgccagaaggccaaggacagaatggagagaatcaccagaaagatcaaggacagcgacgcctacagaagagacgagctgagactgcagggcgacccctggagaaaggccgcccaggtggagaaggagttctgccagctgcagtgggccgtggacccccccgagaagcacagagccgagctgagaagaagactgctggagctgagaatgcagcagaacggccacgaccccagcagcggcgtgcaggagttcatcagcggcatcagcagccccagcctgagcgagaagcagtacttcctgagatggatggagtggggcctggccagagtggcccagcccagactgagacagccccccgagaccctgctgaccctgagacccaagcacggcggcaccaccgacgtgggcgagcccctgtggcccgagcccctgggcgtggagcacttcctgagagagatgggccagttctacgaggccgagagctgcctggtggaggccggcagactgcccgccggccagagaagattcgcccacttccccggcctggccagcgagctgctgctgaccggcctgcccctggagctgatcgacggcagcaccctgagcatgcccgtgagatgggtgaccggcctgctgaaggagctgcacgtgagactggagagaagaagcagactggtggtgctgagcaccgtgggcgtgcccggcaccggcaagagcaccctgctgaacaccatgttcggcctgagattcgccaccggcaagagctgcggccccagaggcgccttcatgcagctgatcaccgtggccgagggcttcagccaggacctgggctgcgaccacatcctggtgatcgacagcggcggcctgatcggcggcgccctgaccagcgccggcgacagattcgagctggaggccagcctggccaccctgctgatgggcctgagcaacgtgaccgtgatcagcctggccgagaccaaggacatccccgccgccatcctgcacgccttcctgagactggagaagaccggccacatgcccaactaccagttcgtgtaccagaacctgcacgacgtgagcgtgcccggccccagacccagagacaagagacagctgctggacccccccggcgacctgagcagagccgccgcccagatggagaagcagggcgacggcttcagagccctggccggcctggccttctgcgaccccgagaagcagcacatctggcacatccccggcctgtggcacggcgccccccccatggccgccgtgagcctggcctacagcgaggccatcttcgagctgaagagatgcctgctggagaacatcagaaacggcctgagcaaccagaacaagaacatccagcagctgatcgagctggtgagaagactgtag

SEQ ID NO: 195783 - DNA, 2769 bp, Artificial Sequence
  derived and/or modified sequence
atggcttcccccggccattctgatcttggtgaggtcgctcccgagatcaaagcctctgaacggcggacagcagtcgctatcgcagatctggagtggagagaaatggaaggcgatgactgcgaattccggtatggtgacggcactaatgaagcgcaggataatgacttcccaacagtagagagatcccgtctgcaggaaatgctcagtttactgggcctcgaaacataccaggtgcagaaactgagcctgcaggactctctgcaaatatcctttgactctatgaagaactgggccccccaggtcccaaaagacttaccttggaatttcctgagaaagctacaggccctcaatgcagacgcccggaacaccaccatggtcctggacgtcctaccagatgccaggcccgtggaaaaggagagtcagatggaggaggaaatcatttattgggatcccgcggatgatttggccgccgacatctactccttcagtgagctcccaaccccggatacgcccgtgaatcctttggacctcttgtgcgcactgctcctctccagcgattccttcctgcaacaggaaattgccttaaagatggcactgtgtcagtttgcgttgcccttggtgctgccggattctgaaaatcactatcacaccttcctcttatgggcgatgcgcggcattgtcaggacatggtggagccagccacccagggggatgggctcattccgcgaggacagtgtggtgctgtctcgagccccggcatttgcttttgttcgcatggatgtgtcctcaaatagcaagtcacagctgctgaacgcggttctgtccccaggccaccggcagtgggattgtttttggcatcgagatctgaacctcggaacaaacgcacgggagatatccgatgggcttgtggaaatttcctggttctttccctctggccgggaggatttggatattttcccagagcccgtagcttttctgaacctccgcggcgatataggctctcattggctccagtttaaattgctgaccgagatatcgtccgctgtgttcattctgactgacaatattagtaagaaagagtataaactcctctattcaatgaaagagtcgacgaccaaatactacttcatcctgtctccttacagaggaaagcgtaacactaatcttaggtttctcaataagttaattccagtgctgaaaatcgatcacagtcatgtgctggtgaaagtgagcagcaccgacagcgacagtttcgttaaaaggattcgtgcaattgtggggaacgtactaagggcaccttgtcgcagggtgagtgtagaggatatggcgcacgctgctagaaaacttggcctcaaagtggacgaagactgtgaagagtgtcaaaaagcgaaagaccgtatggagcgcattacccggaaaatcaaggactcagatgcctacaggcgcgacgagctgcgattgcagggagatccatggcgaaaggccgcccaggtagagaaagaattttgccaactgcagtgggccgtcgacccacccgagaaacatcgcgccgagctgcgtcgaagactgctagagcttaggatgcagcagaatggtcacgacccatccagcggtgtgcaggagttcatctctggtataagttcaccatccctgtcggagaagcagtacttccttcgctggatggagtggggcctggcgagggtggcgcagccacgtttgaggcagccgccagaaacattactcacccttagacctaaacacggtggaacgaccgatgttggggagccactgtggcccgaacccctcggcgtcgagcacttcctgcgagagatgggacaattctacgaagccgaatcctgtttggtcgaagctggtcgcctgccagccggacagaggaggtttgcccactttcctggcctcgccagcgaactgcttttgacaggcctgccactcgagctcattgacggcagcacactgtccatgcccgtccgctgggtgaccggactcctcaaggaattacatgtgcggttggaacggagatcgcgcctcgtcgtgctttccaccgttggggttcctggaacgggcaaatctactcttcttaacactatgtttggcctgcgctttgctacgggaaaatcttgtggcccacgaggtgcattcatgcaactaatcactgtagccgagggcttttcccaggatctggggtgtgatcatattctcgtgatagactccggcggcctgatcgggggggctctgacctccgccggggatcgattcgaacttgaagctagcttggccacactccttatgggtttgtctaatgtgactgtcatttctcttgcagagactaaagatatccccgccgccattctccatgcgtttttgagactagagaaaactggtcacatgccgaactaccagttcgtgtaccagaatctacacgacgtgtctgtgccggggccacgaccacgcgacaagcgtcagctcctcgacccccccggtgatctatctagggctgctgcccagatggaaaagcagggggatgggtttcgagctttagctgggctagccttttgcgacccggagaagcagcacatctggcacattccaggcctgtggcacggcgcacctcctatggctgcagtgtccctggcctattccgaggccatttttgagctgaaacgctgtttgctcgaaaacatccgcaatgggctttctaaccaaaataaaaatatacagcagttgatcgagctcgttcgccgcctttag

SEQ ID NO: 195784 - DNA, 2769 bp, Artificial Sequence
  derived and/or modified sequence
atggccagccctggccacagcgacctgggggaggtggcccctgagatcaaggccagcgagaggagaacagctgtggccatcgctgacctggagtggagggagatggagggagatgactgtgagttccgctatggagatggcaccaatgaggcccaggacaatgacttccccaccgtggagaggagccggctgcaggagatgctgagcctgctgggcctggagacctaccaggtgcagaagctgagcctgcaggacagcctgcagatcagctttgacagcatgaagaactgggccccccaggtgcccaaggacctgccctggaacttcctgaggaagctgcaggccctgaatgctgatgccaggaacaccaccatggtgctggatgtgctgcctgatgcccggcctgtggagaaggagagccagatggaggaggagatcatctactgggaccctgcagatgacctggccgctgacatctacagcttcagcgagctgcccaccccagacacccctgtgaaccccctggacctgctgtgtgccctgctgctgagcagtgacagcttcctgcagcaggagatcgccctgaagatggccctgtgccagtttgccctgcccctggtgctgcctgattctgagaaccactaccacaccttcctgctgtgggccatgaggggcatcgtgaggacctggtggagccagcccccccggggcatgggcagcttcagagaagattctgtggtgctgagccgggccccagcctttgcctttgtgaggatggatgtgagcagcaacagcaagagccagctgctgaatgctgtgctgagccctggccaccggcagtgggactgcttctggcaccgggacctgaacctgggcaccaatgcccgggagatcagtgatggcctggtggagatctcctggttcttccccagcggccgggaggacctggacatcttccctgagcctgtggccttcctgaacctgcggggggacatcggcagccactggctgcagttcaagctgctgacagagatcagcagcgctgtgttcatcctgacagacaacatcagcaagaaggagtacaagctgctgtacagcatgaaggagagcaccaccaagtactacttcatcctgagcccctaccggggcaagaggaacaccaacctgcgcttcctgaacaagctgatccctgtgctgaagattgaccacagccacgtgctggtgaaggtgagcagcacagacagcgacagctttgtgaagaggatccgggccatcgtgggcaatgtgctgcgggccccctgcagaagagtgtctgtggaggacatggcccatgctgccaggaagctgggcctgaaggtggatgaggactgtgaggagtgccagaaggccaaggacaggatggagcgcatcaccaggaagatcaaggacagtgatgcctacagaagagatgagctgcggctgcagggcgacccctggaggaaggccgcccaggtggagaaggagttctgccagctgcagtgggccgtggaccccccagagaagcacagagctgagctgcggcggcggctgctggagctgaggatgcagcagaatggacatgaccccagcagtggagtgcaggagttcatcagcggcatcagcagccccagcctgtctgagaagcagtacttcctgcgctggatggagtggggcctggcccgggtggcccagccccggctgcggcagcccccagagaccctgctgaccctgcggcccaagcatggaggcaccacagatgtgggggagcccctgtggccagagcccctgggcgtggagcacttcctgcgggagatgggccagttctatgaagctgagagctgcctggtggaggccggccgcctgcctgctggccagaggagatttgcccacttccctggcctggccagcgagctgctgctgaccggcctgcccctggagctgattgatggcagcaccctgtccatgcctgtgcgctgggtgacaggcctgctgaaggagctgcacgtgcggctggagaggaggagccggctggtggtgctgagcacagtgggcgtgcccggcaccgggaagagcaccctgctgaacaccatgtttggcctgcgctttgccaccgggaagagctgtggccccaggggggccttcatgcagctgatcaccgtggccgagggcttcagccaggacctgggctgtgaccacatcctggtgattgacagcggcggcctcatcggcggggccctgaccagcgctggggacagatttgagctggaggccagcctggccaccctgctgatgggcctgagcaatgtgaccgtcatcagcctggccgagaccaaggacatcccagctgccatcctgcacgccttcctgcggctggagaagacaggccacatgcccaactaccagtttgtgtaccagaacctgcatgatgtgtctgtgcccggcccccggccccgggacaagaggcagctgctggaccccccaggggacctgagcagagctgctgcccagatggagaagcagggagatggcttccgggccctggccggcctggccttctgtgaccctgagaagcagcacatctggcacatccctggcctgtggcacggggccccacccatggctgctgtgtccctggcctacagcgaggccatctttgagctgaagcgctgcctgctggagaacatcagaaatggcctgagcaaccagaacaagaacatccagcagctgattgagctggtgcggcggctgtag

SEQ ID NO: 195785 - DNA, 2769 bp, Artificial Sequence
  derived and/or modified sequence
atggccagccccggccacagcgacctgggcgaggtggcccccgagatcaaagccagcgagcggaggacagctgtcgccattgcagacctcgaatggcgcgaaatggagggtgacgactgtgaatttaggtacggggatggaaccaacgaggcccaggataacgattttcctaccgtcgaacgctcacgcctgcaggagatgctaagcctcttgggcctggagacttatcaagtgcagaagctaagtcttcaggactccctgcagatctcgtttgatagcatgaagaactgggccccccaggtccccaaggatttaccctggaactttctcaggaagctacaagcactgaacgccgacgcgcgaaatacaacaatggtcctcgacgtgcttccggacgcacggccagtggaaaaggaatcccagatggaagaggagatcatttactgggatcctgctgacgacttggccgcggacatctacagttttagcgaacttccaacccccgatacccccgtcaaccccctcgacctactctgcgccctccttctctcttctgactcattcttgcagcaggagatcgctttgaagatggccttgtgccagttcgcccttcccctggttctccccgacagcgagaaccattatcacacgtttctcctctgggccatgcggggcattgttagaacttggtggtctcagccacccagggggatgggttctttcagggaagatagcgtggtgttatcacgtgcccccgccttcgcctttgtgaggatggacgtaagtagcaactcaaagagtcagctgctcaacgccgttctgtcccccggccacagacagtgggactgcttctggcaccgggacctgaacctgggcacaaatgcacgggaaatctcggacggactggtggaaatttcttggtttttcccgtcggggcgcgaagatttggacatcttccccgaaccagtggctttcctcaatctgaggggggacataggttctcactggctccaatttaagctcttaaccgagatatctagcgccgtgtttatccttacggataacatctccaagaaggagtataaactcttgtatagcatgaaggagagcactaccaagtactattttattctgagtccgtaccgtggaaagcgaaacaccaatctgcggtttctcaacaaacttatacctgtcctgaaaatcgaccactcccatgtcctggtcaaggtgagttccaccgatagcgattccttcgtgaagagaattagggctatagtgggtaacgtgctgcgcgccccatgccggagagtcagtgtggaagacatggcccacgccgcacggaaattgggactcaaagttgacgaagattgcgaggaatgtcagaaggcaaaggatcggatggagagaatcactaggaagatcaaagactctgatgcctacagacgcgatgagcttcgcctccagggtgacccttggagaaaagccgcgcaggtagaaaaagaattctgccagctgcagtgggccgttgacccaccagagaagcatcgagctgagctgagacggcggctgctggaactgagaatgcaacaaaacgggcacgaccccagttccggagtccaagagtttataagcggtatctctagtccctcattgtctgaaaagcagtattttttgaggtggatggaatggggtctggcacgcgtggcccaaccgcggttgcgacagcctcccgagacccttctcaccctgagaccaaagcacggcggcacaactgacgttggcgaaccattgtggccggagcctctgggcgtggagcatttcctacgagaaatggggcaattctatgaggctgaatcttgtttagtcgaagcgggtcgcctcccagctggtcagagaagattcgcccattttccgggactagcatctgagctcctgctgacgggactacccctggaactcattgacggttctacactcagtatgccagttagatgggtcaccggactcctaaaggagctgcatgtgagactcgagcgcaggagtcgcttagtcgtactgagcacagtgggagtgccgggcaccgggaaaagtaccctgttaaacacgatgtttggcctgagattcgccacagggaagtcctgtggccctagaggtgctttcatgcagctcattactgttgccgagggtttttctcaagatctgggttgtgatcacattctggttattgactctggaggcttgatcgggggtgccttaaccagtgccggggataggtttgagctagaggcctcgctggctacgctgcttatgggcctgtccaacgtgactgtcatcagtcttgccgagaccaaagatatcccagctgctattctccacgccttccttagactggagaagactggacacatgccgaactatcagttcgtttaccagaacttgcacgatgtgagcgttccaggacctcggccccgcgataagaggcagctgcttgacccccctggggacctttcacgggctgctgcgcagatggaaaaacaaggcgacgggtttagggcacttgccggtcttgccttttgtgacccagagaaacagcacatttggcatatcccaggcctgtggcacggcgccccacccatggcagctgtgtctctagcctactccgaggctatttttgagctcaagcgatgtctgctagaaaatatcagaaatggtctctctaaccaaaacaaaaacattcagcaactcattgaacttgtgcggcgtctgtag

SEQ ID NO: 195786 - DNA, 2769 bp, Artificial Sequence
  derived and/or modified sequence
atggcgtcaccaggacactccgatctcggtgaagtagcacctgaaattaaagcctccgagaggcgcaccgcagttgccatcgctgatctggagtggagagagatggaaggcgatgattgcgagtttaggtacggggatggcacgaacgaagcccaggacaacgatttcccgacagtcgagcgttcccgtcttcaggaaatgctgtccctgctcggactggagacctaccaagtgcagaaactctccctccaggacagtctccagatctcctttgattctatgaagaactgggccccacaggtgcccaaagacctgccttggaactttctgcggaagctgcaggccctgaatgccgacgcccgaaacactacaatggttctggacgtccttcctgatgccaggcctgtggaaaaggagtcccaaatggaagaggagatcatttattgggatcccgcagacgatctggcagctgacatctactctttctccgagcttcccacccccgatacccctgtgaaccccctagacctcctctgcgcactcctcctgtcctcagacagcttcctccagcaggaaatagcccttaaaatggcactttgtcagttcgccttgccactcgtgcttccagattccgagaatcactatcacacatttctgttatgggccatgcgcggtatagtaagaacttggtggagtcagccaccacggggtatgggaagcttccgtgaagattctgtggtgctcagcagagcaccagcattcgcgttcgtccgcatggatgtcagctccaattccaaaagtcagctcttaaatgctgttctaagtcccggacacaggcaatgggattgtttctggcatcgagacttaaatctggggaccaacgcccgtgaaatcagtgacggcctggttgagatttcgtggtttttcccatcgggcagagaagatcttgacattttccccgaacccgtagccttccttaatctgcgaggggacatcggttctcattggctccagtttaagctgctcaccgaaatctcctccgccgtttttatactgacagacaatatcagtaagaaggaatataagcttttatacagtatgaaggaaagtacgaccaagtattatttcatcttgagtccgtaccgcggaaaaagaaatactaacttgaggtttctgaataagcttattcccgtgctaaagattgatcactcccacgtccttgtgaaggtgtcctctaccgactccgatagctttgtgaagcgcatccgtgccattgtggggaacgtgctgcgcgctccatgccgtagggtctcagttgaagacatggctcatgccgctcgaaagttaggacttaaggtggacgaggactgtgaagagtgtcagaaggccaaagacaggatggaacgcattacccgaaaaattaaggatagcgacgcctatcggagggatgagttacgcctgcagggggacccgtggaggaaggccgcacaagtggagaaagagttctgtcagctccagtgggccgtcgatccccctgaaaagcatcgcgctgaattgaggcgacgacttctggagctcaggatgcagcagaacggccatgatccctcaagtggtgtacaggagttcattagcggtatcagctctccctccctttcggagaagcagtactttctgaggtggatggagtggggcctggctagggtggctcaacctagactgcggcagcctcccgagaccctcctgactctcaggcctaagcacggtggcacaacggatgtcggagaaccgctctggccggagcccctaggagtggaacactttctacgcgaaatggggcagttttacgaagcggagtcctgcctagttgaggccggacgactcccagccggacaaagacggttcgctcactttccaggtctggcttctgagctgctgctgaccggcctgcccctcgagttaatcgatgggagcactcttagtatgccagttcggtgggtcacggggctcttaaaggaactccacgtacgactggagagaagatcacgtctcgtggtgcttagtaccgtgggggtgccaggtacggggaagtctaccctgctgaacacgatgtttggattaaggttcgccactggtaagtcttgcggtcctcggggtgcctttatgcagctgattaccgtcgctgaagggttttcacaagacctagggtgtgaccacatccttgtcatcgattcaggtggactgatcggcggtgcattgaccagcgccggtgaccgttttgagctggaggccagtcttgcaacccttctgatgggcctttccaacgtgaccgtcattagtctggctgagacaaaagatatccccgctgcgatcttgcacgctttccttcggctcgagaaaacaggacatatgccgaattaccagtttgtttaccagaatcttcacgacgtgtccgttccaggtcccagaccaagagataagcggcagttgctcgacccaccaggcgacctgtcacgggcagctgcacagatggaaaagcaaggtgatgggtttcgagcactggccggtcttgcgttctgcgatcctgagaagcagcacatttggcacattccgggactgtggcatggtgcaccaccaatggccgcagtgtcactggcatactctgaggctatttttgaactcaagcgttgtttacttgagaacatccgaaacggcctgtcgaaccagaacaagaatatccagcagcttatcgaactcgtgaggagactgtag

SEQ ID NO: 195787 - DNA, 3805 bp, Artificial Sequence
  derived and/or modified sequence
gtcgccgcgtgccgagcgtcctggcgcggccgaggggaagcagcggggctgcccgggttacgctggccacccgcacctggtcctgtggcttcgaccactagtcagcaaggccccggagaggccagcgaagaggaggggctcgttggctttacggagacgcgcggagcaccctcaaggtgccacacgctcgcctgctccctgttcctacatcctgggcgtcttcccaggctgtcatataactcctgagaatagtggttcttaactctgtaagtatatatacttgtttcaggcattcagatttgggagaagtagccccagaaataaaagcatcagagagacgaacagctgtggccattgcagatttggaatggagagaaatggaaggagatgattgcgagttccgttatggagatggtacaaatgaggctcaggacaatgattttccaacagtggagagaagcaggcttcaagaaatgctgtcacttttgggcctagagacgtaccaggtccagaaactcagcctccaggactctctgcagatcagttttgacagtatgaagaactgggcccctcaggttcccaaagacttgccctggaatttcctcaggaagttgcaggccctcaatgctgatgccaggaataccactatggtgctggacgtgctcccagacgccaggcctgtggagaaggagagccagatggaagaggagatcatctactgggacccagctgatgaccttgctgccgacatttattccttttctgagctgcccacccctgatacgccagtgaaccccttagaccttctctgtgccctgctgctctcctcagacagtttcctgcaacaagaaatagcgttgaaaatggccctctgccagtttgcactcccactcgtgttgcctgactcggagaaccactaccatacatttctgctgtgggccatgcggggcattgtgaggacatggtggtcccagcccccaaggggcatggggagcttccgggaagacagcgtggtcttgtccagggcgcccgccttcgccttcgtgcgcatggacgtcagtagcaactccaagtcccagcttctcaacgccgtcctcagcccgggccacaggcagtgggactgcttctggcatcgggacctcaacttgggcaccaatgcccgggagatttcggatgggttggtagaaatttcctggttttttcccagcggaagggaggacttggacattttcccagaacctgtggcctttctgaacctgagaggtgacatcgggtctcactggctgcagtttaagctcttgacagaaatctcctccgctgtgtttatattgactgacaatatcagtaagaaggaatacaaattgctgtactccatgaaggagtcaaccacaaaatactacttcatcctgagtccctaccgtgggaagcgcaacacaaacctgagatttctgaataagttaattcctgtgctgaaaatagaccactcacatgtcctggtaaaggtcagcagcactgacagcgacagcttcgtgaagaggatccgggccatcgttgggaatgtgctgcgggcaccctgcaggcgggtatctgtggaggacatggcgcacgcagcccgcaaactgggcctaaaggtcgacgaggactgtgaggagtgtcagaaagcgaaagaccggatggagaggattaccaggaaaatcaaagactcggatgcctacagaagggacgagctgaggctgcagggggacccctggagaaaggcagcccaagtggagaaggagttctgccagctccagtgggccgtggacccccctgagaagcacagggctgagctgaggcggcggctgctagaacttcgaatgcagcagaacggccatgatccctcctcgggggtgcaggagttcatctcggggatcagcagcccctccttgagtgagaagcagtacttcctgaggtggatggagtggggcctggcacgggtggcccagccgcgactgagacagcctccggagacgcttctcaccctgagaccaaagcatgggggcaccacagacgtgggggagccgctctggcctgagcccctaggggtggaacacttcttgcgggagatgggacagttttatgaggctgagagctgtcttgtggaggcagggaggctgccggcaggccagaggcgttttgcccacttcccaggcttggcctcggagctgctgctgacagggctgcctctggagctaatcgatgggagcacgctgagcatgcccgtccgctgggtcacagggctcctgaaggagctgcacgtccgactggagagacggtcaaggctggtggttctgtcaaccgtcggggtgccaggcacgggcaagtccacactcctcaacaccatgtttgggctgcggtttgccacagggaagagctgcggtcctcgaggggccttcatgcagctcatcacagtggctgagggcttcagccaggacctgggctgtgaccacatcctggtgatagactccgggggcttgataggtggggccttgacgtcagctggggacagatttgagctggaggcttccttggccactctgctcatgggactgagcaatgtcaccgtgatcagtctagctgaaaccaaggacattccagcagctattctgcatgcatttctgaggttagaaaaaacggggcacatgcccaactaccagtttgtataccagaaccttcatgatgtatctgttcccggccctaggcccagagacaagagacagctcctggatccacctggtgacctgagcagggctgcagcccagatggagaaacagggcgacggcttccgggcactggcaggcctggccttctgcgaccctgagaagcagcacatctggcacatcccaggcctgtggcacggagcacctcccatggccgcagtgagcttggcctacagtgaagccatatttgaattgaagagatgcctactcgaaaacatcaggaacggcttgtcgaaccaaaacaaaaacatccagcagctcattgagctggtgagacggctgtgagtgtgcagagaaacccagttcaggtgtaggaggctgctgtgggcagccctgtctgatggggcacccgtgtggggctgtgctctggtgcctgagaatggctggtgcccaatcgacatgagaagacgaggaaaagacagggtttggagtctcctcaacagtgttaaaagaggaagtgacctcacagaccagctcagagatgttaccaagaatatcacagcccccagggtagggagacaagcagcagtttgttctgtctcagctcctgtcaaggatcctgcggggtgggccctctgtatagctgctctctgtcactggcccctggagtgggagcagcgtccttagtcactgcaggcccaggcgggcaggtggtcccaggacagaggtggggaagttgtcctgaggaagcagaagtaggccttgctcccgcccaacccaagggcctccagtggaccagcattcaagatgtgagtgcccgtggtgtgcaaggcactcccatggcaccgtatttattgactgatctgtgaaggcttccctgacccctgcccaggaagagttcactggtcgctctgttgtgccccacagcactttgttatacctctgccacacacttcacgcagcgcgttgtaactcatgtgtttacatgtctgtccccccagactgtgagctccttgagggcagggactgtacattctccagctctgtgtccccagggcctggcacattgtagacgcttaataaatgtctgttaaatgaatgagtgc

SEQ ID NO: 195788 - DNA, 5658 bp, Artificial Sequence
  derived and/or modified sequence
ataattttcaaacatatgacaggaaagcatttttatgatactttcttgtattttacatgtgtcttatttttggaatcagaaaaacatatatggtgatattagtaattttcaaaaactgcactgcagagagctcccttgcccctgagtagggccgttggaagtgctgttctctgccgtcttggtccgactccgcctgatacacagacaggaaacttagcaaggcttagaagtgggctggagcccgagttgacagattggctggtgttataatttttaaaattactggctatagggtacagtggctcattattttttgttgagatgaggttttgccatgttgcccaggctagtcttgaactcctgggctcaagtgatccccttgctttggcctcccagatgctggaattacaggcatgagtcactgcaccctgctctaaaatgatactattctgactgcagcatccccctccacatttcatgttctgatgtgagcaagagagccttctctttctgcccatgtatttattatccatgtggactcactaattgctggttttcaatggttttaaatcagttactgtgtttatgtttgtgctcacattgtcctagatttgaccagtgagagttcctcaggctggctcctgtgcccatcatgttttcgagcatttccttactttctgaaataagatgctcaggctcctcctgttctttccttgccccagccatcattcaggatctccaaggagtccgtttcttttagcgtggaaggtattaaagggtgctaggcatgcccattgccacaacagtgtctttgcttcttggccctttccgtggacagttaggaaatagatgcatgtgtacactcgtatacacacagagatatgtgtgcacacctacatctacacacttaaacacatatgcacataagcatgcatatagaaatcacagttcacacgagtgcctccagttccattgcgcctctgcaagttctgctgtaactctccattctatgtttgtatgtcctttcttcagcagttagttagcaccctggctcctggcagaatcaatacatttactcatttgctcactctatgatacatctaaaatagtttagtctttttttttttttttttgagatggagttttgttcttgtcacccaggctggagtgcagtggtgcgatctcggctcactgcaactctgcctcctgtgttcaagtgattctcctgccttagcctccgaagtagctgggattacaggcgcctgccaccacgcctggctaatttttatatttttagtagagacagggtttcaccatgttggccaggccagtctcgaactcctgacctcaagtaatccgcccgcctcagccttccaaagtgctggaattgcaggcgtgagccaccacaccaggcctaaaatagtttattcttaattagactgcacttatcatagctatttaaaataattcaggatcaccccttccagaccacagtgttaacttcagatgaacatccttctagagttctgtatatatacctatagataaacatacacaattttattaaattgtaatcatactgtgcatacttttctgtagcctgactttcccccgactaattaatataacagctttccctaatatctcatccagcatctttttgtccacaaaagaaatccatagcgtattttttaatggctgcagaatttgaccataattccgttattgcactttgattttaaaaggcatcagtttttcgctattatatataaagctggcatcaacatctttgtaactaaatcttaattatttccttaggatagaagtggaattactgggcaaagggtatgtatatttttctgtctttctgaatgactgtatttgtgctctggccagcagttttggagagtgctggttttctagaccagtgtttctcaactgtgggtgcatatcagaatcattgagggcacttttaaaagcagtgatacccaggaccagctcccagagattctggtttcatggatctggggtgtgacccagggtttatagtttttaaaagctctccaagagattttatatgcggccagtttgataggtgaaagtggtattccatttttttaattataattttcttctgaaattgtttcaggcattcagatttgggagaagtagccccagaaataaaagcatcagagagacgaacagctgtggccattgcagatttggaatggagagaaatggaaggagatgattgcgagttccgttatggagatggtacaaatgaggctcaggacaatgattttccaacagtggagagaagcaggcttcaagaaatgctgtcacttttgggcctagagacgtaccaggtccagaaactcagcctccaggactctctgcagatcagttttgacagtatgaagaactgggcccctcaggttcccaaagacttgccctggaatttcctcaggaagttgcaggccctcaatgctgatgccaggaataccactatggtgctggacgtgctcccagacgccaggcctgtggagaaggagagccagatggaagaggagatcatctactgggacccagctgatgaccttgctgccgacatttattccttttctgagctgcccacccctgatacgccagtgaaccccttagaccttctctgtgccctgctgctctcctcagacagtttcctgcaacaagaaatagcgttgaaaatggccctctgccagtttgcactcccactcgtgttgcctgactcggagaaccactaccatacatttctgctgtgggccatgcggggcattgtgaggacatggtggtcccagcccccaaggggcatggggagcttccgggaagacagcgtggtcttgtccagggcgcccgccttcgccttcgtgcgcatggacgtcagtagcaactccaagtcccagcttctcaacgccgtcctcagcccgggccacaggcagtgggactgcttctggcatcgggacctcaacttgggcaccaatgcccgggagatttcggatgggttggtagaaatttcctggttttttcccagcggaagggaggacttggacattttcccagaacctgtggcctttctgaacctgagaggtgacatcgggtctcactggctgcagtttaagctcttgacagaaatctcctccgctgtgtttatattgactgacaatatcagtaagaaggaatacaaattgctgtactccatgaaggagtcaaccacaaaatactacttcatcctgagtccctaccgtgggaagcgcaacacaaacctgagatttctgaataagttaattcctgtgctgaaaatagaccactcacatgtcctggtaaaggtcagcagcactgacagcgacagcttcgtgaagaggatccgggccatcgttgggaatgtgctgcgggcaccctgcaggcgggtatctgtggaggacatggcgcacgcagcccgcaaactgggcctaaaggtcgacgaggactgtgaggagtgtcagaaagcgaaagaccggatggagaggattaccaggaaaatcaaagactcggatgcctacagaagggacgagctgaggctgcagggggacccctggagaaaggcagcccaagtggagaaggagttctgccagctccagtgggccgtggacccccctgagaagcacagggctgagctgaggcggcggctgctagaacttcgaatgcagcagaacggccatgatccctcctcgggggtgcaggagttcatctcggggatcagcagcccctccttgagtgagaagcagtacttcctgaggtggatggagtggggcctggcacgggtggcccagccgcgactgagacagcctccggagacgcttctcaccctgagaccaaagcatgggggcaccacagacgtgggggagccgctctggcctgagcccctaggggtggaacacttcttgcgggagatgggacagttttatgaggctgagagctgtcttgtggaggcagggaggctgccggcaggccagaggcgttttgcccacttcccaggcttggcctcggagctgctgctgacagggctgcctctggagctaatcgatgggagcacgctgagcatgcccgtccgctgggtcacagggctcctgaaggagctgcacgtccgactggagagacggtcaaggctggtggttctgtcaaccgtcggggtgccaggcacgggcaagtccacactcctcaacaccatgtttgggctgcggtttgccacagggaagagctgcggtcctcgaggggccttcatgcagctcatcacagtggctgagggcttcagccaggacctgggctgtgaccacatcctggtgatagactccgggggcttgataggtggggccttgacgtcagctggggacagatttgagctggaggcttccttggccactctgctcatgggactgagcaatgtcaccgtgatcagtctagctgaaaccaaggacattccagcagctattctgcatgcatttctgaggttagaaaaaacggggcacatgcccaactaccagtttgtataccagaaccttcatgatgtatctgttcccggccctaggcccagagacaagagacagctcctggatccacctggtgacctgagcagggctgcagcccagatggagaaacagggcgacggcttccgggcactggcaggcctggccttctgcgaccctgagaagcagcacatctggcacatcccaggcctgtggcacggagcacctcccatggccgcagtgagcttggcctacagtgaagccatatttgaattgaagagatgcctactcgaaaacatcaggaacggcttgtcgaaccaaaacaaaaacatccagcagctcattgagctggtgagacggctgtgagtgtgcagagaaacccagttcaggtgtaggaggctgctgtgggcagccctgtctgatggggcacccgtgtggggctgtgctctggtgcctgagaatggctggtgcccaatcgacatgagaagacgaggaaaagacagggtttggagtctcctcaacagtgttaaaagaggaagtgacctcacagaccagctcagagatgttaccaagaatatcacagcccccagggtagggagacaagcagcagtttgttctgtctcagctcctgtcaaggatcctgcggggtgggccctctgtatagctgctctctgtcactggcccctggagtgggagcagcgtccttagtcactgcaggcccaggcgggcaggtggtcccaggacagaggtggggaagttgtcctgaggaagcagaagtaggccttgctcccgcccaacccaagggcctccagtggaccagcattcaagatgtgagtgcccgtggtgtgcaaggcactcccatggcaccgtatttattgactgatctgtgaaggcttccctgacccctgcccaggaagagttcactggtcgctctgttgtgccccacagcactttgttatacctctgccacacacttcacgcagcgcgttgtaactcatgtgtttacatgtctgtccccccagactgtgagctccttgagggcagggactgtacattctccagctctgtgtccccagggcctggcacattgtagacgcttaataaatgtctgttaaatgaa

SEQ ID NO: 195789 - DNA, 3563 bp, Artificial Sequence
  derived and/or modified sequence
aggaagcgaaggaggcgggagcggagacctcgctgcgctcatggcgtcgcccgggcattcagatttgggagaagtagccccagaaataaaagcatcagagagacgaacagctgtggccattgcagatttggaatggagagaaatggaaggagatgattgcgagttccgttatggagatggtacaaatgaggctcaggacaatgattttccaacagtggagagaagcaggcttcaagaaatgctgtcacttttgggcctagagacgtaccaggtccagaaactcagcctccaggactctctgcagatcagttttgacagtatgaagaactgggcccctcaggttcccaaagacttgccctggaatttcctcaggaagttgcaggccctcaatgctgatgccaggaataccactatggtgctggacgtgctcccagacgccaggcctgtggagaaggagagccagatggaagaggagatcatctactgggacccagctgatgaccttgctgccgacatttattccttttctgagctgcccacccctgatacgccagtgaaccccttagaccttctctgtgccctgctgctctcctcagacagtttcctgcaacaagaaatagcgttgaaaatggccctctgccagtttgcactcccactcgtgttgcctgactcggagaaccactaccatacatttctgctgtgggccatgcggggcattgtgaggacatggtggtcccagcccccaaggggcatggggagcttccgggaagacagcgtggtcttgtccagggcgcccgccttcgccttcgtgcgcatggacgtcagtagcaactccaagtcccagcttctcaacgccgtcctcagcccgggccacaggcagtgggactgcttctggcatcgggacctcaacttgggcaccaatgcccgggagatttcggatgggttggtagaaatttcctggttttttcccagcggaagggaggacttggacattttcccagaacctgtggcctttctgaacctgagaggtgacatcgggtctcactggctgcagtttaagctcttgacagaaatctcctccgctgtgtttatattgactgacaatatcagtaagaaggaatacaaattgctgtactccatgaaggagtcaaccacaaaatactacttcatcctgagtccctaccgtgggaagcgcaacacaaacctgagatttctgaataagttaattcctgtgctgaaaatagaccactcacatgtcctggtaaaggtcagcagcactgacagcgacagcttcgtgaagaggatccgggccatcgttgggaatgtgctgcgggcaccctgcaggcgggtatctgtggaggacatggcgcacgcagcccgcaaactgggcctaaaggtcgacgaggactgtgaggagtgtcagaaagcgaaagaccggatggagaggattaccaggaaaatcaaagactcggatgcctacagaagggacgagctgaggctgcagggggacccctggagaaaggcagcccaagtggagaaggagttctgccagctccagtgggccgtggacccccctgagaagcacagggctgagctgaggcggcggctgctagaacttcgaatgcagcagaacggccatgatccctcctcgggggtgcaggagttcatctcggggatcagcagcccctccttgagtgagaagcagtacttcctgaggtggatggagtggggcctggcacgggtggcccagccgcgactgagacagcctccggagacgcttctcaccctgagaccaaagcatgggggcaccacagacgtgggggagccgctctggcctgagcccctaggggtggaacacttcttgcgggagatgggacagttttatgaggctgagagctgtcttgtggaggcagggaggctgccggcaggccagaggcgttttgcccacttcccaggcttggcctcggagctgctgctgacagggctgcctctggagctaatcgatgggagcacgctgagcatgcccgtccgctgggtcacagggctcctgaaggagctgcacgtccgactggagagacggtcaaggctggtggttctgtcaaccgtcggggtgccaggcacgggcaagtccacactcctcaacaccatgtttgggctgcggtttgccacagggaagagctgcggtcctcgaggggccttcatgcagctcatcacagtggctgagggcttcagccaggacctgggctgtgaccacatcctggtgatagactccgggggcttgataggtggggccttgacgtcagctggggacagatttgagctggaggcttccttggccactctgctcatgggactgagcaatgtcaccgtgatcagtctagctgaaaccaaggacattccagcagctattctgcatgcatttctgaggttagaaaaaacggggcacatgcccaactaccagtttgtataccagaaccttcatgatgtatctgttcccggccctaggcccagagacaagagacagctcctggatccacctggtgacctgagcagggctgcagcccagatggagaaacagggcgacggcttccgggcactggcaggcctggccttctgcgaccctgagaagcagcacatctggcacatcccaggcctgtggcacggagcacctcccatggccgcagtgagcttggcctacagtgaagccatatttgaattgaagagatgcctactcgaaaacatcaggaacggcttgtcgaaccaaaacaaaaacatccagcagctcattgagctggtgagacggctgtgagtgtgcagagaaacccagttcaggtgtaggaggctgctgtgggcagccctgtctgatggggcacccgtgtggggctgtgctctggtgcctgagaatggctggtgcccaatcgacatgagaagacgaggaaaagacagggtttggagtctcctcaacagtgttaaaagaggaagtgacctcacagaccagctcagagatgttaccaagaatatcacagcccccagggtagggagacaagcagcagtttgttctgtctcagctcctgtcaaggatcctgcggggtgggccctctgtatagctgctctctgtcactggcccctggagtgggagcagcgtccttagtcactgcaggcccaggcgggcaggtggtcccaggacagaggtggggaagttgtcctgaggaagcagaagtaggccttgctcccgcccaacccaagggcctccagtggaccagcattcaagatgtgagtgcccgtggtgtgcaaggcactcccatggcaccgtatttattgactgatctgtgaaggcttccctgacccctgcccaggaagagttcactggtcgctctgttgtgccccacagcactttgttatacctctgccacacacttcacgcagcgcgttgtaactcatgtgtttacatgtctgtccccccagactgtgagctccttgagggcagggactgtacattctccagctctgtgtccccagggcctggcacattgtagacgcttaataaatgtctgttaaatgaa

SEQ ID NO: 195790 - DNA, 591 bp, Artificial Sequence
  derived and/or modified sequence
acgctggccacccgcacctggtcctgtggcttcgaccactagtcagcaaggccccggagaggccagcgaagaggaggggctcgttggctttacggagacgcgcggagcaccctcaaggtgccacacgctcgcctgctccctgttcctacatcctgggcgtcttcccaggctgtcatataactcctgagaatagtggttcttaactctatttggaatggagagaaatggaaggagatgattgcgagttccgttatggagatggtacaaatgaggctcaggacaatgattttccaacagtggagagaagcaggcttcaagaaatgctgtcacttttgggcctagagacgtaccaggtccagaaactcagcctccaggactctctgcagatcagttttgacagtatgaagaactgggcccctcaggttcccaaagacttgccctggaatttcctcaggaagttgcaggccctcaatgctgatgccaggaataccactatggtgctggacgtgctcccagacgccaggcctgtggagaaggagagccagatggaagaggagatcatctactgggacccagctgatgaccttgctg

SEQ ID NO: 195791 - protein, 608 aa, Artificial Sequence
  derived and/or modified sequence
MAESIIIRVQSPDGVKRITATKRETAATFLKKVAKEFGFQNNGFSVYINRNKTGEITASSNKSLNLLKIKHGDLLFLFPSSLAGPSSEMETSVPPGFKVFGAPNVVEDEIDQYLSKQDGKIYRSRDPQLCRHGPLGKCVHCVPLEPFDEDYLNHLEPPVKHMSFHAYIRKLTGGADKGKFVALENISCKIKSGCEGHLPWPNGICTKCQPSAITLNRQKYRHVDNIMFENHTVADRFLDFWRKTGNQHFGYLYGRYTEHKDIPLGIRAEVAAIYEPPQIGTQNSLELLEDPKAEVVDEIAAKLGLRKVGWIFTDLVSEDTRKGTVRYSRNKDTYFLSSEECITAGDFQNKHPNMCRLSPDGHFGSKFVTAVATGGPDNQVHFEGYQVSNQCMALVRDECLLPCKDAPELGYAKESSSEQYVPDVFYKDVDKFGNEITQLARPLPVEYLIIDITTTFPKDPVYTFSISQNPFPIENRDVLGETQDFHSLATYLSQNTSSVFLDTISDFHLLLFLVTNEVMPLQDSISLLLEAVRTRNEELAQTWKRSEQWATIEQLCSTVGGQLPGLHEYGAVGGSTHTATAAMWACQHCTFMNQPGTGHCEMCSLPRT

SEQ ID NO: 195792 - DNA, 1827 bp, Artificial Sequence
  derived and/or modified sequence
atggccgagagcatcatcatcagagtgcagagccccgacggcgtgaagagaatcaccgccaccaagagagagaccgccgccaccttcctgaagaaggtggccaaggagttcggcttccagaacaacggcttcagcgtgtacatcaacagaaacaagaccggcgagatcaccgccagcagcaacaagagcctgaacctgctgaagatcaagcacggcgacctgctgttcctgttccccagcagcctggccggccccagcagcgagatggagaccagcgtgccccccggcttcaaggtgttcggcgcccccaacgtggtggaggacgagatcgaccagtacctgagcaagcaggacggcaagatctacagaagcagagacccccagctgtgcagacacggccccctgggcaagtgcgtgcactgcgtgcccctggagcccttcgacgaggactacctgaaccacctggagccccccgtgaagcacatgagcttccacgcctacatcagaaagctgaccggcggcgccgacaagggcaagttcgtggccctggagaacatcagctgcaagatcaagagcggctgcgagggccacctgccctggcccaacggcatctgcaccaagtgccagcccagcgccatcaccctgaacagacagaagtacagacacgtggacaacatcatgttcgagaaccacaccgtggccgacagattcctggacttctggagaaagaccggcaaccagcacttcggctacctgtacggcagatacaccgagcacaaggacatccccctgggcatcagagccgaggtggccgccatctacgagcccccccagatcggcacccagaacagcctggagctgctggaggaccccaaggccgaggtggtggacgagatcgccgccaagctgggcctgagaaaggtgggctggatcttcaccgacctggtgagcgaggacaccagaaagggcaccgtgagatacagcagaaacaaggacacctacttcctgagcagcgaggagtgcatcaccgccggcgacttccagaacaagcaccccaacatgtgcagactgagccccgacggccacttcggcagcaagttcgtgaccgccgtggccaccggcggccccgacaaccaggtgcacttcgagggctaccaggtgagcaaccagtgcatggccctggtgagagacgagtgcctgctgccctgcaaggacgcccccgagctgggctacgccaaggagagcagcagcgagcagtacgtgcccgacgtgttctacaaggacgtggacaagttcggcaacgagatcacccagctggccagacccctgcccgtggagtacctgatcatcgacatcaccaccaccttccccaaggaccccgtgtacaccttcagcatcagccagaaccccttccccatcgagaacagagacgtgctgggcgagacccaggacttccacagcctggccacctacctgagccagaacaccagcagcgtgttcctggacaccatcagcgacttccacctgctgctgttcctggtgaccaacgaggtgatgcccctgcaggacagcatcagcctgctgctggaggccgtgagaaccagaaacgaggagctggcccagacctggaagagaagcgagcagtgggccaccatcgagcagctgtgcagcaccgtgggcggccagctgcccggcctgcacgagtacggcgccgtgggcggcagcacccacaccgccaccgccgccatgtgggcctgccagcactgcaccttcatgaaccagcccggcaccggccactgcgagatgtgcagcctgcccagaacctag

SEQ ID NO: 195793 - DNA, 1827 bp, Artificial Sequence
  derived and/or modified sequence
atggccgagagtatcataatcagggtacagtcgccagatggggtaaagcgtattactgccaccaagagggaaaccgcagccacgttcttgaagaaagtcgctaaagagttcgggtttcagaataacgggttcagcgtgtacatcaatcggaacaagaccggggagattacagcctccagtaataaaagcctaaatctgctgaagattaaacacggggatctcctgttcttattcccaagcagtctggcagggccttccagcgagatggaaactagtgtgcccccaggattcaaggtgttcggcgcccctaacgttgtggaagacgaaatcgaccagtacctgagtaaacaagatgggaaaatatacaggtcgagagatcctcaactctgtagacatggcccacttggaaagtgcgtgcattgcgtacccctggagcctttcgatgaagactatctgaatcacctcgaacccccagtgaaacacatgagtttccatgcatatatacgcaagctgactggaggcgctgacaaaggtaagttcgtggccctcgagaacatctcttgtaagatcaaatctgggtgcgagggccacctcccgtggccgaatggcatttgcaccaagtgtcagccatcagctattacactcaatagacagaaatatagacacgtggataatattatgtttgaaaatcatactgtggcggaccggtttcttgatttctggcgtaagactgggaaccagcactttggctatctgtatggccgttatactgagcataaggatattcccctgggaatcagagcagaagtcgccgctatctacgagcctccgcagatcggcacgcaaaacagtttggaactcctggaggacccgaaagctgaggttgtcgatgagatcgcggccaagctcgggctccggaaggtcggatggatcttcactgaccttgtgtctgaagataccagaaaaggaaccgtgcgctactcacgcaacaaagacacttatttcctgagcagcgaggagtgcattactgcaggggacttccagaacaaacaccccaacatgtgccggctctcccctgacggacactttggctccaagttcgtaactgctgtagcgaccgggggccctgataatcaagttcactttgaggggtatcaggtttctaaccagtgcatggccctggtgagggatgagtgtttacttccctgtaaggatgcgcctgagctcggatatgcaaaggagtcttcatcagaacaatacgtccccgatgtgttttacaaggacgttgacaaattcgggaacgagattacgcaactcgcacgccctctacccgtggagtatctcataatcgacatcacaactaccttccccaaagaccccgtgtacactttttccatcagccagaacccttttccaattgaaaaccgggacgtattgggcgaaacccaagactttcattccctggccacttacctaagtcagaatacctcttccgtgtttctggatactatttcagactttcacctgctgttgttcctcgtgaccaacgaagtgatgcccttgcaagatagcatctctttgctgctggaggctgtccggactcggaacgaagaattggcccagacatggaagcggagcgagcaatgggccactatcgagcagctgtgttccacagtcggcggtcaacttcccggactgcacgagtacggcgcggtgggcggctccactcacactgccactgccgcgatgtgggcctgccagcactgtacattcatgaaccagccagggactggacactgtgaaatgtgttccttaccacgaacgtag

SEQ ID NO: 195794 - DNA, 1827 bp, Artificial Sequence
  derived and/or modified sequence
atggccgagagcatcatcatccgggtgcagagcccagatggagtgaagaggatcacagccaccaagcgggagacagctgccaccttcctgaagaaggtggccaaggagtttggcttccagaacaacggcttctctgtgtacatcaacagaaacaagacaggagagatcacagccagcagcaacaagagcctgaacctgctgaagatcaagcatggagacctgctcttcctgttccccagcagcctggccggccccagcagcgagatggagacctctgtgcccccaggcttcaaggtgtttggagcccccaacgtggtggaggatgaaattgaccagtacctgagcaagcaggacggcaagatctaccgcagccgggacccccagctgtgccgccacggccccctgggcaaatgtgtgcactgtgtgcccctggagccctttgatgaggactacctgaaccacctggagccccctgtgaagcacatgtccttccacgcctacatcaggaagctgaccggcggcgctgacaagggcaagtttgtggccctggagaacatcagctgcaagatcaagagcggctgtgagggccacctgccctggcccaacggcatctgcaccaagtgccagcccagcgccatcaccctgaaccggcagaagtaccgccacgtggacaacatcatgtttgagaaccacacagtggccgaccgcttcctggacttctggaggaagacaggcaaccagcacttcggctacctgtatggccgctacacagagcacaaggacatccccctgggcatccgggcagaggtggccgccatctatgagcccccccagatcggcacccagaacagcctggagctgctggaggaccccaaggccgaggtggtggatgaaattgctgccaagctgggcctgaggaaggtgggctggatcttcacagacctggtgtctgaggacaccaggaagggcaccgtgcgctacagcaggaacaaggacacctacttcctgagcagcgaggagtgcatcacagctggggacttccagaacaagcaccccaacatgtgccgcctgagcccagatggccacttcggcagcaagtttgtgacagctgtggccactggaggccctgacaaccaggtgcactttgagggctaccaggtgagcaaccagtgcatggccctggtgagagatgagtgcctgctgccctgcaaggatgcccctgagctgggctacgccaaggagagcagcagcgagcagtatgtgcctgatgtgttctacaaggatgtggacaagtttggaaatgagatcacccagctggcccggcccctgcctgtggagtacctgatcatcgacatcaccaccaccttccccaaggaccctgtgtacaccttcagcatcagccagaaccccttccccatcgagaacagagatgtgctgggggagacccaggacttccacagcctggccacctacctgagccagaacaccagcagcgtcttcctggacaccatcagtgacttccacctgctgctcttcctggtgaccaatgaggtgatgcccctgcaggacagcatcagcctgctgctggaggccgtgaggaccagaaatgaggagctggcccagacctggaagaggtctgagcagtgggccaccatcgagcagctgtgcagcacagtgggcggccagctgcccggcctgcatgaatatggagctgtgggcggcagcacccacacagccacagctgccatgtgggcctgccagcactgcaccttcatgaaccagcccggcaccggccactgtgagatgtgcagcctgcccaggacatag

SEQ ID NO: 195795 - DNA, 4379 bp, Artificial Sequence
  derived and/or modified sequence
gtattgagcgaggcaccgggacgtcggcggctggcggagccgggcgggcgaagctggagcggcggtggcggcggcgtagggaggccggggccggggctgaggccgcggccgggtctgcgaggcccttggggcggcaggcggcggcggcccggggctcgagcccggaggcaggagcagccgccatggccgagagcatcataattcgtgtccagtccccggatggagtgaagcggatcacagcaacaaagagagaaacagcagcaacatttttgaaaaaggttgcaaaggagtttggcttccaaaataatggcttctcggtttacatcaatagaaacaagaccggagagataacagcctcctccaacaaatccctcaacttgctaaaaatcaagcatggcgatttgttgttcctgtttccctcgagccttgctgggccctcatctgaaatggagacgtcagttccaccgggcttcaaagtctttggcgctcccaacgtggtggaggatgagattgatcagtacctcagcaaacaggacgggaagatttacagaagccgagacccacagctatgccgccacggccctttggggaaatgcgtgcactgcgtccctctagagccattcgatgaggactatctaaaccatctcgagcctcccgtgaagcacatgtccttccacgcctacatccggaagctgactggaggggctgacaaggggaagtttgttgccctggagaacatcagctgcaagattaagtcagggtgcgaggggcacctcccgtggccgaatggcatctgtactaagtgccagccgagcgccatcacgctgaacagacagaagtacaggcatgtggacaatatcatgtttgagaatcacaccgtcgctgaccgctttcttgacttctggagaaagacagggaaccagcattttgggtacttatacggacggtacacggagcacaaagacattccccttggcatcagggctgaagtggctgcgatttatgagccacctcagattggtacacagaacagcttggagcttcttgaggatccaaaagctgaagtggtcgatgaaattgctgccaaacttggcctgcggaaggttggctggatatttacagacctcgtctcagaagatacccgaaagggtaccgtccgctacagtcgaaataaggacacctatttcctaagttcagaagagtgcatcactgcaggagacttccagaacaagcatcccaacatgtgccggctctctccagacggacattttggatccaagtttgttactgcagtggctacaggtggtcctgacaaccaagtccactttgaagggtaccaggtgtccaatcagtgtatggcactggtccgtgatgagtgtttgctgccatgcaaggacgccccggagcttggctacgccaaggagtctagcagtgagcagtacgtgcctgatgtgttttataaggacgtagacaagtttggcaacgagatcacccagctggcccggcccctgcctgtggagtatctcatcatagacatcacaacaactttccccaaggatccagtttacactttttctatttcgcaaaatccatttcctattgaaaaccgggatgtattgggtgagacacaggacttccatagcttggccacctatttgtctcagaatacctcatctgtgttcttggataccatctcagatttccacctcttgctgttcctggtcaccaatgaagttatgcctctgcaggacagcatcagcttgctgctggaggccgtgcggaccagaaatgaggagctcgcccagacatggaagaggtctgagcagtgggccaccatcgagcagctgtgcagcacagttggcgggcagctcccaggtctccatgagtacggcgccgtcgggggctccacacacacggccactgcagccatgtgggcctgtcagcactgcacgttcatgaaccagccaggcacaggccactgcgagatgtgcagcctccccaggacctagggcgcctgccctctgctggctaggaccgggcccagcccagcccttcctgaagccagaagcgttgctgagtgtgttccctgtaactgccccatagtgggcagccctggaggaacaaggggctggctgtcctgggctccctgacccactgaagcttctcagcacgttcctccctggagagcgggcgccacggctggtattctgcaggctgaatgcagtctccagactggaaacgcagagcggctcctcacgcctaatcctgttgacaagtcccccgccgtgttggaaagacctctcgcctctacgtggcacctggaattggggcgcacagggaggggccgatgctgccaccacccagccttctctttattttcagtgctttttgtttggcctccctgcccccatgtttttctggctgggagctcttggttacccccttgtctgactgcttggtggcaggcaccctgcctgtgagggccactttcctcttctagtagctgttgtctggtggggacgcagtggccctggacacggctcccctctgcaggtctgcaggtcggtttgctgcctgccctcctcctctcacccgatgtccaggtgggattttaaagtctgcattggttataataacagttatcagtaattcctgcccagaagacttttatttatttttttttaagataaaaactgcacaaaaggggagtgagagagactagtttccacatccttccctcctttagtgaagcccccgaggttgtgtccagggtgatgagtgtggacgggggcaccagtcagttctcccttgaagtaaacctcagtgcctgagacttttctaccaagccacacagctgcagcaactgcagatactgcgggctgagcaggagcagtggtggcgcctgccctgaggctgccctgcgatggcctgggtgggagagctgggtcaccggtgccgatgctctggccctccccaatacgctgcttcgtcccactgcaccgcctggctgagggcgttaggggctgtgcctcttgtgagggccatttgggacctccctggggcactgcacaattgatagtgtaccaatagagggagactgggcgatctggaacagcacgtggtggggtcctgcttgtgtgctctgcgttcctctgtggcgtggccaggccggggcatggctcttacccggggagtggtgggcatctcgatgcttctttgccttaatgatggccacatctgggctgctctgcacccacgggagaggctggcccagctgcagactgcttagggacttctgtgtccatcctggggggtaagcccacgtgacccacattcttggcactatgaacagagaacatttgcctgttggcttctgaagtggtcagggccatggctgacacctccaggtccgcctggcatgggacaccaagtggaaggcccaagcagctcatctgctcttgggaccaggggccagttgggttgggtctggtcacggcagagctattgtggagggtcaggaagggtggagaggagctgggttgaagcggactgctgcggatgcaactcccagcttgcccaccgcgggctgtctgctctccctcctagcagctgtcacactgaagttttgtcctctgctgtctcctctggtcctgagatgagctgtgagcctaggtggccaaggcttcctgcattgcttccctgtgagtccaaggccttcccccaccactgggcagaggctggacagcacggacttctagagagagccgcgttgccagttcctctcccactcgctcgtccttatccaccacgctattatagtttccgttgtcctccaccagcatttcccttactctgaagttccggcattcacatcattcatgttttcttttgtcttttagctaaaggaaaagcattggcgatttgtctgattctggttttgagttactctttgttcagtaatgcactttattttattgtccaaagagagtcagagctaagcatacaggcttgggggtgagccctgctgtgagagttcaggccctgggaggctcagccacctcctcttgtgggaaggaggtctcagccccacctcgcatcttcacctgcccttggtgtggacacaccctctcatgctaccagcaccataatccagtgggggtgactgggtgcacacctgcccaggtgaacacagcggctgccagtctcctggtcccgagaggaggtggggcctggccctggctccctccaaccagctgctcctgggacacaggtgctcctgcttcggctctgtttcggctcacaggtgtgcatcactgggcttggatttgcattacattgaccccagccctgcagtggaacctaataaaagcgcctgaagc

SEQ ID NO: 195796 - DNA, 1827 bp, Artificial Sequence
  derived and/or modified sequence
atggccgagagcatcatcatccgggtgcagagccccgacggcgtgaaacggatcaccgccactaagagagagacagctgcgacgttcttgaaaaaagtcgctaaggaattcggttttcagaacaacggtttttctgtgtacatcaaccgcaataagacaggcgagattactgcaagctccaacaagtctttaaacctcctgaaaataaagcacggggacctcctgtttcttttcccttcaagcctagcagggcccagctccgagatggagacctcggttccccccgggtttaaggtcttcggggctcccaacgtcgtggaggatgagatcgaccagtacctgtcgaaacaagacgggaaaatttacagaagtagggatcctcagctatgtagacatggacccctgggaaaatgcgttcattgtgtcccactggagccctttgacgaggattacctgaaccacctcgaaccccccgtgaagcacatgtcttttcacgcatacattaggaaattaactggcggcgctgacaagggaaagttcgtggccctagagaacatttcatgtaaaatcaagtccggatgcgaaggtcacctcccttggccaaacgggatatgtacaaaatgccagccaagtgccattactctcaacaggcaaaagtatcgccatgttgacaatattatgtttgaaaatcataccgtggctgaccggttcctagacttctggcgaaagaccggaaaccaacactttggttatctgtatgggcggtataccgaacacaaggatatccccttggggatccgggcagaggttgctgccatttatgagccacctcaaatcggtactcagaactcacttgaattgcttgaggaccccaaagccgaagtggtggatgaaatagctgccaaactggggttgcgaaaggttgggtggattttcaccgatttggtgtcagaggatacacgtaaaggtacagtccgatacagccgtaacaaggatacctactttttatcatcagaggagtgcatcacagccggggatttccaaaacaaacaccccaacatgtgccggctatctcctgacggacattttggatccaaatttgtgaccgctgtcgcgaccggaggaccagacaatcaagtgcattttgagggctatcaggtgtcgaaccagtgcatggccctggtgagggacgagtgcctcctaccatgcaaggacgcacccgagcttggatacgcaaaggagtcgtcctcagaacagtacgttccagacgtcttctataaggatgtcgataagttcggtaacgagattacacagctggcaaggcctcttccagtcgaatatctgatcattgacatcactacaacatttcctaaagaccccgtctacaccttttcaattagccagaatccatttcctatcgaaaacagagatgtcctcggggaaacccaggatttccactcactggctacatacctctcacagaatacgagttctgtttttctcgatacaattagcgacttccacctcttacttttcctagtgaccaacgaggtaatgccactgcaggactcaatctctctcctccttgaggcggtgagaactcgcaatgaagagctcgcgcagacatggaaaagatcagagcagtgggcaaccattgagcagttatgttccactgtcgggggccagttgcccggtctacacgaatacggtgcggtgggcgggtctacccacactgctaccgccgccatgtgggcttgccagcactgtacattcatgaaccaacctggcaccggccactgcgaaatgtgctccctgccacgaacatag

SEQ ID NO: 195797 - DNA, 1827 bp, Artificial Sequence
  derived and/or modified sequence
atggctgagagtataatcataagggtgcaatctcctgatggtgtgaagcggatcactgcaacgaagagagaaaccgctgctacctttcttaagaaagtcgctaaggagttcgggtttcagaataacgggttcagtgtttatatcaatcgaaataaaaccggggagattacagcatcgtccaataagagtctgaatttgctgaagataaagcatggagatttgctgttcctattcccgagctccctggccggtccaagctctgaaatggaaacgtctgttcctcctggcttcaaagtcttcggtgcccctaacgtggtggaggatgagattgatcagtacctgtctaaacaggacggaaagatttacaggtctcgagatccccagctgtgccggcacggacctctcggtaagtgcgtccactgcgtgcctctcgaaccgttcgacgaagattacctgaaccacttagagcctccagtcaagcacatgtccttccatgcctatatccggaaactgaccgggggtgccgacaaaggaaagttcgtggctctggagaacataagctgtaaaatcaagtccggatgtgaaggacacctgccctggccaaatgggatttgtaccaaatgtcagccttccgccatcacactcaacagacagaagtatcggcacgtggataacattatgttcgagaatcatacggtcgcagaccgattcctggacttctggcgaaaaaccgggaatcagcactttggatacctttacggacgatacactgagcacaaagatattccacttggtatccgagccgaggtagccgcaatttatgaaccaccgcaaatcggtacccagaattctcttgaactgctggaggaccctaaggccgaggttgtagacgaaatagccgctaagctgggcctgcgcaaggttggatggatattcacggatctggtcagtgaggatacccgaaaagggacagtacgttactctcggaataaagacacatatttcctgtctagtgaagagtgcattactgctggagacttccagaacaaacatccaaacatgtgtagattgtcccctgacggtcattttggctctaagtttgtaactgctgtggccacagggggtccagacaaccaggtacacttcgaaggctaccaggtgtccaaccagtgtatggcactcgtacgggacgagtgcctcctcccctgtaaggacgctccagagttgggttacgccaaggagagttcctctgagcaatacgttcctgatgttttttacaaagacgtggacaagtttgggaatgaaatcacccaactggcgagacccctgccggtcgagtatctcattattgatatcacaaccacgttccccaaagatcctgtctataccttctccatctctcagaacccatttcctattgaaaatcgggacgtgctgggagagacacaggattttcacagtctggccacatatctgtcacagaatacaagctccgtatttctagataccatcagcgattttcatctgctcttattcctagtaaccaatgaggtcatgcccctgcaggattctattagcctgttactcgaggcggttagaacccggaacgaggagctcgcgcagacatggaagcgcagtgagcaatgggcgactatcgaacagttgtgtagcaccgtcggcggacagctccccggattacacgagtacggagctgtcggaggcagcacccacactgcaaccgctgcaatgtgggcttgccagcactgtacttttatgaaccagccaggtactggccattgcgaaatgtgcagcctacctcggacctag

SEQ ID NO: 195798 - protein, 272 aa, Artificial Sequence
  derived and/or modified sequence
MTSSHVCCNFLNMWKKSKISTMYYLNQDAKLSNLFLQASSPTTGTAPRSQSRLSVCPSTQDICRICHCEGDEESPLITPCRCTGTLRFVHQSCLHQWIKSSDTRCCELCKYDFIMETKLKPLRKWEKLQMTTSERRKIFCSVTFHVIAITCVVWSLYVLIDRTAEEIKQGNDNGVLEWPFWTKLVVVAIGFTGGLVFMYVQCKVYVQLWRRLKAYNRVIFVQNCPDTAKKLEKNFSCNVNTDIKDAVVVPVPQTGANSLPSAEGGPPEVVSV

SEQ ID NO: 195799 - DNA, 819 bp, Artificial Sequence
  derived and/or modified sequence
atgacgtcaagtcacgtctgttgcaactttcttaacatgtggaaaaaatcaaagatcagcacaatgtactatcttaatcaagacgcaaagctgagcaatctttttctgcaagcctcctctcccacaactggaaccgcgccaagatcccagtctcgcctcagtgtgtgtcctagtacacaggacatttgtagaatatgccactgtgaaggcgatgaggagtctcccttaattactccctgtaggtgtaccggcacactacggttcgtccaccaatcctgtttacaccaatggatcaaaagcagtgacactagatgttgcgagctttgtaagtatgactttatcatggagaccaagctcaaaccactacgaaaatgggagaaactgcagatgacgaccagtgagcggcgtaaaatcttctgctctgtcacctttcacgtcattgccattacatgtgtggtctggtcactgtacgtgctcattgataggaccgcggaggagatcaaacagggcaacgacaatggcgtgctagaatggcctttctggacaaaactcgtcgtggttgccatcggctttaccggagggctcgtttttatgtatgtgcagtgcaaggtgtacgtgcaactgtggcgccggctgaaagcctacaacagggtgatcttcgtgcagaactgtccagatacggctaagaagctcgagaagaactttagctgtaacgtgaacaccgacatcaaagatgcggtggtcgttcccgttccacagacaggcgccaattccttgccctctgcggaagggggaccgcctgaagtcgtctctgtgtag

SEQ ID NO: 195800 - DNA, 819 bp, Artificial Sequence
  derived and/or modified sequence
atgaccagcagccacgtgtgctgcaacttcctgaacatgtggaagaagagcaagatcagcaccatgtactacctgaaccaggatgccaagctgagcaacctcttcctgcaggccagcagccccaccactggaacagcccccaggagccagagccggctgtctgtgtgccccagcacccaggacatctgccgcatctgccactgtgaaggagatgaggagagccccctcatcaccccctgccgctgcaccggcaccctgcgctttgtgcaccagagctgcctgcaccagtggatcaagagcagtgacacccgctgctgtgagctgtgcaagtatgacttcatcatggagaccaagctgaagcccctgaggaagtgggagaagctgcagatgaccaccagcgagaggaggaagatcttctgcagcgtgaccttccacgtgattgccatcacctgtgtggtgtggagcctgtatgtgctgattgacagaacagctgaggagatcaagcagggcaatgacaatggagtgctggagtggcccttctggaccaagctggtggtggtggccatcggcttcaccggcggcctggtgttcatgtatgtgcagtgcaaggtgtatgtgcagctgtggaggcggctgaaggcctacaacagagtcatctttgtgcagaactgcccagacacagccaagaagctggagaagaacttcagctgcaatgtgaacacagacatcaaggatgctgtggtggtgcctgtgccccagacaggagccaacagcctgcccagcgctgagggcggccccccagaggtggtgtctgtgtag

SEQ ID NO: 195801 - DNA, 2476 bp, Artificial Sequence
  derived and/or modified sequence
ctatattctctgttctgcattataagcaacatgaccagcagccacgtttgttgtaattttttaaatatgtggaaaaaaagcaagatatcaaccatgtattaccttaaccaagatgccaaattatctaacttgtttctccaggcaagcagcccaacaacagggacagctcccaggagccagtcaaggttgtctgtctgtccatccactcaggacatctgcagaatctgtcactgcgaaggggatgaagagagccccctcatcacaccctgtcgctgcactgggacactgcgctttgtccaccagtcctgcctccaccagtggataaagagctcagatacacgctgctgtgagctctgcaagtatgacttcataatggagaccaagctcaaacccctccggaagtgggagaaactacagatgaccacaagtgaaaggaggaaaatattctgctctgtcacattccacgtaatcgcgatcacctgtgtggtttggtctttgtatgtattgatagaccggacagcggaggaaatcaagcaaggcaatgacaatggtgtccttgaatggccattttggacaaaactggttgtggtagccattggcttcacaggaggtcttgtcttcatgtacgtacagtgtaaagtctatgttcagttgtggcgcaggctgaaggcctacaaccgtgtgatctttgtacaaaattgcccagacactgccaaaaaactggagaagaacttctcatgtaatgtaaacacagacatcaaagatgctgtggtagtgcctgtaccacaaacaggtgcaaattcactgccatctgcagagggtggcccccctgaagttgtatcagtctgatggaacctgttgggagtttcttcaccgaagaatatctttctagccctcagccactacaaatgacagaagtgatcttgaattatttactcccttcagctcctcctttctcctactgacacatttttcctgactttgttcaaagaggaaaggagaaaaacaaacagaccaaatgcccaggagcccatgaagtaatagcgtaaagtaaagtatgatatggaaatgtgaagtttgcaagagaatgatttccaagacaattaagaactactggggcaatgaatgcttttaggcagtaatcaaagattaaatggacccatgatactcttcttcacagtaacaggggaaaagttcaagaatacagacttgaattgcgatgtgtattacttctagggccttgtaatgttaactgtctcatctggaaataactaacatatttggttttaagcctgaaattgtctgcattatccctaagtcacattggaagtgaacttggaggatgcatattttgatatgctttgacagctaacagatttgtatggtttagtggagtctggttattttgacagatgcatgttttttttaaatagatgcaatatacatttgaagacattgatatttggaattaattacgtttgtttaagtcacgcaaaagattttcagaaaatgttcggatataattagctctgttaaatacccacagaactgttatcaggtcttatatttattttcatctggttcctctaatacagtgctgtccaatagaaacacaacagccacaaatgcaggccacagatgcaaatatttaacttcccagtagccctattttaaaaagtaaaaataaatgtttgtttgttaaaatgaattttgattttttaaaaacactatatgttatttcaacatgtcatcaatataaaaaattgattgattgattgatagtttacatctgtttcttgaaccaagttttcaaaatccagttggtaatttaaaagtacacttcaacttgaattaactatattggatagcacagccgtaaaattagagactaagcttctgctttatttaacagttgttgagtatttcaaaacagtttaattcattcttttatttcaaagtcacaaaagttagttatgatttttaaaagcattaaattaagtgtcctcattttaaagtcagatgaagttcacatctctaaagggtaaaaatccaaaagtatagaaagataaaacaatcaatctgcctatagcagagttgtgaaataaataaattgttactatgaagtacttacaataggggaataaaattacctatttttgttattaaatcaaatgtgtaaggcttatttcatccatatgaggtgtcaacttgacagatgatgagtaattatgactaagaatctagcccttacttttaaaagctgacaggatttcccttgctcagttagaaaacaaaaatattcaacagattctgtgataagtaattaatcgtttaggtttgacagttgattattgtgttctttgcatattcatgtaaaactgatgtgtgaatgacattgcagtgagctagattaacggtgattatagatacagtagcctgtcaaagaaagatgtcctacattaaaaaaggtgactta

SEQ ID NO: 195802 - DNA, 819 bp, Artificial Sequence
  derived and/or modified sequence
atgaccagcagccacgtgtgctgcaacttcctgaacatgtggaagaaatccaaaatatcaacaatgtattaccttaatcaagatgccaaactgtctaacttgtttctgcaggccagcagcccaactaccgggaccgcaccaaggtcacagtcacggctgtctgtgtgtccatccactcaagatatctgcaggatctgccactgtgagggcgacgaagaaagtccccttatcactccctgcaggtgtacagggaccttacgctttgttcaccagtcttgcctgcatcaatggattaagagtagcgacactagatgctgtgagctgtgcaagtacgatttcattatggagactaagttaaagcctctccgcaagtgggagaagctacagatgacaacatctgaacgccggaaaatattctgttcagtcaccttccatgtgatcgccattacttgcgtcgtatggtcgctctatgtgctgatagatcgcaccgcagaagagattaaacagggtaacgataatggagttctggaatggcctttctggaccaagctggtagtcgtggctatcgggtttacgggggggctggtctttatgtatgtgcagtgcaaggtgtatgtgcagctgtggcgcagattaaaggcctacaatagagtgatatttgtgcagaattgtccagataccgctaagaaactcgagaagaacttctcttgcaacgtaaatacggacattaaagatgctgtggtggttcccgtgccacagacaggggccaattcattgccctcagccgagggaggccctccggaagtggtgtctgtctag

SEQ ID NO: 195803 - DNA, 819 bp, Artificial Sequence
  derived and/or modified sequence
atgaccagctcccatgtgtgctgtaatttcctcaacatgtggaaaaagtccaagatttccaccatgtactatcttaatcaggatgcaaaactgagcaacctgtttttacaggctagcagtccgactacaggcaccgccccacggtcacagtcgaggctgagtgtgtgcccaagcacccaggacatttgcaggatctgtcattgtgagggtgatgaagagtccccgctgattactccatgccgctgcacaggcacccttagattcgtgcaccagagctgcctccaccagtggataaagtctagcgacacacgctgctgcgaactgtgcaagtatgacttcatcatggagacaaaacttaaacccttaagaaaatgggagaaactgcaaatgacaaccagcgagcgacgaaagatcttttgctcagtcacattccacgtcattgccataacatgcgtggtctggagcctgtatgtgctaattgacagaactgcagaggagatcaagcaaggcaacgataatggggtgctggagtggcctttttggacaaagttggtggtagtagccatagggttcaccggaggccttgtcttcatgtatgtccagtgcaaggtctacgtccaactctggcggcgactcaaggcatacaatcgcgtcattttcgtacaaaattgccccgacacggctaagaagttagaaaaaaacttttcctgcaacgtgaacaccgatatcaaggacgccgtcgtcgtgccagtgcctcagacaggggcaaacagtctcccatcagccgaaggtgggcctccggaagtcgtgtcagtgtag

SEQ ID NO: 195804 - DNA, 819 bp, Artificial Sequence
  derived and/or modified sequence
atgaccagcagccacgtgtgctgcaacttcctgaacatgtggaagaagagcaagatcagcaccatgtactacctgaaccaggacgccaagctgagcaacctgttcctgcaggccagcagccccaccaccggcaccgcccccagaagccagagcagactgagcgtgtgccccagcacccaggacatctgcagaatctgccactgcgagggcgacgaggagagccccctgatcaccccctgcagatgcaccggcaccctgagattcgtgcaccagagctgcctgcaccagtggatcaagagcagcgacaccagatgctgcgagctgtgcaagtacgacttcatcatggagaccaagctgaagcccctgagaaagtgggagaagctgcagatgaccaccagcgagagaagaaagatcttctgcagcgtgaccttccacgtgatcgccatcacctgcgtggtgtggagcctgtacgtgctgatcgacagaaccgccgaggagatcaagcagggcaacgacaacggcgtgctggagtggcccttctggaccaagctggtggtggtggccatcggcttcaccggcggcctggtgttcatgtacgtgcagtgcaaggtgtacgtgcagctgtggagaagactgaaggcctacaacagagtgatcttcgtgcagaactgccccgacaccgccaagaagctggagaagaacttcagctgcaacgtgaacaccgacatcaaggacgccgtggtggtgcccgtgccccagaccggcgccaacagcctgcccagcgccgagggcggcccccccgaggtggtgagcgtgtag

SEQ ID NO: 195805 - protein, 482 aa, Artificial Sequence
  derived and/or modified sequence
MDELVHDLASALEQTSEQNKLGELWEEMALSPRQQRRQLRKRRGRKRRSDFTHLAEHTCCYSEASESSLDEATKDCREVAPVTNFSDSDDTMVAKRHPALNAIVKSKQHSWHESDSFTENAPCRPLRRRRKVKRVTSEVAASLQQKLKVSDWSYERGCRFKSAKKQRLSRWKENTPWTSSGHGLCESAENRTFLSKTGRKERMECETDEQKQGSDENMSECETSSVCSSSDTGLFTNDEGRQGDDEQSDWFYEGECVPGFTVPNLLPKWAPDHCSEVERMDSGLDKFSDSTFLLPSRPAQRGYHTRLNRLPGAAARCLRKGRRRLVGKETSINTLGTERISHIISDPRQKEKNKALASDFPHISACAHEFNPLSPLYSLDVLADASHRRCSPAHCSARQANVHWGPPCSRDIKRKRKPVATASLSSPSAVHMDAVEPTTPASQAPKSPSSEWLVRTSAAEKATDATTATFFKMPQEKSPGYS

SEQ ID NO: 195806 - protein, 447 aa, Artificial Sequence
  derived and/or modified sequence
MDELVHDLASALEQTSEQNKLGELWEEMALSPRQQRRQLRKRRGRKRRSDFTHLAEHTCCYSEASESSLDEATKDCREVAPVTNFSDSDDTMVAKRHPALNAIVKSKQHSWHESDSFTENAPCRPLRRRRKVKRVTSEVAASLQQKLKVSDWSYERGCRFKSAKKQRLSRWKENTPWTSSGHGLCESAENRTFLSKTGRKERMECETDEQKQGSDENMSECETSSVCSSSDTGLFTNDEGRQGDDEQSDWFYEGECVPGFTVPNLLPKWAPDHCSEVERMDSGLDKFSDSTFLLPSRPAQRGYHTRLNRLPGAAARCLRKGRRRLVGKETSINTLGTERISHIITLGRKISGYHQLGKENEISSIPCLPFTPWMFLPMLLTEGVHQHTALPDRQMYTGDHHVHVTSRGSGNQWPQHLCLAPVQFTWMQWSQPHQHHKPPNHPALSGW

SEQ ID NO: 195807 - protein, 351 aa, Artificial Sequence
  derived and/or modified sequence
MDELVHDLASALEQTSEQNKLGELWEEMALSPRQQRRQLRKRRGRKRRSDFTHLAEHTCCYSEASESSLDEATKDCREVAPVTNFSDSDDTMVAKRHPALNAIVKSKQHSWHESDSFTENAPCRPLRRRRKVKRVTSEVAASLQQKLKVSDWSYERGCRFKSAKKQRLSRWKENTPWTSSGHGLCESAENRTFLSKTGRKERMECETDEQKQGSDENMSECETSSVCSSSDTGLFTNDEGRQGDDEQSDWFYEGECVPGFTVPNLLPKWAPDHCSEVERMDSGLDKFSDSTFLLPSRPAQRGYHTRLNRLPGAAARCLRKGRRRLVGKVIPLTVSLAQWGDNIPYGSCVSY

SEQ ID NO: 195808 - DNA, 2452 bp, Artificial Sequence
  derived and/or modified sequence
cggcggtgagagtcggcccaaaaagcggcggccgttggaggtggctgcggcagctgatgtggcctcatggatgagctggtacacgacttagcctcagccttggagcagacatctgagcagaataagcttggtgaactgtgggaggagatggcgctgagcccccgacagcagaggcggcagcttcggaaacgccgaggtcggaagcgtcgttctgacttcactcacctggcagagcatacctgctgctacagcgaggcctctgagtcaagtctggatgaggccactaaggactgtcgagaagtggctccggtgaccaattttagtgactctgatgacacaatggtagccaaacgacacccagctctcaatgccattgtcaagagtaagcaacattcttggcatgaatctgactcctttactgaaaatgcaccttgtcgaccactcaggcgcaggcggaaggtgaagcgagtgacatcagaggtggctgctagccttcagcagaagctgaaggtgtcagattggagctatgagagaggctgcaggttcaagtctgctaagaagcagcgtctgtcccgctggaaggagaatactccctggacctcatcaggccacggattgtgtgaatcagcagaaaataggactttcctaagcaaaacaggaaggaaagaaaggatggagtgtgaaacagatgaacaaaaacagggctctgatgagaacatgtcagaatgtgaaaccagcagtgtgtgtagcagcagtgacactgggctctttaccaatgatgaagggcgacaaggtgatgacgaacagagtgattggttctatgaaggagaatgtgtcccaggattcactgtccctaatcttctgcccaagtgggctcctgatcattgttctgaagtagaaagaatggattctggattggataaattttcagattccacattccttttaccttctcggccagctcaaagagggtaccatactcgcttgaatcgtctacctggagctgcagctcgatgcctcagaaaggggcgaagaaggctggttgggaaggagaccagcataaacactttggggactgagaggataagccatatcattagtgaccctcggcagaaagaaaagaataaagcgttggcttctgattttcctcacatttctgcttgtgcacatgagttcaatcccctgtctcccctttactccctggatgttcttgccgatgcttctcaccgaaggtgttcaccagcacactgctctgccagacaggcaaatgtacactggggaccaccatgttcacgtgacatcaagaggaagcggaaaccagtggccacagcatctttgtctagccccagtgcagttcacatggatgcagtggagccaaccacaccagcatcacaagcccccaaatcacccagctctgagtggttggtgaggacctctgcagcagagaaagccacagacgcaactactgctacattttttaaaatgccacaagaaaagagccctggatacagctagagagcaggacttcaccctccaggagctgactgggtgttgctgaagcaaatgttggactttgtgttagatagtcttgcatatcttaatcgacattcccagtcctttcaccaccagaaccaactcctctttcaaacacagcagtggattctttctctcagaagatcatgttgtgggaatcttttttttaaatagtgaaatattgaggcagcaattttttacaaaaaggtcatcctctgctctatttgttaccttgttattgctgtctcaacatttactacagctccatttacagaactgttgcttttttgcagttgtctttgttcttgaaaaaccagtaactgcttctgcataccttttgtgtagagcttttaatatcatttgaggaagttccaaatttgtagccagttccaaacaaatttaaatattgagttgagacctgtatggaattgtgttcgcaggagataaggcttgcctttgagcctactcttgattcatgcagagtgccaataagataaatcaaccaagttttggggcctcaaaagagacaccagcaactgggccttgagaacttccatttttttgcagattgtctgcagaaactcagacagctcatcagcagcagcagctgtattgtattttacctcatcttcagagtttatgttctactgaaagaggacgtgtgtatacacacacacacacacacacacacacagattggtataatggagaagatggtttaggtgtacagcaaatttaaaatagtcagtggattgtgtcttactacttcatgtcccagtgtaagcctttatgtcctaagcaggactttattgttagtattataggctaataacctgcagcagaaattcatactctattataataatggcttcttggggccatgctttggggaagtaaaatgtctttttgacatgccttt

SEQ ID NO: 195809 - DNA, 1449 bp, Artificial Sequence
  derived and/or modified sequence
atggacgagctggtgcacgacctggccagcgccctggagcagaccagcgagcagaacaagctgggcgagctgtgggaggagatggccctgagccccagacagcagagaagacagctgagaaagagaagaggcagaaagagaagaagcgacttcacccacctggccgagcacacctgctgctacagcgaggccagcgagagcagcctggacgaggccaccaaggactgcagagaggtggcccccgtgaccaacttcagcgacagcgacgacaccatggtggccaagagacaccccgccctgaacgccatcgtgaagagcaagcagcacagctggcacgagagcgacagcttcaccgagaacgccccctgcagacccctgagaagaagaagaaaggtgaagagagtgaccagcgaggtggccgccagcctgcagcagaagctgaaggtgagcgactggagctacgagagaggctgcagattcaagagcgccaagaagcagagactgagcagatggaaggagaacaccccctggaccagcagcggccacggcctgtgcgagagcgccgagaacagaaccttcctgagcaagaccggcagaaaggagagaatggagtgcgagaccgacgagcagaagcagggcagcgacgagaacatgagcgagtgcgagaccagcagcgtgtgcagcagcagcgacaccggcctgttcaccaacgacgagggcagacagggcgacgacgagcagagcgactggttctacgagggcgagtgcgtgcccggcttcaccgtgcccaacctgctgcccaagtgggcccccgaccactgcagcgaggtggagagaatggacagcggcctggacaagttcagcgacagcaccttcctgctgcccagcagacccgcccagagaggctaccacaccagactgaacagactgcccggcgccgccgccagatgcctgagaaagggcagaagaagactggtgggcaaggagaccagcatcaacaccctgggcaccgagagaatcagccacatcatcagcgaccccagacagaaggagaagaacaaggccctggccagcgacttcccccacatcagcgcctgcgcccacgagttcaaccccctgagccccctgtacagcctggacgtgctggccgacgccagccacagaagatgcagccccgcccactgcagcgccagacaggccaacgtgcactggggccccccctgcagcagagacatcaagagaaagagaaagcccgtggccaccgccagcctgagcagccccagcgccgtgcacatggacgccgtggagcccaccacccccgccagccaggcccccaagagccccagcagcgagtggctggtgagaaccagcgccgccgagaaggccaccgacgccaccaccgccaccttcttcaagatgccccaggagaagagccccggctacagctag

SEQ ID NO: 195810 - DNA, 1449 bp, Artificial Sequence
  derived and/or modified sequence
atggatgagctcgtgcatgatttagccagcgctctagaacaaacatcagaacagaacaagctgggtgaactctgggaggagatggccctcagtcctcgtcagcagaggcggcagctccgcaaaaggcgtggccgaaaaagaaggagtgacttcacccatctcgctgagcatacttgttgctattccgaagcttccgaaagctctctggacgaagccactaaagattgtcgggaggtggcccccgttacaaactttagcgatagcgatgacacgatggtcgccaagcgacatcccgccctcaatgccatcgtgaagagtaagcagcactcctggcacgagagtgatagttttacggaaaacgcaccttgtcgccctctccggcgacgccggaaagtgaagcgggtaactagtgaggttgccgcatctctgcagcagaaactgaaagtctctgattggagttacgagagggggtgcaggttcaaatcggccaagaagcagcggctgtctcggtggaaggagaacaccccgtggacctcatcaggccacggcctctgtgagagtgccgagaataggactttcctgtctaagaccggaagaaaagaacggatggagtgtgagacagatgaacaaaaacaaggatctgatgaaaatatgtccgagtgtgagacctcatccgtgtgctctagcagtgacaccggcctattcacgaatgacgagggaagacaaggtgatgacgagcagtcggactggttttacgaaggtgagtgtgtccccggatttaccgtgccaaacctgcttcccaaatgggcgccggatcactgtagtgaggtggaaagaatggactccggcctggacaagttctccgattctacgtttctcctgcccagcagaccagcacaacggggctatcacacccggctgaacaggttgcccggagctgccgcaaggtgtttaagaaagggccggcggcggctagtaggaaaagaaacttccatcaacaccctgggcactgagcgtatatcccacattatttcagaccctcgacagaaagagaagaacaaggctctggcgtcggatttccctcacatatcggcgtgtgctcacgaattcaatcctttgtctccgctgtattctctggatgtcctagccgatgccagccaccgccgttgttccccggcccactgctctgcccgacaggctaacgttcactggggccccccatgctctagagatattaaaagaaagaggaagcctgtggccaccgcctcactctctagtccatcggctgtgcacatggacgctgtggagcctactactccagccagccaagctccaaaaagtccctcctctgaatggctcgtacgaaccagcgcggctgagaaagctaccgacgctaccactgcaacttttttcaagatgccccaagaaaagtcacccggctatagttag

SEQ ID NO: 195811 - DNA, 1449 bp, Artificial Sequence
  derived and/or modified sequence
atggatgagctggtgcatgacctggccagcgccctggagcagaccagcgagcagaacaagctgggggagctgtgggaggagatggccctgagcccccggcagcagaggcggcagctgaggaagaggcggggcaggaagagaagaagtgacttcacccacctggccgagcacacctgctgctacagcgaggccagcgagagcagcctggatgaggccaccaaggactgccgggaggtggcccctgtgaccaacttcagtgacagtgatgacaccatggtggccaagaggcacccagccctgaatgccatcgtgaagagcaagcagcacagctggcatgaaagtgacagcttcacagaaaatgccccctgccggcccctgcggcggcggaggaaggtgaagagggtgaccagcgaggtggccgccagcctgcagcagaagctgaaggtgtctgactggagctatgaaagaggctgccgcttcaagagcgccaagaagcagaggctgagccgctggaaggagaacaccccctggaccagcagcggccacggcctgtgtgagagcgcagaaaatagaaccttcctgagcaagacaggcaggaaggagaggatggagtgtgaaacagatgagcagaagcagggcagtgatgagaacatgtctgaatgtgagaccagctctgtgtgcagcagcagtgacaccggcctcttcaccaatgatgagggccggcagggagatgatgagcagagcgactggttctatgaaggagaatgtgtgcccggcttcaccgtgcccaacctgctgcccaagtgggccccagaccactgcagcgaggtggagaggatggacagcggcctggacaagttcagtgacagcaccttcctgctgcccagcaggcctgcccagaggggctaccacacccggctgaaccggctgcctggagctgctgcccgctgcctgaggaagggcagaagaaggctggtgggcaaggagaccagcatcaacaccctgggcacagagcgcatcagccacatcatcagtgacccccggcagaaggagaagaacaaggccctggccagtgacttcccccacatcagcgcctgtgcccacgagttcaaccccctgagccccctgtacagcctggatgtgctggctgatgccagccaccggcgctgcagccctgcccactgcagcgcccggcaggccaacgtgcactggggccccccctgcagccgggacatcaagaggaagaggaagcctgtggccacagccagcctgagcagccccagcgctgtgcacatggatgctgtggagcccaccaccccagccagccaggcccccaagagccccagcagcgagtggctggtgaggaccagcgctgctgagaaggccacagatgccaccacagccaccttcttcaagatgccccaggagaagagccctggctacagctag

SEQ ID NO: 195812 - DNA, 1449 bp, Artificial Sequence
  derived and/or modified sequence
atggacgagctggtgcacgacctggccagcgccctggagcagaccagtgaacaaaacaagctgggtgagttatgggaagaaatggctctttcccctcggcagcaacgtaggcagctgcgtaagcgacgcggtcggaagaggagaagcgatttcacccacttggccgagcacacatgttgctactccgaagcctccgaaagctctctagatgaggcaacaaaggactgtcgtgaggtggcaccggtgacaaattttagcgacagtgacgacacgatggttgctaaaagacatccagcactgaacgccattgtaaagagtaaacagcacagttggcatgagtccgattctttcacagagaatgccccttgccgccccctgcggcgccgcagaaaagtgaagcgtgtgacatcggaggtggccgcaagtctacagcagaaactcaaggtctccgattggtcttacgaaaggggctgcaggtttaagtctgccaagaaacagcgtctatcccgctggaaagagaataccccctggacatcctcaggccacggcctctgcgagtcggctgaaaaccgaactttcctctcaaagaccggacgcaaagagcgcatggaatgtgagactgatgaacagaaacaggggagcgatgagaacatgtctgaatgtgaaacttcaagtgtgtgttcatcctcggacactgggctgtttacaaatgacgaagggagacagggcgatgacgagcagtccgactggttttacgagggcgaatgcgtgcctggcttcaccgttccaaacttgctccccaaatgggctccagaccattgctctgaggtcgaaagaatggatagcggcctggacaagttttctgattcaacattcctgcttccttcacgtcctgcacagcgcggttatcatacaagactcaacagactcccgggagcagcagctcgatgtctgagaaagggtcggagacgactagttggcaaggaaacttccattaacaccctgggcaccgaacgcatcagccacatcatttctgacccgcgtcagaaagagaagaacaaagcactcgctagtgactttccccacataagcgcctgtgcccacgagtttaaccccctgtcccctctttattcattggacgtactggctgacgcctctcaccggcgctgctctccggctcactgctccgctcgacaggctaatgtgcactggggaccaccatgtagccgagacatcaaaaggaagcgtaagcccgtggctaccgcgtccttgagctcacccagcgccgtgcatatggacgcagttgaaccgactacgcccgcctcacaggcgccaaaaagcccctcctcagagtggctggttagaacaagcgccgccgaaaaggctaccgatgctaccaccgctacctttttcaaaatgcctcaggagaagagtccgggctattcctag

SEQ ID NO: 195813 - DNA, 1449 bp, Artificial Sequence
  derived and/or modified sequence
atggacgagcttgtgcatgacctggcctctgctcttgaacagacttctgaacagaacaagctgggtgagctttgggaggagatggctctcagcccacgtcagcagcggcgtcagctgcgaaagcgcagaggaagaaagcggcgatcagacttcacacatttggcagagcacacatgctgctactccgaggcgtccgagtcaagcctcgacgaggccactaaagattgccgtgaggtggctccagtgacgaacttctccgacagcgatgataccatggtcgccaagaggcaccctgctctgaatgcaattgttaaatctaagcagcatagttggcacgagtccgacagcttcaccgaaaacgccccatgtaggcccctccgaagacgccgtaaggtcaagcgcgttacctccgaggtcgccgcttcactgcagcaaaaactgaaggtttcggattggagctatgaacggggttgccgttttaaatctgccaagaaacaaaggctatctagatggaaggagaacacgccatggacctccagcggtcacggcttgtgcgagtccgcagaaaaccggacatttctatccaaaaccggtcgcaaggagagaatggaatgtgaaactgatgaacagaaacaagggagtgacgagaatatgtcagaatgcgaaaccagcagcgtgtgtagctcctcagacaccggcctcttcacaaacgatgaaggcagacagggcgacgacgagcaaagcgattggttctatgaaggggaatgtgtccccggattcaccgtcccaaatttgctccccaagtgggccccagaccattgcagcgaagttgaacggatggactccggcctggataaattcagcgatagcactttcctccttccatcgcgccctgcccagaggggctatcacacccggcttaatcggctgccaggagccgcagcaaggtgtctgcgtaagggacggcgacgcctggttgggaaagaaacctcaattaatactctgggaactgaacggatcagtcacatcataagcgatccccgtcaaaaggaaaaaaacaaagccctggcctctgatttcccacatatcagcgcatgtgcccacgagtttaatcccctttcccctttatactccctggacgttctcgccgatgccagccaccggaggtgttcgcccgctcattgctcagctcgtcaggctaatgttcactggggccctccctgcagtagagacatcaagcgcaaacggaagcctgttgccaccgcttccctatccagtccatctgcggtacacatggatgccgtggagccgacaactcctgcttctcaggctccaaagagcccatcatctgaatggctggttagaacctccgccgcagagaaggctacagatgccaccactgcaacgttcttcaaaatgccgcaggaaaaaagccctggttactcttag

SEQ ID NO: 195814 - protein, 248 aa, Artificial Sequence
  derived and/or modified sequence
MPRIAGNHLMLEESRTCSSPELLDGVWPCQPLHFGLPASEMHFQTMLKSKLNVLTLKKEPLPAVIFHEPEAIELCTTTPLMKTRTHSGCKVTYLGKVSTTGMQFLSGCTEKPVIELWKKHTLAREDVFPANALLEIRPFQVWLHHLDHKGEATVHMDTFQVARIAYCTADHNVSPNIFAWVYREINDDLSYQMDCHAVECESKLEAKKLAHAMMEAFRKTFHSMKSDGRIHSNSSSEEVSQELESDDG

SEQ ID NO: 195815 - DNA, 747 bp, Artificial Sequence
  derived and/or modified sequence
atgccaagaatagcaggtaaccacctcatgctagaagaaagccgaacatgttcctcacccgagctccttgatggtgtttggccttgtcagcccctacattttggactccccgcgtccgagatgcactttcaaactatgctcaagagcaagttaaacgtgttaaccctgaagaaagaacccctaccggccgtcatctttcacgaaccagaggctatcgagctgtgcaccactacccctctgatgaaaactagaacacactctggctgtaaggttacttacctgggtaaagtgtcgaccacagggatgcagtttctgtcaggatgcaccgaaaagccagtgattgagctatggaagaaacacacgttagctagagaggatgtgtttccggcgaatgccctgcttgaaattcggccctttcaagtatggctgcaccatctggatcataagggcgaagctaccgtccacatggacactttccaagtggcccgcatcgcatactgcaccgctgatcacaatgtgtcccctaacatctttgcctgggtgtaccgcgaaataaacgatgacctgagctaccagatggattgccacgccgtggagtgtgaatctaagttggaagccaaaaagctggctcatgctatgatggaggcctttcgcaagactttccattcaatgaaatctgacgggcgcatacatagcaactcctctagcgaggaggtgagtcaggagcttgagtctgatgacggctag

SEQ ID NO: 195816 - DNA, 747 bp, Artificial Sequence
  derived and/or modified sequence
atgcccagaattgctggcaaccacctgatgctggaggagagcaggacctgcagcagccctgagctgctggatggagtgtggccctgccagcccctgcacttcggcctgcctgccagcgagatgcacttccagaccatgctgaagagcaagctgaatgtgctgaccctgaagaaggagcccctgcctgctgtgatcttccacgagcctgaggccatcgagctgtgcaccaccacccccctgatgaagaccaggacccacagcggctgcaaggtgacctacctgggcaaggtgtccaccaccggcatgcagttcctgagcggctgcacagagaagcctgtgattgagctgtggaagaagcacaccctggccagagaagatgtgtttcctgccaatgccctgctggagatccggcccttccaggtgtggctgcaccacctggaccacaagggggaggccaccgtgcacatggacaccttccaggtggcccgcatcgcctactgcacagctgaccacaacgtgagccccaacatctttgcctgggtgtaccgggagatcaatgatgacctgagctaccagatggactgccacgctgtggagtgtgagagcaagctggaggccaagaagctggcccacgccatgatggaggccttcaggaagaccttccacagcatgaagagtgatggccgcatccacagcaacagcagcagcgaggaggtgtcccaggagctggagagtgatgatggatag

SEQ ID NO: 195817 - DNA, 747 bp, Artificial Sequence
  derived and/or modified sequence
atgccccggatcgccggcaaccacctgatgctggaggagagccggacatgctctagtcccgagttgctcgacggcgtctggccatgtcagcctctccactttgggctgccagccagtgagatgcattttcaaacaatgctaaagtctaaacttaatgtgcttacgctcaagaaggaaccgctaccagccgtgattttccatgagccagaggccatcgagctctgcacaactacacctttgatgaaaacgcgcacacactctgggtgtaaggtgacctatctcggcaaagtatccaccaccggcatgcaattcctctctggttgcaccgagaaaccagtgatcgagctgtggaaaaaacatactctagccagggaagatgtctttccagcaaatgcacttctggagataaggcccttccaggtctggcttcatcatttggaccacaagggcgaagccacagtgcatatggatacgtttcaggtcgcccgcatcgcttattgcacagcagaccataatgtgagccccaatatctttgcatgggtgtaccgggaaattaacgacgatctatcataccagatggactgccacgcagttgagtgcgagtctaaactggaggcgaagaaactggcccacgccatgatggaggcattccggaagacgtttcacagcatgaagtccgacggcaggatacacagtaatagcagtagtgaagaggtgagccaggagctggaatctgatgatggctag

SEQ ID NO: 195818 - DNA, 2745 bp, Artificial Sequence
  derived and/or modified sequence
aggacagccggcgcgcggccgtgcccacaagttgccggcagctgagcgccgcgcctcctcctgctcgcagccccctacgcccacccggcggcggtggccagcgccaggacgcacatcccgcggacaccgaccccagatgtaaagcgggaccccagcccctcgccccccggcgcgatcgacagtctcgccagcgtctcctctgccaaaacccagggctggaagatgtggcagccggccacggagcgcctgcaggagagatttgcagacacagaagcggcacagagaaggccattgtgaagatcaaggcagaaaccggagttatggcatcataagccaaggaatgccaaggattgctggcaaccacctgatgttagaagagtcgaggacatgttcttctccagagcttttggatggtgtgtggccctgccaacctttacattttggacttccagcctccgaaatgcactttcagaccatgctgaagtctaaattgaatgtcttaacactgaaaaaggaacctctcccagcggtcatcttccatgagccggaggccattgagctgtgcacgaccacaccgctgatgaagacaaggactcacagtggctgcaaggttacctacctgggcaaagtctccaccactggcatgcagtttttgtcaggctgcacagaaaagccagtcattgagctctggaagaagcacacgctagcccgagaggatgtctttccggccaatgccctcctggaaatccggccattccaagtttggctccatcatctcgaccacaaaggggaggccacagtgcacatggataccttccaggtggcccgcatcgcctactgcaccgccgaccacaacgtgagccccaacatcttcgcctgggtctacagggagatcaatgatgacctgtcctaccagatggactgccacgccgtggagtgcgagagcaagctcgaggccaagaaactggcccacgccatgatggaggccttcaggaagactttccacagtatgaagagcgacgggcggatccacagcaacagctcctccgaagaggtttcccaggaattggaatccgatgatggctgaatgaacttgagacgcttcagcaaaggcagcattggtcacggagttcaagggaatagatgagtaagcaacgtttcaaatttgggatgaaaagactgccaaactattggctgaccaaggtttttaaattcagaagagcaattctaaatctaaagaaatgtatcattaaagtaattacgttacattgaaacctgctgctgctgtgactgtgaggagggtgggagtgtggatggggaggaaggttctaggctctcttatttttctcatttcccaatgcctctctgtgggagagctccatgccagttttcaccacgctcaggcaaatactctgcagctgttattggatgggccattccgatctgccttatgaaattccacaagaatgttaggggcacctatgggatctctagtggggtgggcagggtgctgatggggacgctggccgcagggaggaaggaacatctcgggagggccctctgttcctctcccacggcagatgccctcctctgtatgcaaatcagcacagcctttattgagctttacaactaacaacctgatagttggcagttaattcacagttacagataatgcttttatttacataaatataccaagtagtaccctcttattgtattcacttcatctattttcttagaatacttgcaattactaatgaccccttccctttccctcctgctgccctgtccaccctctttccccttctaacatccttagagggatgaaatctcagcatatgttgcaggacaccaaaaggaagaaaacaatcaagcaaataaaataaacagtcaaacaaaccaggagtttaaaacaacaaccccaacaacagaagccttggcaaagaggaataagtgatcagcaagtgaacacactctatgtcaactctccttttatccagctgagatttatggtaacttatttaattaatggtcctgtctgatgcatccttgatggcaagcttcaaatctgatttggtatcaccgaggaaaccttgcccccatcactcagcattgcacttagatacagaatgagttagataaacttggcttgtctagagacccatgtcatcttaacctaaagggaaatcttattgcgttatcataaaattgatgatatcttagggtcagaattgccctttttttttattttgaatgggaagttctcactaaaacaatcctgagatttcttaatttcatggttctttaaatattataaacacagagtcaacatagaatgaaattgtatttgttaaaatacacacattggaggacaagagcagatgactacttttcgaagtaatgctgctccttcctaaaagtctgttttcaatcctggtaatattaggggcactgcggcacctaagaagccttaaatgagagctaatccaatctagagagcgatggtgtcagcatttcggtctgcatatctgtgtgtccgtatctgcgtttgtgtgcgtgtacgtgtgcccctgtgtgtgggcccagttttcaggcatgtagaataagcatggagtcatattgaggaggactcacttcttgaagatatgcttgttgctttacaacatatgtaagctattctttagcataaatgcattcattctttaataaaaatatgtttgcattaataaagctgaggagtttcat

SEQ ID NO: 195819 - DNA, 747 bp, Artificial Sequence
  derived and/or modified sequence
atgcccagaatcgccggaaaccacctcatgctagaagaaagtaggacctgttcatccccagagctcctggatggagtgtggccatgccagcctctgcattttggcttacccgcttcggagatgcatttccagactatgctcaagagcaaactgaacgtgctcactctgaaaaaagagcccctgcctgctgtcatattccacgagcccgaggccatagagttgtgcaccacgaccccattgatgaagacccggacacacagtggctgcaaagtcacctacttgggaaaggtgtcaaccactgggatgcagtttctcagtggctgcactgaaaagcccgtcatcgagttgtggaagaagcacactctggctagagaagacgtgttcccagctaatgccctcctggaaatccgccctttccaggtatggctgcatcatctggatcacaaaggcgaggccactgtccacatggatacctttcaggtagccaggatcgcttattgcactgctgaccacaatgttagtccaaatattttcgcctgggtgtaccgagagatcaatgatgatttgagctaccagatggactgccacgccgtcgagtgcgaaagcaagcttgaggcaaaaaaacttgcacacgcgatgatggaggcctttaggaagacttttcactccatgaagtccgacgggaggatccattcgaactcgtcttcagaagaggtgtcacaagaattggagtcagacgatggatag

SEQ ID NO: 195820 - DNA, 747 bp, Artificial Sequence
  derived and/or modified sequence
atgcccagaatcgccggcaaccacctgatgctggaggagagcagaacctgcagcagccccgagctgctggacggcgtgtggccctgccagcccctgcacttcggcctgcccgccagcgagatgcacttccagaccatgctgaagagcaagctgaacgtgctgaccctgaagaaggagcccctgcccgccgtgatcttccacgagcccgaggccatcgagctgtgcaccaccacccccctgatgaagaccagaacccacagcggctgcaaggtgacctacctgggcaaggtgagcaccaccggcatgcagttcctgagcggctgcaccgagaagcccgtgatcgagctgtggaagaagcacaccctggccagagaggacgtgttccccgccaacgccctgctggagatcagacccttccaggtgtggctgcaccacctggaccacaagggcgaggccaccgtgcacatggacaccttccaggtggccagaatcgcctactgcaccgccgaccacaacgtgagccccaacatcttcgcctgggtgtacagagagatcaacgacgacctgagctaccagatggactgccacgccgtggagtgcgagagcaagctggaggccaagaagctggcccacgccatgatggaggccttcagaaagaccttccacagcatgaagagcgacggcagaatccacagcaacagcagcagcgaggaggtgagccaggagctggagagcgacgacggctag

SEQ ID NO: 195821 - protein, 1821 aa, Artificial Sequence
  derived and/or modified sequence
MSCERKGLSELRSELYFLIARFLEDGPCQQAAQVLIREVAEKELLPRRTDWTGKEHPRTYQNLVKYYRHLAPDHLLQICHRLGPLLEQEIPQSVPGVQTLLGAGRQSLLRTNKSCKHVVWKGSALAALHCGRPPESPVNYGSPPSIADTLFSRKLNGKYRLERLVPTAVYQHMKMHKRILGHLSSVYCVTFDRTGRRIFTGSDDCLVKIWATDDGRLLATLRGHAAEISDMAVNYENTMIAAGSCDKMIRVWCLRTCAPLAVLQGHSASITSLQFSPLCSGSKRYLSSTGADGTICFWLWDAGTLKINPRPAKFTERPRPGVQMICSSFSAGGMFLATGSTDHIIRVYFFGSGQPEKISELEFHTDKVDSIQFSNTSNRFVSGSRDGTARIWQFKRREWKSILLDMATRPAGQNLQGIEDKITKMKVTMVAWDRHDNTVITAVNNMTLKVWNSYTGQLIHVLMGHEDEVFVLEPHPFDPRVLFSAGHDGNVIVWDLARGVKIRSYFNMIEGQGHGAVFDCKCSPDGQHFACTDSHGHLLIFGFGSSSKYDKIADQMFFHSDYRPLIRDANNFVLDEQTQQAPHLMPPPFLVDVDGNPHPSRYQRLVPGRENCREEQLIPQMGVTSSGLNQVLSQQANQEISPLDSMIQRLQQEQDLRRSGEAVISNTSRLSRGSISSTSEVHSPPNVGLRRSGQIEGVRQMHSNAPRSEIATERDLVAWSRRVVVPELSAGVASRQEEWRTAKGEEEIKTYRSEEKRKHLTVPKENKIPTVSKNHAHEHFLDLGESKKQQTNQHNYRTRSALEETPRPSEEIENGSSSSDEGEVVAVSGGTSEEEERAWHSDGSSSDYSSDYSDWTADAGINLQPPKKVPKNKTKKAESSSDEEEESEKQKQKQIKKEKKKVNEEKDGPISPKKKKPKERKQKRLAVGELTENGLTLEEWLPSTWITDTIPRRCPFVPQMGDEVYYFRQGHEAYVEMARKNKIYSINPKKQPWHKMELREQELMKIVGIKYEVGLPTLCCLKLAFLDPDTGKLTGGSFTMKYHDMPDVIDFLVLRQQFDDAKYRRWNIGDRFRSVIDDAWWFGTIESQEPLQLEYPDSLFQCYNVCWDNGDTEKMSPWDMELIPNNAVFPEELGTSVPLTDGECRSLIYKPLDGEWGTNPRDEECERIVAGINQLMTLDIASAFVAPVDLQAYPMYCTVVAYPTDLSTIKQRLENRFYRRVSSLMWEVRYIEHNTRTFNEPGSPIVKSAKFVTDLLLHFIKDQTCYNIIPLYNSMKKKVLSDSEDEEKDADVPGTSTRKRKDHQPRRRLRNRAQSYDIQAWKKQCEELLNLIFQCEDSEPFRQPVDLLEYPDYRDIIDTPMDFATVRETLEAGNYESPMELCKDVRLIFSNSKAYTPSKRSRIYSMSLRLSAFFEEHISSVLSDYKSALRFHKRNTITKRRKKRNRSSSVSSSAASSPERKKRILKPQLKSESSTSAFSTPTRSIPPRHNAAQINGKTESSSVVRTRSNRVVVDPVVTEQPSTSSAAKTFITKANASAIPGKTILENSVKHSKALNTLSSPGQSSFSHGTRNNSAKENMEKEKPVKRKMKSSVLPKASTLSKSSAVIEQGDCKNNALVPGTIQVNGHGGQPSKLVKRGPGRKPKVEVNTNSGEIIHKKRGRKPKKLQYAKPEDLEQNNVHPIRDEVLPSSTCNFLSETNNVKEDLLQKKNRGGRKPKRKMKTQKLDADLLVPASVKVLRRSNRKKIDDPIDEEEEFEELKGSEPHMRTRNQGRRTAFYNEDDSEEEQRQLLFEDTSLTFGTSSRGRVRKLTEKAKANLIGW

SEQ ID NO: 195822 - DNA, 5466 bp, Artificial Sequence
  derived and/or modified sequence
atgtcatgtgagcggaagggattgtcagagcttcgaagcgagctgtattttttaatagcgcgctttctggaagacggcccttgccaacaggccgctcaagttctgatcagagaggtagccgagaaagagctgctgccacggcgcaccgactggactgggaaggaacacccacgcacctaccagaacttggtcaagtactatcggcacctggcccctgaccatcttctacagatatgccatcggttaggtcccctcctggagcaggaaatccctcagtccgtcccaggcgttcaaactttgctcggtgcgggacgacagtcgttacttaggaccaataagagctgtaagcatgtggtgtggaaggggagcgccctcgccgccctccattgtggccgcccacctgagtcacctgtgaattatgggtctccaccaagcatagctgacaccctcttcagcagaaagctgaacggtaagtataggctcgaacgtttagtccccactgcagtgtaccagcatatgaaaatgcacaaacggatactgggccaccttagctctgtctactgtgttacttttgaccgtaccgggaggagaatatttaccggttctgatgactgtctcgtcaagatatgggctacagacgatgggcgacttcttgccactctgaggggacatgccgccgagatctctgacatggctgttaactatgagaataccatgatcgccgcaggaagctgcgataaaatgataagggtttggtgtttacgcacatgcgcccctctggcggttttacaaggacactccgcaagcatcacaagcttgcagttctcacccctctgctccgggagcaaaaggtatctgagtagcacaggagctgacggcaccatttgcttttggctgtgggacgccggcactcttaaaattaaccctcgccccgccaagtttactgaaaggcctagaccaggtgttcagatgatttgctctagcttcagtgccgggggaatgtttctcgcaacaggatctaccgaccatatcatccgcgtgtacttcttcggctcaggccaaccagagaaaataagtgaattggagtttcacactgacaaagtcgattcgatccagtttagcaacacttcaaatagattcgtgtccgggagccgggacggcaccgctcggatctggcagttcaaaagacgcgaatggaagtcaattctactggatatggccaccaggcccgccggtcagaacttacagggtattgaggacaagattaccaagatgaaggtcactatggtggcatgggatcggcatgacaatacagtgattacagcggtcaacaatatgaccctgaaggtctggaacagctacacggggcaattgatccacgtgctgatggggcacgaagacgaggtatttgttctggagccccatcctttcgatcctcgggttttgtttagcgccgggcacgatggcaacgtgatcgtgtgggatctcgctaggggcgtcaagattcgatcatacttcaatatgatcgaaggacaaggtcatggagcagtctttgattgcaaatgttccccagatgggcagcatttcgcgtgcacagatagtcatggccatctgctcatttttggctttggctcctcgtctaagtatgacaagatagcagatcagatgttcttccatagcgactatcgaccactgattcgcgatgccaacaatttcgtgttggatgagcagacccagcaggctccacatctcatgccccctccttttcttgtcgatgtagatggcaatcctcacccctcccgctaccagagacttgtcccgggtcgagagaactgcagagaagaacaactcatacctcaaatgggggtcactagctcaggtctcaaccaggtgctatcccagcaagctaaccaggaaatttcacctttggattcgatgatacagcgactacagcaggagcaggaccttcgcagaagcggcgaggctgtgatatccaatacaagccgcctcagccgggggtctatcagctcaacaagcgaagtacactcccctccaaacgtcgggctgcgtcgctccggacagattgagggggtgcgacaaatgcattccaacgctcctaggagcgagattgctacagagagagatctcgtcgcttggtccagaagagtggtggtccccgaattgtctgcaggggtagcatcccgacaggaagagtggcgaaccgccaagggcgaggaggaaattaagacctacagaagcgaagagaaacggaagcacctcaccgtccctaaggagaacaagatacctaccgtgagtaagaaccacgcacacgagcactttttagatctcggagaaagcaaaaaacaacagacaaatcagcacaactacagaacaaggagcgccctggaggaaacccccagaccttccgaggagatagaaaatggctcatcaagctccgacgaaggagaagttgttgccgtgagtgggggtacgagtgaagaagaggaaagggcctggcactccgacgggtccagctctgactattccagcgattacagtgattggacagcagatgcaggcatcaacctgcagcctccaaagaaagtgccgaagaacaaaactaagaaagcagagtcatccagtgacgaggaagaagagtctgagaagcagaaacaaaagcaaatcaagaaagaaaaaaagaaagtaaatgaagaaaaggatgggcctattagcccaaagaagaagaagccgaaggagcgaaagcagaaaagactggctgttggagagctcaccgagaacgggctcaccctggaggaatggctgccttctacttggatcactgataccatcccccgtaggtgtccctttgtccctcagatgggtgacgaggtttactacttcagacagggacacgaagcatatgttgagatggccaggaaaaacaagatctacagcattaacccgaaaaagcagccctggcacaagatggaacttcgcgaacaggaactaatgaaaatcgtgggcattaagtacgaagttggtcttcccaccctgtgctgtctgaaactggccttcctagacccagatacgggcaagctcacaggaggatcctttactatgaaatatcacgatatgccagacgtcatcgattttttggtgctcagacagcagtttgatgacgcaaaatacagacggtggaacatcggtgaccgctttagaagcgtgattgatgacgcttggtggttcggcaccatagagagccaggagccccttcaattggagtatcccgatagcctgtttcagtgctataatgtgtgttgggacaatggagacactgagaagatgagtccttgggatatggagttgattcccaacaacgctgtctttccggaggagttgggtacctcagtaccactgactgatggcgagtgtcgctcgctcatctataagccactggatggcgaatggggaacgaatccccgggacgaggaatgcgaaaggattgtggcaggcatcaaccagttgatgacactggacatcgcctctgcctttgtggcacccgtcgatctgcaagcatatcccatgtactgcacagttgtggcctatccaactgatctcagcacaatcaaacagagactcgagaaccgtttctacaggcgggtcagcagcctgatgtgggaggtgaggtatatcgagcacaataccaggactttcaatgaacccggaagtccaatcgtgaagtctgccaagttcgtgactgatctgttactgcatttcatcaaggaccagacgtgttataatatcattcccctgtacaacagtatgaagaaaaaggtcctgtccgactctgaggatgaggaaaaggatgctgatgtccccggcacatccacgcggaaaaggaaggaccaccaaccgcgccgtaggcttaggaaccgcgctcaaagctatgacatacaagcttggaagaaacaatgcgaagaactgcttaacttgatatttcagtgtgaagacagcgagcccttcaggcagcctgtggatctcctggagtaccccgactaccgtgatattatcgacactcccatggacttcgcaaccgtgcgtgaaaccctggaggcaggtaattatgaatctcccatggagctgtgcaaggacgttagactgatttttagcaactcaaaagcttatacaccaagcaagagatcccgaatatatagcatgagtcttcgactctctgcgttctttgaggagcatataagttccgtgttgtccgattacaaatcagccctgaggtttcacaaacggaacacaattacaaagagacgcaaaaagaggaatagatcgtcaagcgtgtcatcttctgctgcctcctcccccgaaaggaaaaagaggattcttaagccacagctgaaaagcgaatcaagcacctctgcctttagcaccccaaccaggagtataccgccacgccataacgccgcccagattaacggcaagaccgaatcttcttccgtggtacggacccggagcaacagggtagtggtggacccagtggtaacggaacagccaagtacttcttccgcagcgaagactttcatcactaaagccaacgcttccgccattcctggaaaaaccatcctggagaattccgtgaagcacagtaaagctttaaatactctttctagccctggtcaaagcagcttcagtcatggcacccgcaacaactcagccaaagagaacatggaaaaggagaagcccgtcaagcgaaaaatgaagagcagcgtgcttcccaaggccagtaccttgtctaagagttcggctgtgattgagcaaggggattgcaagaataatgccctggtcccgggtactatacaggtgaatggacatggtggccagcctagcaagctggtgaagcgtggaccgggcaggaagcctaaggtggaagttaacaccaacagtggggagataatacacaagaaaagaggacgcaagccgaaaaaactgcagtatgccaagcctgaggacctggagcagaataacgtccacccgatacgggatgaagttctgccatcctcaacttgtaattttctgtccgaaactaacaacgttaaggaagacttgcttcagaaaaaaaaccgcggcgggcgtaagccaaagaggaagatgaagacccaaaagctggacgcggacctgcttgtgccggcgtctgtgaaggttttgcgtcgttcaaaccggaaaaagatcgatgaccccattgatgaggaggaggaattcgaggagctgaagggctctgagccacatatgaggacccgcaatcaaggccggaggaccgctttctacaatgaagacgatagcgaagaggaacaacggcagctgttatttgaggatacttccctgacattcggaacctcctcacggggtcgagtgaggaaactcactgaaaaggcgaaggcaaatctgatcggctggtag

SEQ ID NO: 195823 - DNA, 5466 bp, Artificial Sequence
  derived and/or modified sequence
atgagctgtgagaggaagggcctgtctgagctgcggtctgagctgtacttcctgattgcccgcttcctggaggatggcccctgccagcaggccgcccaggtgctgatccgggaggtggccgagaaggagctgctgcccaggagaacagactggacaggcaaggagcaccccaggacctaccagaacctggtgaagtactaccgccacctggccccagaccacctgctgcagatctgccaccggctgggccccctgctggagcaggagatcccccagagcgtgcctggggtgcagaccctgctgggcgccggccggcagagcctgctgcggaccaacaagagctgcaagcacgtggtgtggaagggcagcgccctggccgccctgcactgcggccggcccccagagagccctgtgaactacggcagccccccatccattgctgacaccctcttcagcaggaagctgaatggcaagtaccgcctggagcggctggtgcccacagctgtgtaccagcacatgaagatgcacaagaggatcctgggccacctgagctctgtgtactgtgtgacctttgacagaacaggccgccgcatcttcaccggcagtgatgactgcctggtgaagatctgggccacagatgatggccgcctgctggccaccctgcggggccatgctgctgagatcagtgacatggctgtgaactatgagaacaccatgattgctgctggcagctgtgacaagatgatccgggtgtggtgcctgcggacctgtgcccccctggccgtgctgcagggccacagcgccagcatcaccagcctgcagttcagccccctgtgcagcggcagcaagcgctacctgagcagcactggagcagatggcaccatctgcttctggctgtgggatgctggcaccctgaagatcaaccccaggcctgccaagttcacagagcggcccaggcctggggtgcagatgatctgcagcagcttctctgctgggggcatgttcctggccaccggcagcacagaccacatcatccgggtgtacttcttcggcagcggccagcctgagaagatcagcgagctggagttccacacagacaaggtggacagcatccagttcagcaacaccagcaacagatttgtgtctggcagcagagatggaacagcccgcatctggcagttcaagaggcgggagtggaagagcatcctgctggacatggccaccaggcctgctggccagaacctgcagggcatcgaggacaagatcaccaagatgaaggtgaccatggtggcctgggacagacatgacaacacagtcatcacagctgtgaacaacatgaccctgaaggtgtggaacagctacacaggccagctgatccacgtgctgatgggccatgaagatgaggtgtttgtgctggagccccacccctttgacccccgggtgctcttctctgctggccatgatggaaatgtcatcgtgtgggacctggcccggggcgtgaagatccgcagctacttcaacatgattgagggccagggccacggggctgtgtttgactgcaagtgcagcccagatggccagcactttgcctgcacagacagccacggccacctgctgatctttggatttggcagcagcagcaaatatgacaagattgctgaccagatgttcttccacagcgactaccggcccctcatcagagatgccaacaactttgtgctggatgagcagacccagcaggccccccacctgatgcccccacccttcctggtggatgtggatggcaacccccaccccagccgctaccagaggctggtgcccggccgggagaactgccgggaggagcagctgatcccccagatgggcgtgaccagcagcggcctgaaccaggtgctgagccagcaggccaaccaggagatcagccccctggacagcatgatccagaggctgcagcaggagcaggacctgcggcgctctggagaggccgtcatcagcaacaccagccggctgagccggggcagcatcagcagcaccagcgaggtgcacagcccccccaacgtgggcctgcggcgcagcggccagattgaaggagtgcggcagatgcacagcaatgcccccaggtctgagatcgccacagagcgggacctggtggcctggagcagaagagtggtggtgcctgagctgtctgctggggtggccagccggcaggaggagtggaggacagccaagggggaggaggagatcaagacctacagaagtgaggagaagaggaagcacctgactgtgcccaaggagaacaagatccccaccgtgtccaagaaccacgcccacgagcacttcctggacctgggggagagcaagaagcagcagaccaaccagcacaactaccgcaccaggtctgccctggaggagaccccccggcccagcgaggagattgaaaatggcagcagcagcagtgatgaaggagaggtggtggccgtgtctgggggcaccagcgaggaggaggagcgggcctggcacagtgatggcagcagcagtgactacagcagtgactacagcgactggacagcagatgctggcatcaacctgcagccccccaagaaggtgcccaagaacaagaccaagaaggccgagagcagcagtgatgaggaggaggagagcgagaagcagaagcagaagcagatcaagaaggagaagaagaaggtgaatgaggagaaggatggccccatcagccccaagaagaagaagcccaaggagaggaagcagaagaggctggccgtgggggagctgacagaaaatggcctgaccctggaggagtggctgcccagcacctggatcacagacaccatcccccggcgctgcccctttgtgccccagatgggagatgaggtgtactacttccggcagggccacgaggcctacgtggagatggccaggaagaacaagatctacagcatcaaccccaagaagcagccctggcacaagatggagctgcgggagcaggagctgatgaagatcgtgggcatcaagtatgaggtgggcctgcccaccctgtgctgcctgaagctggccttcctggaccctgacaccgggaagctgaccggcggcagcttcaccatgaagtaccatgacatgccagatgtgattgacttcctggtgctgcggcagcagtttgatgatgccaagtaccgccgctggaacatcggggaccgcttccgctctgtgattgatgatgcctggtggtttggcaccatcgagagccaggagcccctgcagctggagtacccagacagcctcttccagtgctacaacgtgtgctgggacaatggagacacagagaagatgagcccctgggacatggagctgatccccaacaatgctgtgtttcctgaggagctgggcacctctgtgcccctgacagatggagaatgtcgcagcctcatctacaagcccctggatggagagtggggcaccaaccccagagatgaggagtgtgagcgcatcgtggccggcatcaaccagctgatgaccctggacatcgccagcgcctttgtggcccctgtggacctgcaggcctaccccatgtactgcaccgtggtggcctaccccacagacctgagcaccatcaagcagaggctggagaaccgcttctacagaagagtgagcagcctgatgtgggaggtgcgctacatcgagcacaacaccaggaccttcaatgaacctggcagccccatcgtgaagagcgccaagtttgtgacagacctgctgctgcacttcatcaaggaccagacctgctacaacatcatccccctgtacaacagcatgaagaagaaggtgctgagtgacagtgaagatgaggagaaggatgctgatgtgcccggcaccagcaccaggaagaggaaggaccaccagccccggcggcggctgaggaacagagcccagagctatgacatccaggcctggaagaagcagtgtgaggagctgctgaacctgatcttccagtgtgaggacagcgagcccttccggcagcctgtggacctgctggagtacccagactacagagacatcatcgacacccccatggactttgccaccgtgcgggagaccctggaggccggcaactatgagagccccatggagctgtgcaaggatgtgcggctcatcttcagcaacagcaaggcctacacccccagcaagaggagccgcatctacagcatgagcctgcggctgagcgccttctttgaggagcacatcagctctgtgctgagtgactacaagagcgccctgcgcttccacaagaggaacaccatcaccaagaggaggaagaagaggaacagaagcagctctgtgagcagcagcgctgccagcagccctgagaggaagaagaggatcctgaagccccagctgaagtctgagagcagcaccagcgccttcagcacccccaccaggagcatcccccccaggcacaatgctgcccagatcaatggcaagacagagagcagctctgtggtgaggaccaggagcaacagagtggtggtggaccctgtggtgacagagcagcccagcaccagcagcgctgccaagaccttcatcaccaaggccaatgccagcgccatccctgggaagaccatcctggagaacagcgtgaagcacagcaaggccctgaacaccctgagcagccctggccagagcagcttcagccacggcaccaggaacaacagcgccaaggagaacatggagaaggagaagcctgtgaagaggaagatgaagagctctgtgctgcccaaggccagcaccctgagcaagagcagcgctgtgattgagcagggcgactgcaagaacaatgccctggtgcccggcaccatccaggtgaatggacatggaggccagcccagcaagctggtgaagaggggccctggcaggaagcccaaggtggaggtgaacaccaacagcggggagatcatccacaagaagaggggcaggaagcccaagaagctgcagtatgccaagccagaggacctggagcagaacaacgtgcaccccatcagagatgaggtgctgcccagcagcacctgcaacttcctgtctgagaccaacaacgtgaaggaggacctgctgcagaagaagaacagaggaggcaggaagcccaagaggaagatgaagacccagaagctggatgctgacctgctggtgcctgcctctgtgaaggtgctgcggcgcagcaacaggaagaagattgatgaccccattgatgaggaggaggagtttgaggagctgaagggcagcgagccccacatgaggaccaggaaccagggcagaagaacagccttctacaatgaagatgattctgaggaggagcagaggcagctgctgtttgaggacaccagcctgaccttcggcaccagcagccggggccgggtgaggaagctgacagagaaggccaaggccaacctgattggctggtag

SEQ ID NO: 195824 - DNA, 5466 bp, Artificial Sequence
  derived and/or modified sequence
atgagctgcgagcggaagggcctgagcgagctgcggagcgagctgtactttttgattgctcgattcctggaggacgggccctgccagcaagccgcccaggtccttattcgcgaggtcgctgagaaagaactgctgcccaggcgcaccgactggaccggcaaagagcatccccggacctaccagaacctagttaagtactaccggcacttggctcccgaccatctgttgcagatctgtcataggctgggcccacttctggagcaagagattccccagagcgttcctggcgtacagacattgctgggcgctgggcggcaaagcttattgagaacaaacaagtcttgtaagcatgtagtctggaaaggatccgcccttgcggccctgcattgcggcagaccgcccgaatctcccgttaattacggctcccccccctcaattgctgataccttatttagtcgtaaactgaacggcaaatatcgtttggagcggctggtcccaaccgccgtatatcaacacatgaaaatgcataaaaggatactcggccaccttagctccgtttactgtgtcacattcgatcgtacaggacgtcgtattttcacaggcagcgatgactgtctggtaaagatctgggccacggacgacggtagattactcgcaaccctgagaggtcatgcggcagagattagtgacatggccgtgaattatgagaatactatgatcgctgctggcagctgtgataagatgatccgggtgtggtgcctgcggacatgcgccccattagcagtgctgcaaggccattccgccagtattacctctttacagtttagtcctctctgcagcgggtcgaagagatacctttcaagcaccggagccgacggaacgatttgtttttggctgtgggatgccgggaccctaaaaattaacccccgccccgcaaagtttactgaacggccccggccgggcgtgcagatgatttgcagctccttctccgccgggggcatgttccttgcaaccggctccacggaccatatcattcgtgtgtacttcttcggatctgggcagcccgaaaagatttcagagcttgaatttcacactgataaagttgatagtatccagtttagcaacacatccaacaggttcgtgagtggatcaagggacggtacagcccgcatttggcagttcaagaggagggaatggaagtctattctgctagacatggcaaccagacccgcgggacagaatctgcagggaatcgaggacaagattactaaaatgaaagtcaccatggtagcatgggacaggcacgataacacagttattacagccgtgaataacatgaccttaaaggtgtggaactcctatacagggcagctcattcacgtcctgatgggacacgaagacgaggtttttgtgcttgagccgcatccttttgatcccagggtcttattctccgctggccatgatgggaatgtaatcgtgtgggacctcgcaagaggcgttaagattcgctcctattttaatatgattgaagggcagggtcatggcgcggtgtttgactgcaagtgcagccccgacggtcaacactttgcctgcacagatagccacggtcacctgctcatcttcggctttggcagctcatcgaaatacgataagatcgctgatcagatgtttttccacagcgactaccgccccctaattagggatgccaataatttcgtgctggacgagcagacgcagcaggcgcctcatctgatgccccctccattcctggtcgatgtcgacgggaacccgcacccatcacgctaccaaagactagttcctggcagggaaaattgccgcgaggagcagctgatcccccagatgggagtgacgtcctccggtctcaaccaggttttatcgcagcaggcgaaccaagagatctcaccgctggacagtatgatccagcgtcttcaacaagagcaggatctgcgcaggagcggagaggcggtcatctctaacacttccagactctctcggggttcgatcagctcaaccagcgaagtgcactcgccacctaacgtgggtctgcgaaggagcgggcagatcgaaggcgtgcggcagatgcatagcaatgcccctcgctctgaaattgccacagagcgggacttggtagcgtggtcacggcgggtagtggttccagagctgtcagccggcgtggccagtaggcaggaagaatggagaacggccaagggggaagaagaaatcaagacgtacaggtccgaggagaaaagaaaacacttaacggtcccaaaagaaaacaaaatccctactgtcagtaaaaaccacgcccatgagcatttcttagatctaggggagtccaagaaacaacagaccaaccagcacaactatcggactcggtccgccctcgaagaaacacctcgaccaagcgaggagatagagaacggctcctcatcttcagacgaaggcgaggtcgtggcagtgagcggagggacttcagaggaggaggagcgggcttggcactctgacgggtccagctctgactacagcagtgactatagtgattggactgctgacgccgggatcaatctgcagcctccaaaaaaagtccctaagaacaaaactaagaaagccgaatcctctagtgatgaggaggaagagagtgaaaagcagaagcagaaacagatcaagaaagagaagaagaaagtgaacgaagagaaggacggacccatcagccctaaaaagaagaaacccaaggaacgcaagcaaaagcgcctggcggtaggagagctgaccgagaacgggctgacactagaagagtggcttccaagcacctggatcacagatacaatcccacgaaggtgccccttcgtgcctcagatgggcgatgaagtttactactttcgtcagggccacgaagcatacgtggaaatggcccgaaagaacaaaatctactcaatcaatcctaaaaagcagccctggcacaaaatggagcttagggaacaggaattaatgaagatcgtcggaataaagtacgaggtcgggttgcccaccctgtgctgcctcaaactcgcctttctcgaccctgacactggaaagctcactgggggcagtttcactatgaaataccacgacatgcccgacgttatagactttcttgtgctgcgacaacaattcgacgatgccaagtaccgcagatggaatatcggcgatagattcaggagcgttattgacgacgcctggtggttcggaaccatcgaaagtcaggagcctctgcagctggagtaccccgacagcctgttccagtgctataatgtgtgttgggataatggtgataccgagaaaatgtctccctgggatatggagctgattccgaataacgcagtgtttcccgaagagctgggaacaagcgtgccgctaacagatggagagtgcagaagccttatttataagcctttggatggagagtgggggaccaatcctagagacgaagaatgcgaaaggatagtcgctggcatcaaccaactcatgacactggatattgcctcagctttcgtggctccagttgacttacaggcttatccaatgtactgcaccgtagtagcctatcccaccgatctctctactatcaagcagcgcctagaaaatcggttttaccgcagggtgagcagcctgatgtgggaagtgcggtatatcgaacacaatacacgcacattcaatgagcccggatcccccatcgtcaaaagtgccaaatttgtgaccgaccttctgctgcatttcatcaaggatcagacttgctacaatatcatccccttgtataacagcatgaaaaagaaagttctaagtgactccgaagacgaagaaaaggacgcagatgtgcccggcacatcaactcgcaaaaggaaggatcaccaacccagaagacgcctgcggaacagggctcaatcatacgacatacaggcctggaaaaagcagtgtgaggagctacttaatttgatcttccaatgcgaggattccgaaccattccgacaacccgtggacctgctggagtacccagactacagagacataatcgacactccaatggacttcgcaacagtgagagaaacactcgaagccgggaactatgagtccccaatggaactctgtaaagatgtgaggttaatcttctccaactccaaggcctataccccgtctaaaagaagccgcatatatagcatgtccctgcgcctgagtgccttcttcgaagaacacatctcatcagtgttgtccgattacaaatctgccctccggtttcataaaagaaacacaatcactaagagaagaaagaagcgcaaccgctcctcttcagtgagcagctccgctgccagtagccccgaacggaaaaagagaatcctgaagcctcagctcaaaagcgaaagctccacatccgccttttctacccctacaaggagcatccccccccgccataacgctgcccagatcaatggaaaaacggaaagctccagcgtggtccggaccaggtctaatcgagttgtggtcgatcccgttgtgacagagcagccgtccacgagcagtgccgccaagacattcatcactaaggcaaatgcatccgccattcccgggaaaactattcttgagaattctgtgaaacattctaaggcactaaatacactctcctctcctggccagtccagcttttcccacggtacccgaaataacagcgcaaaggaaaatatggaaaaagagaagcccgttaaaaggaagatgaagtcgtcagtacttcccaaggcttcaaccctgtccaagagctctgccgttatagagcagggagattgtaagaataacgcgctcgttccagggaccatacaggtcaacggccatgggggacagccttccaaactggttaaacgtggccctgggagaaagcctaaagtagaggtgaatactaattcaggagagataatacataaaaagcggggcagaaagccgaagaaacttcagtatgctaagcctgaagatctcgagcagaacaatgtccatcctattcgggatgaggtcctgccctcatccacttgcaatttcctatctgaaaccaacaatgtcaaagaggacctgctccagaagaaaaaccggggcggacggaaaccgaagcggaagatgaaaacccagaagctggacgccgatctgcttgtgccggcctctgtaaaggtgctgaggagaagcaacaggaagaagatcgacgaccctatcgacgaagaggaagagttcgaagagctaaagggatcagagccacacatgcggacgcgcaaccagggccggcgcaccgcattttataacgaagatgattcagaagaggagcagcgccagctgctgtttgaagacacttctctcaccttcggtacgtcgagccgaggaagggtgcggaaactcacggagaaggccaaggctaacttgatcggctggtag

SEQ ID NO: 195825 - DNA, 5781 bp, Artificial Sequence
  derived and/or modified sequence
gttgtttcctcctcctcctcctccgcctccgccgccgttgcttgaatggtggagccgaagctcggctcgtgaacacacactgacagctatagggcaggcggcggcaccgtccccgcttcccctcggcggcggggtgtcccgtcggcggccctgaagtgacccataaacatgtcttgtgagaggaaaggcctctcggagctgcgatcggagctctacttcctcatcgcccggttcctggaagatggaccctgtcagcaggcggctcaggtgctgatccgcgaggtggccgagaaggagctgctgccccggcgcaccgactggaccgggaaggagcatcccaggacctaccagaatctggtgaagtattacagacacttagcacctgatcacttgctgcaaatatgtcatcgactaggacctcttcttgaacaagaaattcctcaaagtgttcctggagtacaaactttattaggagctggaagacagtctttactacgcacaaataaaagctgcaagcatgttgtgtggaaaggatctgctctggctgcgttgcactgtggaagaccacctgagtcaccagttaactatggtagcccacccagcattgcggatactctgttttcaaggaagctgaatgggaaatacagacttgagcgacttgttccaactgcagtgtatcagcacatgaaaatgcataaacgaattcttggacacttgtcatctgtgtactgtgtaacttttgatcgaactggcagacggatatttactggttctgatgactgtcttgtgaaaatatgggcaacagatgatgggaggttgttagctaccttaagaggacatgctgctgaaatatcagacatggctgtaaactatgagaataccatgatagcagctggaagttgtgataaaatgatccgagtctggtgtcttcgaacctgtgcacctttggctgttcttcagggccatagtgcatctattacatcactacagttctcaccattgtgcagtggctcaaagagatatctatcttctactggggcagatggcactatttgtttttggctctgggatgctggaacccttaaaataaacccaagacctgcaaaatttacagagcgccctcggcctggagttcaaatgatctgttcttcttttagtgctggtggaatgtttctggcgacgggaagcacagatcatattattcgggtttatttttttggatcaggtcagccagagaaaatatcagaattggagtttcatactgacaaagttgacagtatccagttttccaacactagtaacaggtttgtaagtggcagtcgtgatgggacagcacgtatttggcaatttaaacgaagagagtggaagagcattttgttggatatggctactcgtccagcaggccaaaaccttcaaggaatagaagataaaatcacaaaaatgaaggttactatggtagcttgggatcgacatgacaatacagttataactgcagttaataacatgactctgaaagtttggaattcttacactggtcaactaattcatgtcctgatgggtcatgaagatgaggtatttgttcttgaaccacacccgttcgatcctagagttctcttttctgctggtcatgatggaaacgtgatagtgtgggatctggcaagaggagtcaaaatacgatcttatttcaatatgattgaaggccaaggacatggcgcagtatttgactgcaaatgctctcctgatggtcagcattttgcatgcacagactctcatggacatcttttaatttttggctttgggtccagtagcaaatatgacaagatagcagatcagatgttctttcatagtgattatcggccacttattcgtgatgccaacaattttgtattagatgaacagactcagcaagcacctcatcttatgcctcccccttttttggttgatgttgatggtaaccctcatccatcaagatatcaaagattagttcctggccgtgaaaattgcagggaggagcaactcatccctcagatgggagtaacttcctcaggactgaatcaagttttaagtcagcaagcaaaccaggagatcagcccactggacagcatgattcaaagactacaacaggagcaagacctgagacgttctggtgaagcagttatcagtaataccagccgtttaagtagaggctccataagttctacctcagaggttcattcaccaccaaacgtaggactaagacgtagtggacaaattgaaggtgtacggcaaatgcacagcaacgcaccaagaagtgaaatagccacagagcgggatctggtagcttggagtcgaagggtggtagtacccgagctatcagctggtgtagccagtaggcaagaagaatggagaactgcaaagggagaagaagaaataaagacttacaggtcagaagagaaaagaaaacacttaactgttccaaaagagaataaaatacccactgtctcaaagaatcatgctcatgagcatttcctggatcttggagaatccaaaaagcaacagacaaatcaacacaattatcgtacaagatctgcattggaagagactcctagaccctcagaagagatagaaaatggcagtagttcttcagatgaaggcgaagtagttgctgtcagtggtggaacatccgaagaagaagagagagcatggcacagtgatggcagttctagtgactactccagtgattactctgactggacagcagatgcaggaattaatctgcagccaccaaagaaagttcctaagaataaaaccaagaaagcagaaagcagttcagatgaagaagaagaatctgaaaaacagaagcaaaaacagattaaaaaggaaaagaaaaaagtaaatgaagaaaaagatggaccaatatcaccaaagaaaaagaagcccaaagaaagaaaacaaaagagattggctgtgggagaactaactgaaaatggtttgacattagaagaatggttgccatcaacatggattacagataccattccccgaagatgtccatttgtgccacagatgggtgatgaggtttattatttccgacaaggacatgaagcctatgtcgaaatggcccggaaaaataaaatatatagtatcaatcccaaaaaacaaccatggcataaaatggagctacgggaacaagaacttatgaaaatagttggcataaagtatgaagtgggattacctaccctttgctgccttaaacttgcttttctagatcctgatactggtaaactgactggcggatcatttaccatgaaataccatgatatgcctgacgttatagatttcctagtcttgagacaacaatttgatgatgcaaaatacaggcgatggaatataggtgaccgcttcaggtctgtcatagatgatgcctggtggtttggaacaatcgaaagccaggaacctcttcaacttgagtaccctgatagtctgtttcaatgctacaatgtttgctgggacaatggagatacagaaaagatgagtccttgggatatggagcttatacctaataatgctgtatttcctgaagaactaggtaccagtgttcctttaactgatggtgagtgcagatcactaatctataaacctcttgatggagaatggggtaccaatcccagggatgaagaatgtgaaagaattgtggcaggaataaaccagttgatgacactagatattgcctcagcatttgtggcccccgtggatctgcaagcctatcccatgtattgcacagtagtggcatatccaacggatctaagtacaattaaacaaagactggaaaacaggttttacaggcgggtttcttccctaatgtgggaagttcgatatatagagcataatacacgaacatttaatgagcctggaagccctattgtgaaatctgctaaattcgtgactgatcttcttctacattttataaaggatcagacttgttataacataattccactttataattcaatgaagaagaaagttttgtctgattctgaggatgaagagaaagatgctgatgtgccaggaacttctactcgaaaaaggaaggaccatcagcctagaagaagattacgtaatagagcccagtcttacgatattcaagcatggaagaaacagtgtgaagaattgttaaatctcatatttcaatgtgaagattcagagcctttccgtcagccggtagatctccttgaatatccagactacagagacatcattgacactccaatggattttgctaccgttagagaaactttagaggctgggaattatgagtcaccaatggagttatgtaaagatgtcagacttattttcagtaattccaaagcatatacaccaagcaaaagatcaaggatttacagcatgagtttgcgcctgtctgctttctttgaagaacacattagttcagttttatcagattataaatctgctcttcgttttcataaaagaaataccataaccaaaaggaggaagaaaagaaacagaagcagctctgtttccagtagtgctgcatcaagccctgaaaggaaaaaaaggatcttaaaaccccagctaaaatcagaaagctctacctctgcattctctacacctacacgatcaataccgccaagacacaatgctgctcagataaacggtaaaacagaatctagttctgtggttcgaaccagaagcaaccgagtggttgtagatccagttgtcactgagcaaccatctacttcttcagctgcaaagacttttattacaaaagctaatgcatctgcaataccagggaaaacaatactagagaattctgtgaaacattccaaagctttgaatactctttccagtcctggtcaatccagttttagtcatggcactaggaataattctgcaaaagaaaacatggaaaaggaaaagccagtcaaacgtaaaatgaagtcatctgtactcccaaaggcgtccactctttcaaagtcatcagctgtcattgagcaaggagattgtaagaacaacgctcttgtaccaggaaccattcaagtaaatggccatggaggacagccatcaaaacttgtgaagaggggacctggaaggaaacctaaagtagaagttaataccaatagtggtgaaattatacacaagaaaaggggtagaaagcccaaaaagctacagtatgcaaagccagaagatttagagcaaaataatgtgcatcccatcagagatgaagtacttccttcttcaacatgcaattttctttctgaaactaataatgtaaaggaagatttgttacagaaaaagaatcgtggaggtaggaagcccaaaaggaagatgaagacacaaaaattagatgcagatctcctagtccctgcaagtgtcaaagtgttaaggagaagtaaccgaaaaaagatagatgatcctatagatgaggaagaagagtttgaagaactcaaaggctctgaaccccacatgagaactagaaatcaaggtcgaaggacagctttctataatgaggatgactctgaagaggagcaaaggcagctgttgttcgaagacacctctttaacttttggaacttctagtagaggacgagtccgaaagttgactgaaaaagcaaaagctaatttaattggttggtaacttgtaccaaaatattttacttcaaaatctataaagcaggtacagttaaggaataagtagaactaaggcttctgcttccttgctgctgtggtggagtagggaatgttatgatttgatttgcaaaaaaaaaaaaaaaaaaaaaaacaa

SEQ ID NO: 195826 - DNA, 1896 bp, Artificial Sequence
  derived and/or modified sequence
tatatagagcataatacacgaacatttaatgagcctggaagccctattgtgaaatctgctaaattcgtgactgatcttcttctacattttataaaggatcagacttgttataacataattccactttataattcaatgaagaagaaagttttgtctgattctgaggatgaagagaaagatgctgatgtgccaggaacttctactcgaaaaaggaaggaccatcagcctagaagaagattacgtaatagagcccagtcttacgatattcaagcatggaagaaacagtgtgaagaattgttaaatctcatatttcaatgtgaagattcagagcctttccgtcagccggtagatctccttgaatatccagactacagagacatcattgacactccaatggattttgctaccgttagagaaactttagaggctgggaattatgagtcaccaatggagttatgtaaagatgtcagacttattttcagtaattccaaagcatatacaccaagcaaaagatcaaggatttacagcatgagtttgcgcctgtctgctttctttgaagaacacattagttcagttttatcagattataaatctgctcttcgttttcataaaagaaataccataaccaaaaggaggaagaaaagaaacagaagcagctctgtttccagtagtgctgcatcaagccctgaaaggaaaaaaaggatcttaaaaccccagctaaaatcagaaagctctacctctgcattctctacacctacacgatcaataccgccaagacacaatgctgctcagataaacggtaaaacagaatctagttctgtggttcgaaccagaagcaaccgagtggttgtagatccagttgtcactgagcaaccatctacttcttcagctgcaaagacttttattacaaaagctaatgcatctgcaataccagggaaaacaatactagagaattctgtgaaacattccaaagctttgaatactctttccagtcctggtcaatccagttttagtcatggcactaggaataattctgcaaaagaaaacatggaaaaggaaaagccagtcaaacgtaaaatgaagtcatctgtactcccaaaggcgtccactctttcaaagtcatcagctgtcattgagcaaggagattgtaagaacaacgctcttgtaccaggaaccattcaagtaaatggccatggaggacagccatcaaaacttgtgaagaggggacctggaaggaaacctaaagtagaagttaatatagtggtgaaattatacacaagaaaaggggtagaaagcccaaaaagctacagtatgcaaagccagaagatttagagcaaaataatgtgcatcccatcagagatgaagtacttccttcttcaacatgcaattttctttctgaaactaataatgtaaaggaagatttgttacagaaaaagaatcgtggaggtaggaagcccaaaaggaagatgaagacacaaaaattagatgcagatctcctagtccctgcaagtgtcaaagtgttaaggagaagtaaccgaaaaaagatagatgatcctatagatgaggaagaagagtttgaagaactcaaaggctctgaaccccacatgagaactagaaatcaaggtcgaaggacagctttctataatgaggatgactctgaagaggagcaaaggcagctgttgttcgaagacacctctttaacttttggaacttctagtagaggacgagtccgaaagttgactgaaaaagcaaaagctaatttaattggttggtaacttgtaccaaaatattttacttcaaaatctataaagcaggtacagttaaggaataagtagaactaaggcttctgcttccttgctgctgtggtggagtagggaatgttatgatttgatttgc

SEQ ID NO: 195827 - DNA, 5466 bp, Artificial Sequence
  derived and/or modified sequence
atgagttgcgagagaaaaggtttgtctgaactccgaagtgagctgtactttctgatcgcccgattccttgaggatgggccttgtcaacaggctgcgcaggtactcatccgagaggtggcggaaaaggagttgctccccagaagaaccgattggacagggaaggaacatccgcgaacttaccaaaatttagtgaagtattatcgacacctggctcctgatcatctgctgcagatttgccacagactcggaccgctgcttgaacaagaaataccccaaagtgtgcccggagtccagaccttgttaggagctgggaggcaatcactgctccggactaacaagagctgcaaacacgttgtgtggaaggggtctgccttggcggctctgcattgcgggagacctccagagtcccctgtgaactacggctcccccccatcaatcgcagataccctattttcacgcaagctcaatggaaaataccgattggagagactcgtgcctactgccgtctatcagcacatgaagatgcacaaacgcatcctggggcacctgtcctcagtctattgcgtaacctttgacaggaccggacggagaatcttcactggatccgacgattgtttagtgaaaatctgggcaactgacgacggcaggctcctcgccacattgaggggccatgcggcagaaatcagtgatatggcagtgaactacgagaatacgatgattgctgcaggttcgtgtgacaaaatgatccgagtatggtgcctgaggacctgcgcgcctctcgctgtgctacaaggacactccgctagcatcacttctcttcaattttctccactgtgtagtgggagtaaacgctacctgtcatctactggcgcagatgggacaatttgtttttggctttgggacgcaggcaccctgaaaatcaaccctaggccagccaagtttacggaaagacccaggccgggagtgcagatgatttgcagttcattcagcgccggaggtatgtttcttgctacgggcagcacagaccacataattcgagtttatttctttgggtctggccagcccgagaaaatctccgagcttgagttccatactgacaaagtcgactcaattcaattctcaaacacctctaacagattcgtgtcagggagccgcgatggtaccgctcggatctggcagttcaagagaagagagtggaagtctattctcctggacatggcgacgaggcccgcagggcagaatctgcagggtatcgaggacaaaatcacaaaaatgaaggtcaccatggtagcctgggataggcacgataacaccgttattaccgcagtaaataatatgactctgaaggtgtggaatagttatacaggccagcttattcacgtgcttatgggccatgaggacgaggtgttcgtgttggagcctcatccctttgacccccgtgtgctctttagcgccggacacgacggtaacgttatagtttgggaccttgcaagaggcgtaaagatacgtagctacttcaatatgatcgagggccagggccacggcgcagtgttcgattgtaagtgcagtcccgatggtcaacacttcgcttgcaccgattcacatggacaccttctcatcttcggcttcgggtctagtagcaagtacgacaagatagccgatcaaatgttttttcattctgattatcgtccactgatcagggatgccaacaacttcgtgttggacgagcagactcagcaagctccccacctgatgcctcctccgtttctcgtggacgtggacggtaatccgcatccttcacggtaccagcgccttgtgcccggacgagagaattgtagggaggagcagttgatccctcagatgggagtgacttcttccggactgaatcaagtactatctcagcaggccaatcaagaaatcagcccactggacagtatgatccagcggcttcagcaggagcaggacctgcggcgtagtggcgaggccgtgatctccaatacttccagactgtctcgcggtagtatttcttcgacatccgaagtgcatagtcctccaaacgtggggcttaggcgctccgggcagatcgagggtgtcagacaaatgcactcgaatgcacctcgatctgagatcgcaacggaaagagatttagttgcctggagtcgtagggttgtggtgccagagttaagcgcaggcgtggcctcaagacaggaggagtggaggacagccaaaggtgaagaggaaatcaaaacctaccgcagcgaagagaaacggaagcacctgaccgtgccaaaggagaataaaatcccgacggtctctaagaatcacgcccatgagcacttcctcgaccttggggaatccaaaaaacaacagaccaaccagcacaattaccgcacccggagcgccctggaggagacccctcgaccaagtgaagaaattgaaaatggctccagctccagcgacgagggggaagttgtcgccgtctctggcggaacatcagaggaagaggagcgcgcatggcattcggatgggagcagctccgattacagtagcgattatagcgactggactgccgacgcaggaatcaatcttcaacctcccaagaaagtgccaaagaacaaaaccaagaaggcagaatccagctcagatgaagaagaggaaagcgagaagcaaaagcagaagcaaattaaaaaggaaaaaaagaaggtcaacgaagagaaggatgggccaataagcccaaaaaagaagaagcccaaagaacgtaagcagaaaagactggccgtaggtgaactcactgagaacgggctgaccttagaggaatggctccccagcacttggatcaccgacacgattcccaggagatgtcccttcgtaccgcagatgggagacgaggtgtattatttccggcaggggcatgaggcctatgttgagatggccagaaaaaataagatctactcgatcaaccccaagaagcagccatggcacaaaatggaactccgcgagcaagaactcatgaaaattgtggggataaagtacgaagtgggcctgccaactctgtgctgtctcaagcttgcatttctggaccccgacacaggtaaactcacaggcggaagctttacaatgaagtaccacgacatgcccgatgttatcgattttcttgtgctgcgacagcagttcgatgacgctaagtaccgacgttggaatattggagaccgcttcagaagtgtgatagacgacgcgtggtggttcggcactattgagtctcaggagccgctgcagctagagtaccctgactctctgttccaatgctataatgtgtgctgggacaacggagatacagagaagatgagtccttgggacatggaactgatccctaataatgccgtgttccctgaggaactcggtacgtctgttcccctgaccgacggagagtgtcgctcccttatctataagcccttggatggcgagtgggggactaaccccagggacgaggagtgtgaaagaatcgtggctggaatcaaccaactcatgaccttggacattgcatctgccttcgtggctcccgttgacctgcaggcctaccccatgtactgcaccgtcgtggcatatcctacagacctctcgactataaaacagaggctggaaaaccgcttctacaggagagtctcttcccttatgtgggaggtcaggtacatcgagcacaacacccgtacatttaacgaaccaggcagccctatcgtgaaaagtgcaaaatttgtgaccgacctgctcctgcacttcatcaaggatcagacatgctataatatcattcccctgtataacagcatgaaaaagaaggtgctttccgacagtgaagacgaagagaaggatgctgatgtgccgggaacctctactcgtaagcgcaaggatcaccagccaagacgccgactgcgcaacagggcgcagagctacgatatccaagcctggaaaaagcagtgtgaggaacttcttaatcttattttccagtgcgaggattcagagcccttccgacagcctgtagatctgttggagtatccagattaccgggatatcatcgatactcccatggactttgcgacggtaagggagacactcgaggcaggcaactatgaaagccccatggaactgtgcaaggatgtaaggctgatttttagtaacagcaaagcctatacacccagtaaaaggagtcggatttacagtatgtctctgagactatccgctttcttcgaagagcatattagcagcgtactcagcgactacaagtccgctctccgatttcacaagagaaataccattacaaaacggagaaagaagaggaatagatcttcatctgtgtctagctccgcggctagttcgcctgagagaaagaaaaggatcctgaagccgcagttgaaatccgaaagctcaacctctgcgttcagcaccccaacccgatccattcctcccaggcacaacgcagcacaaatcaacggaaagaccgagagcagtagcgtcgtacgtacgcggtccaaccgagtcgtggtggaccctgtggtgactgaacagccctcaacgtcctccgcagccaagactttcattacgaaggctaatgcatccgccatccccggaaagacgatcctcgaaaacagcgtgaagcattccaaggcactgaacacattatcctctccaggacagagcagtttttctcacggtacacggaataattccgccaaggagaacatggaaaaagagaagccggttaaaagaaagatgaagagctccgtcttacccaaagccagcactctgtctaaatcttcagccgtgatcgaacagggcgattgcaagaacaatgctctagtgcctggtactatccaagtcaatggtcacgggggacagccttccaaattagttaaaagaggcccaggtcgaaagcctaaggttgaggtgaataccaactctggcgaaatcatccataaaaagcggggacgcaaacccaaaaaacttcagtacgccaagcctgaggatctggagcagaacaacgtccaccccatccgcgacgaagtactgccatctagcacatgcaactttctgtccgagacaaataacgtaaaggaggacctgctgcagaagaagaatagaggaggaagaaagccaaaacgaaagatgaaaacacagaagcttgacgcggatctgctggtgccggcatcagtcaaagtgctgcggcgaagcaatcgcaagaaaatcgacgatcccatcgacgaggaagaggagtttgaagaactgaagggatctgaaccacacatgcgcactaggaatcagggacgcagaaccgcattttacaatgaagacgatagtgaggaggagcagcgccagctgctctttgaggacacgtctcttactttcggaacctcatctcggggaagggtgaggaagttaacagagaaagccaaagctaacttgattggctggtac

SEQ ID NO: 195828 - DNA, 5466 bp, Artificial Sequence
  derived and/or modified sequence
atgagctgcgagagaaagggcctgagcgagctgagaagcgagctgtacttcctgatcgccagattcctggaggacggcccctgccagcaggccgcccaggtgctgatcagagaggtggccgagaaggagctgctgcccagaagaaccgactggaccggcaaggagcaccccagaacctaccagaacctggtgaagtactacagacacctggcccccgaccacctgctgcagatctgccacagactgggccccctgctggagcaggagatcccccagagcgtgcccggcgtgcagaccctgctgggcgccggcagacagagcctgctgagaaccaacaagagctgcaagcacgtggtgtggaagggcagcgccctggccgccctgcactgcggcagaccccccgagagccccgtgaactacggcagcccccccagcatcgccgacaccctgttcagcagaaagctgaacggcaagtacagactggagagactggtgcccaccgccgtgtaccagcacatgaagatgcacaagagaatcctgggccacctgagcagcgtgtactgcgtgaccttcgacagaaccggcagaagaatcttcaccggcagcgacgactgcctggtgaagatctgggccaccgacgacggcagactgctggccaccctgagaggccacgccgccgagatcagcgacatggccgtgaactacgagaacaccatgatcgccgccggcagctgcgacaagatgatcagagtgtggtgcctgagaacctgcgcccccctggccgtgctgcagggccacagcgccagcatcaccagcctgcagttcagccccctgtgcagcggcagcaagagatacctgagcagcaccggcgccgacggcaccatctgcttctggctgtgggacgccggcaccctgaagatcaaccccagacccgccaagttcaccgagagacccagacccggcgtgcagatgatctgcagcagcttcagcgccggcggcatgttcctggccaccggcagcaccgaccacatcatcagagtgtacttcttcggcagcggccagcccgagaagatcagcgagctggagttccacaccgacaaggtggacagcatccagttcagcaacaccagcaacagattcgtgagcggcagcagagacggcaccgccagaatctggcagttcaagagaagagagtggaagagcatcctgctggacatggccaccagacccgccggccagaacctgcagggcatcgaggacaagatcaccaagatgaaggtgaccatggtggcctgggacagacacgacaacaccgtgatcaccgccgtgaacaacatgaccctgaaggtgtggaacagctacaccggccagctgatccacgtgctgatgggccacgaggacgaggtgttcgtgctggagccccaccccttcgaccccagagtgctgttcagcgccggccacgacggcaacgtgatcgtgtgggacctggccagaggcgtgaagatcagaagctacttcaacatgatcgagggccagggccacggcgccgtgttcgactgcaagtgcagccccgacggccagcacttcgcctgcaccgacagccacggccacctgctgatcttcggcttcggcagcagcagcaagtacgacaagatcgccgaccagatgttcttccacagcgactacagacccctgatcagagacgccaacaacttcgtgctggacgagcagacccagcaggccccccacctgatgcccccccccttcctggtggacgtggacggcaacccccaccccagcagataccagagactggtgcccggcagagagaactgcagagaggagcagctgatcccccagatgggcgtgaccagcagcggcctgaaccaggtgctgagccagcaggccaaccaggagatcagccccctggacagcatgatccagagactgcagcaggagcaggacctgagaagaagcggcgaggccgtgatcagcaacaccagcagactgagcagaggcagcatcagcagcaccagcgaggtgcacagcccccccaacgtgggcctgagaagaagcggccagatcgagggcgtgagacagatgcacagcaacgcccccagaagcgagatcgccaccgagagagacctggtggcctggagcagaagagtggtggtgcccgagctgagcgccggcgtggccagcagacaggaggagtggagaaccgccaagggcgaggaggagatcaagacctacagaagcgaggagaagagaaagcacctgaccgtgcccaaggagaacaagatccccaccgtgagcaagaaccacgcccacgagcacttcctggacctgggcgagagcaagaagcagcagaccaaccagcacaactacagaaccagaagcgccctggaggagacccccagacccagcgaggagatcgagaacggcagcagcagcagcgacgagggcgaggtggtggccgtgagcggcggcaccagcgaggaggaggagagagcctggcacagcgacggcagcagcagcgactacagcagcgactacagcgactggaccgccgacgccggcatcaacctgcagccccccaagaaggtgcccaagaacaagaccaagaaggccgagagcagcagcgacgaggaggaggagagcgagaagcagaagcagaagcagatcaagaaggagaagaagaaggtgaacgaggagaaggacggccccatcagccccaagaagaagaagcccaaggagagaaagcagaagagactggccgtgggcgagctgaccgagaacggcctgaccctggaggagtggctgcccagcacctggatcaccgacaccatccccagaagatgccccttcgtgccccagatgggcgacgaggtgtactacttcagacagggccacgaggcctacgtggagatggccagaaagaacaagatctacagcatcaaccccaagaagcagccctggcacaagatggagctgagagagcaggagctgatgaagatcgtgggcatcaagtacgaggtgggcctgcccaccctgtgctgcctgaagctggccttcctggaccccgacaccggcaagctgaccggcggcagcttcaccatgaagtaccacgacatgcccgacgtgatcgacttcctggtgctgagacagcagttcgacgacgccaagtacagaagatggaacatcggcgacagattcagaagcgtgatcgacgacgcctggtggttcggcaccatcgagagccaggagcccctgcagctggagtaccccgacagcctgttccagtgctacaacgtgtgctgggacaacggcgacaccgagaagatgagcccctgggacatggagctgatccccaacaacgccgtgttccccgaggagctgggcaccagcgtgcccctgaccgacggcgagtgcagaagcctgatctacaagcccctggacggcgagtggggcaccaaccccagagacgaggagtgcgagagaatcgtggccggcatcaaccagctgatgaccctggacatcgccagcgccttcgtggcccccgtggacctgcaggcctaccccatgtactgcaccgtggtggcctaccccaccgacctgagcaccatcaagcagagactggagaacagattctacagaagagtgagcagcctgatgtgggaggtgagatacatcgagcacaacaccagaaccttcaacgagcccggcagccccatcgtgaagagcgccaagttcgtgaccgacctgctgctgcacttcatcaaggaccagacctgctacaacatcatccccctgtacaacagcatgaagaagaaggtgctgagcgacagcgaggacgaggagaaggacgccgacgtgcccggcaccagcaccagaaagagaaaggaccaccagcccagaagaagactgagaaacagagcccagagctacgacatccaggcctggaagaagcagtgcgaggagctgctgaacctgatcttccagtgcgaggacagcgagcccttcagacagcccgtggacctgctggagtaccccgactacagagacatcatcgacacccccatggacttcgccaccgtgagagagaccctggaggccggcaactacgagagccccatggagctgtgcaaggacgtgagactgatcttcagcaacagcaaggcctacacccccagcaagagaagcagaatctacagcatgagcctgagactgagcgccttcttcgaggagcacatcagcagcgtgctgagcgactacaagagcgccctgagattccacaagagaaacaccatcaccaagagaagaaagaagagaaacagaagcagcagcgtgagcagcagcgccgccagcagccccgagagaaagaagagaatcctgaagccccagctgaagagcgagagcagcaccagcgccttcagcacccccaccagaagcatcccccccagacacaacgccgcccagatcaacggcaagaccgagagcagcagcgtggtgagaaccagaagcaacagagtggtggtggaccccgtggtgaccgagcagcccagcaccagcagcgccgccaagaccttcatcaccaaggccaacgccagcgccatccccggcaagaccatcctggagaacagcgtgaagcacagcaaggccctgaacaccctgagcagccccggccagagcagcttcagccacggcaccagaaacaacagcgccaaggagaacatggagaaggagaagcccgtgaagagaaagatgaagagcagcgtgctgcccaaggccagcaccctgagcaagagcagcgccgtgatcgagcagggcgactgcaagaacaacgccctggtgcccggcaccatccaggtgaacggccacggcggccagcccagcaagctggtgaagagaggccccggcagaaagcccaaggtggaggtgaacaccaacagcggcgagatcatccacaagaagagaggcagaaagcccaagaagctgcagtacgccaagcccgaggacctggagcagaacaacgtgcaccccatcagagacgaggtgctgcccagcagcacctgcaacttcctgagcgagaccaacaacgtgaaggaggacctgctgcagaagaagaacagaggcggcagaaagcccaagagaaagatgaagacccagaagctggacgccgacctgctggtgcccgccagcgtgaaggtgctgagaagaagcaacagaaagaagatcgacgaccccatcgacgaggaggaggagttcgaggagctgaagggcagcgagccccacatgagaaccagaaaccagggcagaagaaccgccttctacaacgaggacgacagcgaggaggagcagagacagctgctgttcgaggacaccagcctgaccttcggcaccagcagcagaggcagagtgagaaagctgaccgagaaggccaaggccaacctgatcggctggtag

SEQ ID NO: 195829 - protein, 785 aa, Artificial Sequence
  derived and/or modified sequence
MLPAAPGKGLGSPDPAPCGPAPPGNTKDIIMIYEEDAEEWALYLTEVFLHVVKREAILLYRLENFSFRHLELLNLTSYKCKLLILSNSLLRDLTPKKCQFLEKILHSPKSVVTLLCGVKSSDQLYELLNISQSRWEISTEQEPEDYISVIQSIIFKDSEDYFEVNIPTDLRAKHSGEISERKEIEELSEASRNTIPLAVVLPTEIPCENPGEIFIILRDEVIGDTVEVEFTSSNKRIRTRPALWNKKVWCMKALEFPAGSVHVNVYCDGIVKATTKIKYYPTAKAKECLFRMADSGESLCQNSIEELDGVLTSIFKHEIPYYEFQSLQTEICSQNKYTHFKELPTLLHCAAKFGLKNLAIHLLQCSGATWASKMKNMEGSDPAHIAERHGHKELKKIFEDFSIQEIDINNEQENDYEEDIASFSTYIPSTQNPAFHHESRKTYGQSADGAEANEMEGEGKQNGSGMETKHSPLEVGSESSEDQYDDLYVFIPGADPENNSQEPLMSSRPPLPPPRPVANAFQLERPHFTLPGTMVEGQMERSQNWGHPGVRQETGDEPKGEKEKKEEEKEQEEEEDPYTFAEIDDSEYDMILANLSIKKKTGSRSFIINRPPAPTPRPTSIPPKEETTPYIAQVFQQKTARRQSDDDKFCGLPKKQDRARIESPAFSTLRGCLTDGQEELILLQEKVKNGKMSMDEALEKFKHWQMGKSGLEMIQQEKLRQLRDCIIGKRPEEENVYNKLTIVHHPGGKETAHNENKFYNVHFSNKLPARPQVEKEFGFCCKKDH

SEQ ID NO: 195830 - protein, 770 aa, Artificial Sequence
  derived and/or modified sequence
MVNCHLKIGNTKDIIMIYEEDAEEWALYLTEVFLHVVKREAILLYRLENFSFRHLELLNLTSYKCKLLILSNSLLRDLTPKKCQFLEKILHSPKSVVTLLCGVKSSDQLYELLNISQSRWEISTEQEPEDYISVIQSIIFKDSEDYFEVNIPTDLRAKHSGEISERKEIEELSEASRNTIPLAVVLPTEIPCENPGEIFIILRDEVIGDTVEVEFTSSNKRIRTRPALWNKKVWCMKALEFPAGSVHVNVYCDGIVKATTKIKYYPTAKAKECLFRMADSGESLCQNSIEELDGVLTSIFKHEIPYYEFQSLQTEICSQNKYTHFKELPTLLHCAAKFGLKNLAIHLLQCSGATWASKMKNMEGSDPAHIAERHGHKELKKIFEDFSIQEIDINNEQENDYEEDIASFSTYIPSTQNPAFHHESRKTYGQSADGAEANEMEGEGKQNGSGMETKHSPLEVGSESSEDQYDDLYVFIPGADPENNSQEPLMSSRPPLPPPRPVANAFQLERPHFTLPGTMVEGQMERSQNWGHPGVRQETGDEPKGEKEKKEEEKEQEEEEDPYTFAEIDDSEYDMILANLSIKKKTGSRSFIINRPPAPTPRPTSIPPKEETTPYIAQVFQQKTARRQSDDDKFCGLPKKQDRARIESPAFSTLRGCLTDGQEELILLQEKVKNGKMSMDEALEKFKHWQMGKSGLEMIQQEKLRQLRDCIIGKRPEEENVYNKLTIVHHPGGKETAHNENKFYNVHFSNKLPARPQVEKEFGFCCKKDH

SEQ ID NO: 195831 - DNA, 2358 bp, Artificial Sequence
  derived and/or modified sequence
atgttacccgcggccccaggcaagggccttggtagccccgaccctgccccctgtggtcccgctccgcccgggaacaccaaggacattataatgatatatgaagaggacgccgaagagtgggccctctacctcactgaagtgttcctgcacgtcgtcaaacgagaagccatactcttgtaccgcttagagaacttcagcttcagacatctcgagctactgaacctgacaagctataaatgtaaactcttgatcctgtccaattccctgctgagagacctgacacccaagaaatgccagttcctagagaagatactccatagccctaaatcagtggttacattgctgtgcggggtaaagtccagcgatcagctctacgaactgctgaatatttcccaatctcgctgggagatcagcaccgagcaggagcctgaagattatatttctgtgatccagtctatcattttcaaagattccgaggactatttcgaagtcaacattcccacagacttgcgcgcaaagcattccggtgagatcagcgagagaaaagaaattgaggagctgtctgaagcttcacggaacaccatccctctggccgtggtgttgcctaccgaaattccttgcgagaatccgggtgaaattttcattatcctccgggatgaggtcataggggacacagttgaagtcgaatttacctcatccaataagaggatccgaacacggccggcactatggaacaagaaagtgtggtgcatgaaggctctggaattccccgctggctcagttcatgtcaacgtgtactgcgatggcattgtcaaagcaacaacgaaaatcaaatactacccaaccgccaaagcgaaagaatgtcttttccggatggctgatagcggggagtccctgtgtcaaaactcaattgaggagctggacggggtgcttaccagcatcttcaaacacgaaataccatactacgagtttcagtccctgcagacagaaatctgcagccagaacaaatatacccacttcaaggagctcccgaccctcctgcattgtgccgccaagtttggcttgaaaaacctggcgatacatctgctgcagtgttcaggcgctacatgggctagcaaaatgaagaacatggaaggttctgacccagcacacattgcagaacgacacggacataaggagctgaagaagatttttgaagatttctccattcaggagatcgatatcaacaatgagcaggaaaacgactatgaagaggatattgcgagcttctccacatacattccctccacccagaaccctgcgtttcaccacgagagccggaagacgtacggacaatcagctgacggggctgaagccaacgagatggaaggtgaggggaaacagaatggctctggaatggaaacaaagcactcgcctctcgaagtgggttctgagtcatcagaggaccaatacgatgacctctatgtcttcatacctggcgcggacccggagaacaactcccaggaacccctaatgtcttcgagaccaccactgcctccccctaggcccgttgccaacgccttccagctcgagcgtccccactttactcttccaggtaccatggtggagggccagatggagaggagccagaactggggacatcccggtgtccgccaagagactggagatgaaccaaaaggcgaaaaggaaaaaaaagaagaggaaaaggaacaggaagaagaagaggacccatacaccttcgcagagatagatgatagtgagtacgacatgatcttggccaacctgtccattaagaagaaaacgggctctagaagtttcattatcaatcgacctcccgcccccacacctcggccaacatctatcccaccaaaggaggaaaccacaccctacattgcgcaggtgtttcagcagaagactgccaggcgacagtctgatgacgacaaattctgtggtttacccaaaaaacaagatagagcccgtattgaatcacccgcgttttctacccttcgggggtgtcttacggatggacaggaagagctgatcctgctccaggaaaaggtgaagaatggcaaaatgagcatggatgaggccctagaaaaattcaagcattggcagatgggaaaatctggtctggaaatgattcagcaggaaaagcttcggcagctgagagactgcatcatcggtaagcgaccggaggaggaaaacgtttacaataagctaaccatcgtgcaccaccccggagggaaagagaccgcgcacaacgaaaataagttctataacgtccacttttcaaataaactgccagctagacctcaggtcgagaaagagtttgggttttgttgtaagaaagatcactag

SEQ ID NO: 195832 - DNA, 2313 bp, Artificial Sequence
  derived and/or modified sequence
atggtgaattgccacctgaaaatcggcaatactaaggatattatcatgatatacgaagaggatgcagaagagtgggcactgtatctaactgaggtcttcctgcacgttgtcaagcgagaggctatcttgctttacagacttgaaaatttttcctttagacacctggaacttctgaatctgacctcttacaagtgcaagttgctcatactgtccaactcccttctgagagacctgacccctaaaaaatgccagttcctggagaaaatacttcactctcctaaaagtgtagtgaccctgctttgtggggtgaaatctagcgatcaactatacgaactcttgaatatcagtcagagtaggtgggaaatctcaacagagcaggagccagaggactatatcagcgtaatccagtccataatatttaaagacagtgaagactattttgaagtgaacatccccactgacttgagggccaaacatagcggtgagatcagcgagcgaaaagagatagaagaattgtcggaggcctccagaaacactatacctctcgctgtggttctacccacagagataccgtgcgaaaaccccggggaaatcttcatcatcctcagagatgaagtgataggagacactgtcgaagttgagtttacgtcctccaacaagagaataaggacccggcctgctttgtggaacaagaaagtctggtgtatgaaagctctggagttccccgcaggctccgtgcatgtgaatgtgtattgtgacgggattgtcaaggctaccacaaaaatcaaatactatccaaccgctaaggcaaaggaatgtctgttccgaatggccgactccggcgaaagtctgtgtcagaattccatagaggaactcgacggggtgctgacatccatattcaagcatgaaatcccctattacgaattccagagtctccagaccgaaatctgctctcagaataagtatacacattttaaggagctacccacgctcctgcactgcgccgctaagtttggtttaaagaatctggcgattcacctgctccagtgttctggcgcgacgtgggcttctaagatgaaaaacatggaggggtcagaccctgcccacattgccgagaggcatgggcataaagaattgaagaaaatattcgaagacttctcaatccaagagattgacatcaacaacgagcaggagaatgactatgaagaggacatcgcctccttttcaacatatataccatccactcaaaaccctgcgtttcatcacgagagtcggaagacatacggccaaagcgccgatggagcagaggccaatgagatggaaggagagggaaagcaaaacggctccgggatggagactaagcattcacctctggaggtcggtagtgaatcaagcgaggatcagtacgatgatctgtacgtattcatcccaggtgcggatccggagaataactcacaggagccattaatgagctcccgcccaccccttcctccacctagaccagtcgctaatgcgttccagctagagaggccacatttcacactccctggtaccatggtggagggacagatggagagatcccaaaactggggccatcccggcgtgcgtcaagagacgggagatgagccgaagggggagaaagagaaaaaggaggaagagaaggagcaggaggaagaagaggatccttacactttcgccgaaatagacgattcagagtatgacatgattctcgccaacctttcaataaaaaagaagacaggaagtagatctttcattatcaaccgcccccccgcaccaactcccagacccaccagcatcccaccgaaagaggagaccacaccatacattgcccaggtgtttcagcaaaaaacggcgcgtagacagtcagatgatgacaaattctgcggtttgcccaaaaagcaggacagagcccgcatagagtcaccagctttcagcacactgcggggatgtctgaccgatggccaggaggagctcattttgctacaggagaaggttaaaaatgggaagatgagcatggatgaagctcttgagaagttcaagcactggcaaatgggaaagagtggcctggagatgatccagcaggaaaagctgcggcaactgcgggactgtatcataggaaaacggccggaggaggaaaatgtctacaacaaactgactatcgtgcaccacccaggcggcaaagagaccgcacacaacgagaacaagttttataacgttcatttcagtaacaagctgccagcaagaccgcaggtggagaaagaatttggattctgctgcaaaaaggaccactag

SEQ ID NO: 195833 - DNA, 2358 bp, Artificial Sequence
  derived and/or modified sequence
atgctgcctgctgcccctgggaagggcctgggcagcccagaccctgccccctgtggccctgcccctcctggcaacaccaaggacatcatcatgatctatgaagaagatgctgaggagtgggccctgtacctgacagaggtgttcctgcacgtggtgaagcgggaggccatcctgctgtaccgcctggagaacttctccttccgccacctggagctgctgaacctgaccagctacaagtgcaagctgctgatcctgagcaacagcctgctgcgggacctgacccccaagaagtgccagttcctggagaagatcctgcacagccccaagtctgtggtgaccctgctgtgtggggtgaagagcagtgaccagctgtatgagctgctgaacatcagccagagccgctgggagatcagcacagagcaggagcctgaggactacatcagcgtcatccagagcatcatcttcaaggacagcgaggactactttgaggtgaacatccccacagacctgcgggccaagcacagcggggagatcagcgagaggaaggagattgaggagctgtctgaggccagcaggaacaccatccccctggccgtggtgctgcccacagagatcccctgtgagaaccctggagagatcttcatcatcctgagagatgaagtcatcggggacacagtggaggtggagttcaccagcagcaacaagaggatccgcaccaggcctgccctgtggaacaagaaggtgtggtgcatgaaggccctggagttccctgctggctctgtgcacgtgaatgtgtactgtgatggcatcgtgaaggccaccaccaagatcaagtactaccccacagccaaggccaaggaatgtctcttcaggatggctgacagcggggagagcctgtgccagaacagcattgaggagctggatggagtgctgaccagcatcttcaagcatgagatcccctactatgagttccagagcctgcagacagagatctgcagccagaacaagtacacccacttcaaggagctgcccaccctgctgcactgtgccgccaagtttggcctgaagaacctggccatccacctgctgcagtgcagcggggccacctgggccagcaagatgaagaacatggagggcagtgaccctgcccacatcgccgagagacatggccacaaggagctgaagaagatctttgaggacttcagcatccaggagattgacatcaacaatgagcaggagaatgactatgaggaggacatcgccagcttcagcacctacatccccagcacccagaacccagccttccaccacgagagcaggaagacctacggccagagcgcagatggagctgaggccaatgagatggagggggagggcaagcagaatggcagcggcatggagaccaagcacagccccctggaggtgggcagcgagagcagcgaggaccagtatgatgacctgtatgtgttcatccctggagctgaccctgagaacaacagccaggagcccctgatgagcagcaggcctcccctgcccccacccaggcctgtggccaatgccttccagctggagcggccccacttcaccctgcccggcaccatggtggagggccagatggagaggagccagaactggggccaccctggggtgcggcaggagactggagatgagcccaagggggagaaggagaagaaggaggaggagaaggagcaggaggaggaggaggacccctacacctttgctgagattgatgacagtgaatatgacatgatcctggccaacctgagcatcaagaagaagacaggcagccgctccttcatcatcaacagacctccagcccccaccccccggcccaccagcatcccccccaaggaggagaccaccccctacatcgcccaggtgttccagcagaagacagcccggcggcagagtgatgatgacaagttctgtggcctgcccaagaagcaggaccgggccagaattgagagccctgccttcagcaccctgcggggctgcctgacagatggccaggaggagctgatcctgctgcaggagaaggtgaagaatggcaagatgtccatggatgaggccctggagaagttcaagcactggcagatgggcaagagcggcctggagatgatccagcaggagaagctgcggcagctgcgggactgcatcatcggcaagaggcctgaggaggagaatgtgtacaacaagctgaccatcgtgcaccaccctgggggcaaggagacagcccacaatgaaaacaagttctacaacgtgcacttcagcaacaagctgcctgcccggccccaggtggagaaggagtttggcttctgctgcaagaaggaccactag

SEQ ID NO: 195834 - DNA, 2313 bp, Artificial Sequence
  derived and/or modified sequence
atggtgaactgccacctgaagattggcaacaccaaggacatcatcatgatctatgaggaggatgctgaggagtgggccctgtacctgacagaggtgttcctgcacgtggtgaagcgggaggccatcctgctgtaccgcctggagaacttctccttccgccacctggagctgctgaacctgaccagctacaagtgcaagctgctgatcctgagcaacagcctgctgcgggacctgacccccaagaagtgccagttcctggagaagatcctgcacagccccaagtctgtggtgaccctgctgtgtggggtgaagagcagtgaccagctgtatgagctgctgaacatcagccagagccgctgggagatcagcacagagcaggagcctgaggactacatcagcgtcatccagagcatcatcttcaaggacagcgaggactactttgaggtgaacatccccacagacctgcgggccaagcacagcggggagatcagcgagaggaaggagattgaggagctgtctgaggccagcaggaacaccatccccctggccgtggtgctgcccacagagatcccctgtgaaaatcctggagagatcttcatcatcctgagagatgaggtgattggagacacagtggaggtggagttcaccagcagcaacaagaggatccgcaccaggcctgccctgtggaacaagaaggtgtggtgcatgaaggccctggagttccctgctggctctgtgcacgtgaatgtgtactgtgatggcatcgtgaaggccaccaccaagatcaagtactaccccacagccaaggccaaggagtgcctcttcaggatggctgacagcggggagagcctgtgccagaacagcattgaggagctggatggagtgctgaccagcatcttcaagcatgagatcccctactatgagttccagagcctgcagacagagatctgcagccagaacaagtacacccacttcaaggagctgcccaccctgctgcactgtgccgccaagtttggcctgaagaacctggccatccacctgctgcagtgcagcggggccacctgggccagcaagatgaagaacatggagggcagtgaccctgcccacatcgccgagcggcacggccacaaggagctgaagaagatctttgaggacttcagcatccaggagattgacatcaacaatgagcaggagaatgactatgaagaagatattgccagcttcagcacctacatccccagcacccagaacccagccttccaccacgagagcaggaagacctacggccagagcgcagatggagctgaggccaatgagatggagggggagggcaagcagaatggaagtggcatggagaccaagcacagccccctggaggtgggcagcgagagcagcgaggaccagtatgatgacctgtatgtgttcatccctggagctgaccctgagaacaacagccaggagcccctgatgagcagccggccccccctgcccccacccaggcctgtggccaatgccttccagctggagcggccccacttcaccctgcccggcaccatggtggagggccagatggagaggagccagaactggggccaccctggggtgcggcaggagactggagatgagcccaagggggagaaggagaagaaggaggaggagaaggagcaggaggaggaggaggacccctacacctttgctgagattgatgattctgaatatgacatgatcctggccaacctgagcatcaagaagaagacaggcagccgctccttcatcatcaaccggcccccagcccccaccccccggcccaccagcatcccccccaaggaggagaccaccccctacatcgcccaggtgttccagcagaagacagcccggcggcagagtgatgatgacaagttctgtggcctgcccaagaagcaggaccgggcccgcatcgagagccctgccttcagcaccctgcggggctgcctgacagatggccaggaggagctgatcctgctgcaggagaaggtgaagaatggcaagatgtccatggatgaggccctggagaagttcaagcactggcagatgggcaagagcggcctggagatgatccagcaggagaagctgcggcagctgcgggactgcatcatcggcaagaggcctgaggaggagaatgtgtacaacaagctgaccatcgtgcaccaccctgggggcaaggagacagcccacaatgaaaacaagttctacaacgtgcacttcagcaacaagctgcctgcccggccccaggtggagaaggagtttggcttctgctgcaagaaggaccactag

SEQ ID NO: 195835 - DNA, 2358 bp, Artificial Sequence
  derived and/or modified sequence
atgctgcccgccgcccccggcaagggcctgggcagccccgaccccgctccttgcggtcccgccccacccggtaatacaaaagacatcattatgatctatgaggaagatgctgaagagtgggccctctacctgactgaggtcttcctacacgtagtgaagagggaagccattttgctctacaggctggaaaatttttcatttagacacttggagctactgaatctcacatcatataagtgcaagttgctgattctgagtaactccctcttgcgcgatttaacaccaaagaaatgtcagttcctggagaaaattctgcattcccccaaaagcgtcgtcaccttactgtgcggggtgaaatcctccgatcagctgtacgaattgctcaacatttcccagagccgctgggagatcagcaccgaacaggagcctgaagactacatctcggttatacagagtattatatttaaggactccgaagattatttcgaggtcaatatccctaccgacctgagagctaaacactcaggggaaatctcagagcggaaagagattgaggaactgagtgaggcctctagaaacacgattccccttgcagtggtcctgcccaccgaaataccatgcgaaaatcctggtgaaatttttattatcctgcgcgatgaggtgatcggagacaccgtggaagtggagttcacctcctcaaataaacggattcggaccaggccggctctatggaacaagaaggtgtggtgcatgaaggctctggaattccctgccggcagcgttcatgtcaatgtatattgcgatggcattgtcaaagccactaccaagataaaatattaccccactgctaaggccaaagagtgtctgttccggatggctgactcaggtgagagcctctgtcaaaatagtattgaagagcttgacggagtcttaacgagcatcttcaagcacgagattccttactacgaatttcagtccctgcaaaccgagatttgttctcagaataagtacactcattttaaggagctgcccacacttctccactgtgctgctaagtttgggctgaagaatctggccatccacttactccagtgttctggggccacgtgggcatcaaagatgaaaaacatggaaggaagcgatcccgctcacatcgcagagcggcatggtcacaaggagctgaaaaaaatctttgaggacttctcaatccaggagatcgatataaacaatgaacaggagaacgattacgaggaagacattgcctctttcagcacctacatcccttccacacagaaccctgccttccaccacgaaagtcgtaagacgtacggccagtctgccgacggagcagaagccaacgaaatggaaggggaggggaaacagaatggctcaggcatggagacaaaacattcccccttggaagtcggcagcgagtcatccgaagatcagtacgatgatctgtacgttttcatcccaggagccgatcctgagaataatagccaggagcctcttatgtcaagtcgcccgcccctccctccgccgagaccagtcgccaacgcttttcagttggaacgaccccatttcacactgccaggcaccatggtcgaggggcagatggaaaggagccagaactggggacatcctggcgtcaggcaggagaccggtgacgaacctaagggagagaaagaaaaaaaagaggaggaaaaagaacaagaggaagaagaagatccatacactttcgcagaaatcgatgacagcgaatatgatatgatactggctaatctttcgatcaaaaagaagactggctcacggtcctttatcatcaatcggccgcccgccccaacacctaggccgacctccattccaccgaaggaagagaccaccccatatatagcccaggtgttccagcagaaaacagccaggcgacagagcgatgatgataaattctgcggtctaccaaagaagcaagatagagcgaggattgaatcacctgctttctccacactccgtgggtgtctgactgatggccaggaggaacttatcttgttacaggaaaaagtcaagaacggcaaaatgagcatggatgaagctctggagaagttcaagcactggcagatgggcaaatccggcttggaaatgattcagcaagagaagttacggcagttgcgcgactgtatcataggtaagagaccagaagaggagaatgtgtacaataagttgacaatcgttcaccaccctggaggaaaggagaccgctcataacgaaaataaattttacaacgtccacttcagcaacaagttgcccgcaaggccccaagtcgagaaggagtttggtttctgttgtaagaaggatcattag

SEQ ID NO: 195836 - DNA, 2313 bp, Artificial Sequence
  derived and/or modified sequence
atggtgaactgccacctgaagatcggcaacaccaaggacatcatcatgatctacgaagaggacgctgaggagtgggcactatatctgaccgaggtctttcttcatgttgtcaagcgagaagcaattctcctgtatagacttgagaacttctcttttcgccacctggaactgctgaaccttactagttacaaatgcaagctgctgatcctaagtaactcgcttctgcgtgatctgacgcctaaaaagtgtcagtttcttgaaaaaatattgcatagccctaagagcgttgtgacactgttatgcggggtcaagtcctccgatcagctgtacgagctgttgaatatttcacaatcaagatgggaaattagcactgagcaggaaccagaagactacatcagcgtaatacagtccattatctttaaggattcagaggattattttgaggtgaatatcccaaccgacctccgggctaagcactcgggggagatatcagagcgcaaggaaattgaggagctgagcgaggctagcaggaacaccattccactagccgtggtgctcccaacggagattccatgtgagaatcccggagaaattttcatcatcctgcgcgatgaggtcatcggggacactgtggaagtggagtttacatcttcaaacaaacgaatcaggacaaggcccgctttatggaacaagaaggtctggtgtatgaaggctctggaattccctgccgggtcagtccacgtgaatgtgtactgtgatggtattgtcaaagcgaccactaaaattaagtattacccaaccgctaaagccaaggagtgcctgttccggatggcagactctggcgagagcctctgccagaatagtatagaggaactggacggcgtgttaacatccatctttaagcacgagattccatattatgagtttcagtccctgcaaaccgagatctgctctcagaataaatatacccacttcaaggaactcccaacgttactgcactgcgccgcgaaattcggcctgaaaaatctagccatacatctgcttcaatgtagtggggctacctgggcctccaaaatgaagaatatggaggggtcggatccagcccacatcgcagagcggcacggccacaaggagctgaagaaaatattcgaggattttagtattcaagagatcgatatcaacaacgagcaggagaacgactacgaggaggatattgcctcttttagtacatatatcccgtctacccaaaatcctgcgttccaccatgagagccgaaaaacgtacggacagtctgccgatggcgcggaggctaacgagatggaaggcgagggcaaacaaaacggttctggaatggagacaaaacatagcccccttgaagtgggatctgaatcttctgaggaccagtatgacgacctgtacgtgtttatccctggcgctgaccccgaaaataactcacaggaacctcttatgagctctaggcctcccctgccacccccgcgcccagttgctaacgcattccagctggagaggccccacttcacattaccagggaccatggtggaaggtcagatggagcggtcccaaaattggggacatccgggtgtgagacaagagactggagatgaaccgaaaggcgaaaaggaaaaaaaggaggaagaaaaagagcaggaggaggaagaggatccatacacttttgctgagatcgacgactcagaatatgacatgatcctggctaacctgtccatcaaaaagaagactggctcccgctcgttcataataaatagaccgccggcccccacaccacgccccacttcgatccctcccaaggaggaaaccaccccgtacatcgcccaggtgttccagcaaaaaaccgcacggcggcaatctgacgatgacaagttttgtggcctgcctaagaagcaagatcgagctcggattgaatcgccggcgttttccaccttaagagggtgcctgaccgatggccaggaggaacttattctcctgcaggaaaaggtgaagaacggcaagatgtcaatggacgaggcattagaaaagttcaagcattggcagatgggtaagagcggactggagatgatccaacaggagaagctgcggcaattacgagactgtattatcggcaaacgcccggaagaggaaaatgtatacaataaattaacaatcgttcaccaccccgggggcaaggaaacagcgcataacgaaaacaagttctataacgtgcacttctccaacaaactgccagcacggccacaggtggagaaggaatttgggttttgctgtaagaaggatcactag

SEQ ID NO: 195837 - DNA, 2358 bp, Artificial Sequence
  derived and/or modified sequence
atgctccctgctgctcctggaaaaggtttaggttccccagatcccgcaccttgtggccctgccccaccaggcaacacgaaagacatcattatgatctacgaggaagacgctgaggagtgggcgttgtacttgaccgaggtgtttctgcatgtcgtgaaaagggaggccattctgctgtaccgcctggaaaatttcagcttcaggcatctcgaactgttgaacctgacatcatataagtgcaaactgctgattctctctaatagcctactgagagacctgacacccaaaaaatgtcagtttcttgaaaaaatcctccactcaccaaaaagcgtggtgactttgttatgtggagtgaagagctcagatcagctctacgagttattaaacattagtcagtctcgatgggaaatttcgacagaacaggagcccgaagactacataagcgtgatccaaagcatcatctttaaagactccgaggattattttgaggttaacataccaacagacctcagggcaaagcactctggagaaattagcgagcgtaaagagattgaggaactaagtgaagcttctagaaataccattcctctcgccgtggtcttgccgactgaaataccgtgcgaaaaccctggcgagatatttatcatacttcgggacgaagtgattggtgacacggtagaggtggaattcacatcctctaacaaaaggatcagaactcgcccagcgttatggaacaaaaaggtatggtgtatgaaggcactagagttccccgctggctccgttcatgtaaatgtgtattgtgatggtattgtaaaggctactaccaagatcaaatactatcctacagctaaagccaaagagtgtctcttccgcatggctgatagcggggagtctctttgtcagaattctattgaggagctggacggtgtcctgaccagcatttttaagcacgagataccatactatgaatttcagtcattgcaaacagagatctgcagccagaacaagtatacacattttaaagagctccccacactactgcattgcgcggcaaaattcggcctgaaaaatcttgccattcacctgctgcaatgctccggggctacttgggcttccaaaatgaagaatatggaagggtccgaccccgcacacatagccgaaaggcacgggcataaggagctgaagaagatcttcgaagacttctctattcaggagattgatatcaacaatgaacaggagaacgactacgaagaggacatagcgagcttcagtacctacatcccttccacacagaatccagcgttccatcacgaatccagaaagacatacggtcaatctgcggatggagcagaagctaatgaaatggagggtgaaggcaaacagaacggatccgggatggaaaccaagcacagccccctggaggttgggtccgagagctcagaggaccagtacgacgacctctacgtgttcattcccggagctgaccccgagaacaactcacaagagcctctgatgtccagcagacccccactccctcctccaagacctgtagcgaacgcctttcagttagaacgtccgcacttcacgctccccggtactatggtcgagggacagatggagcgctcacaaaattggggccaccccggagtgcgacaggaaactggagacgagccaaagggcgaaaaggagaaaaaggaagaagagaaggagcaagaagaagaggaagacccttataccttcgccgagatcgatgattcagagtatgacatgattctggctaacctgtctatcaagaaaaaaaccggaagcagaagctttattatcaatcgcccaccagcccctaccccacggccaacgtccatcccccctaaggaagaaaccacgccttacatcgcacaggtgtttcagcagaaaacagccaggaggcaaagtgatgatgataaattctgcggtctacctaagaaacaagatcgggctcgtattgaaagtcctgcattctccaccctgcgcggttgcctcacagatggtcaggaagagttaatcttgctgcaagagaaggtcaagaatggaaaaatgagtatggacgaagccctggagaaattcaagcactggcagatggggaagagcggactggagatgattcagcaggaaaaacttcgccagttgagggactgtattatcggaaagcggcctgaggaagaaaatgtgtacaacaagctcaccatcgttcaccatccgggagggaaagaaacggcccacaacgaaaataaattttataacgtacacttttcaaacaaacttcctgcacgccctcaagttgagaaggaatttggcttctgttgcaaaaaagaccattag

SEQ ID NO: 195838 - DNA, 2313 bp, Artificial Sequence
  derived and/or modified sequence
atggtcaactgccatttaaaaatcgggaataccaaggacatcatcatgatctatgaggaggacgccgaggaatgggctctctaccttacagaggtgttcttacacgtcgtgaagcgcgaagcaatcctgctgtacagattggaaaacttttcctttcgccatctggaactcctgaatctcacgagctacaagtgcaagctactgatcctttctaactccctcttgcgggatcttactcctaagaagtgccaattcctggagaagattctccacagcccaaaaagtgtggtgactctgctgtgcggcgtgaagagcagcgatcaactgtatgaactgctcaatatctcccagtccagatgggagatttcgacagagcaggaacctgaggattacatcagcgttatccaaagcataattttcaaagatagcgaagactactttgaggtgaatatacctaccgacctgcgcgctaagcattctggggaaatttccgagcgaaaggaaatcgaagagctatctgaagccagcaggaataccattcctctggcagtggtgctgcccactgagataccttgtgaaaaccccggagagatcttcataatcttaagagatgaggtaattggggacaccgtagaagtcgaatttacaagctcgaacaagcggatccgcacaaggccagcattgtggaacaagaaggtgtggtgcatgaaagcgctagagtttcccgctggcagcgtgcatgtgaatgtctactgcgatggaattgtgaaagctaccactaagattaagtactatcccacagccaaggctaaggagtgcctgtttcggatggccgattcaggagagagtctgtgccagaacagtatcgaggaattagatggggtcttaacatcgatttttaaacatgagataccttattatgagttccaatcactccaaacagagatatgttcccagaacaagtacactcattttaaggagctgcccacactgctacactgcgcagctaagttcgggcttaagaatctagcgattcatttactgcagtgctctggcgcaacctgggctagtaagatgaagaatatggaaggctcagatcctgctcacatcgccgaacgccacggccacaaggaactaaaaaagatcttcgaagacttctccatccaggagatcgatatcaataacgagcaagagaatgactacgaggaagatatagcaagcttcagtacctatattccaagcactcaaaacccggctttccatcacgagtccaggaagacttatggtcaaagcgctgacggtgcagaggcaaatgaaatggagggcgagggtaaacaaaatgggagtggaatggagacaaagcacagtccgctggaagtggggtctgaatcttccgaagaccaatatgatgacctctatgtattcatccccggtgccgaccctgagaataactcccaggaacctctgatgtcttcaagaccacccctgcctccgcctagaccagtggctaacgcctttcagctcgaacgaccccactttacattgccgggtacaatggtggaggggcagatggaacgatcccagaactggggccatcctggggtcaggcaggagacaggcgacgaaccgaagggcgagaaagagaagaaggaggaagagaaggagcaagaagaggaggaagatccctacacatttgccgagattgacgatagtgagtatgacatgatcctggctaatttgtctataaaaaaaaagaccgggagccggtcattcatcatcaacagaccacctgccccaaccccgcgaccaacctccattcctcccaaagaggagaccactccctatattgcacaggtatttcagcagaagaccgctcggcgacagagcgacgatgataaattctgcggcctccccaaaaaacaagatcgggcaagaatcgaaagccctgccttttcaacgctgagaggctgcctaaccgacggtcaagaagaactgatactcctgcaggagaaggttaagaatggcaaaatgagcatggacgaggcccttgagaagtttaaacattggcaaatggggaaaagtggcctcgaaatgatacaacaggaaaagctcagacagctcagggactgcatcataggcaagaggccagaagaagagaacgtttataacaagctgaccattgtacaccatccaggtgggaaagagacagcacacaacgagaataagttctacaatgtgcacttcagtaataagttgcccgctaggccacaagtggaaaaggagtttggtttttgttgtaagaaagaccattag

SEQ ID NO: 195839 - DNA, 3372 bp, Artificial Sequence
  derived and/or modified sequence
aaaccaaagcggccttttgagaagggatgtaagagcaggcccctgagcagtttcacttcctctgggcgcccagcagagcggagccctggccttgcgggcatgagccccggggctgcgtttcctgagacctggccgcagcctccgcgggtggcaagcgggctggggagagccgagggccaaaggaagagaaaatcgcggggagtctctggccgggagagtccaggtagcgctcggcgggcagcagtgcgcaggcccctcggcttcaaccgccacaatgctgccagcagcgccaggcaaggggcttgggagcccggaccccgccccctgcggcccagcgcccccaggaaatacaaaagatataataatgatatatgaagaagatgctgaggaatgggctctgtacttgacagaagtatttttacatgttgtgaaaagggaagccatcctgttatatcgcttggagaatttctcttttcggcatttggagttgctgaacttaacgtcttacaaatgtaaacttttgatattatcaaatagcctgcttagagacctaactccaaagaaatgtcagtttctggaaaagatacttcattcaccaaaaagtgtagttactttgctttgtggagtgaagagttcagatcagctctatgaattactaaatatctctcaaagcagatgggagatctcaactgaacaggaacctgaagactacatctctgtaatccagagtatcatattcaaagattctgaagactactttgaggtcaacattccaacagacctacgagcaaaacattctggggaaataagtgagagaaaggaaattgaagaactatcagaagcttcaagaaacaccataccactagcagtggtgcttcccactgaaattccatgtgagaatcctggtgaaatattcataattttgagagatgaagtaattggtgatactgtagaggttgaatttacatcaagtaataagcgcattagaacacggccagccctttggaataagaaagtctggtgcatgaaagctttagagtttcctgctggttcagtccatgtcaatgtctactgtgatggaatcgttaaagctacaaccaaaattaagtactacccaacagcaaaggcaaaggaatgcctattcagaatggcagattcaggagagagtttgtgccagaatagcattgaagaacttgatggtgtccttacatccatattcaaacatgagataccatattatgagttccagtctcttcaaactgaaatttgttctcaaaacaaatatactcatttcaaagaacttccaactcttctccactgtgcagcaaaatttggcttaaagaacctggctattcatttgcttcaatgttcaggagcaacctgggcatctaagatgaaaaatatggagggttcagaccccgcacatattgctgaaaggcatggtcacaaagaactcaagaaaatcttcgaagacttttcaatccaagaaattgacataaataatgagcaagaaaatgattatgaagaggatattgcctcattttccacatatattccttccacacagaacccagcatttcatcatgaaagcaggaagacatacgggcagagtgcagatggagctgaggcaaatgaaatggaaggggaaggaaaacagaatggatcaggcatggagaccaaacacagcccactagaggttggcagtgagagttctgaagaccagtatgatgacttgtatgtgttcattcctggtgctgatccagaaaataattcacaagagccactcatgagcagcagacctcctctccccccgccgcgacctgtagctaatgccttccaactggaaagacctcacttcaccttaccagggacaatggtggaaggccaaatggaaagaagtcaaaactggggtcatcctggtgttagacaagaaacaggagatgaacccaaaggagaaaaagagaagaaagaagaggaaaaagagcaggaggaggaagaagacccatatacttttgctgagattgatgacagtgaatatgacatgatattggccaatctgagtataaagaaaaaaactgggagtcggtctttcattataaatagacctcctgcccccacaccccgacccacaagtatacctccaaaagaggaaactacaccttacatagctcaagtgtttcaacaaaagacagccagaagacaatctgatgatgacaagttctgtggtcttcctaagaaacaagacagagctcggatagagagtccagccttttctactctcaggggctgtctaactgatggtcaggaagaactcatcctcctgcaggagaaagtaaagaatgggaaaatgtctatggatgaagctctggagaaatttaaacactggcagatgggaaaaagtggcctggaaatgattcagcaggagaaattacgacaactacgagactgcattattgggaaaaggccagaagaagaaaatgtctataataaactcaccattgtgcaccatccaggtggtaaggaaactgcccacaatgaaaataagttttataatgtacacttcagcaataagcttcctgctcgaccccaagttgaaaaggaatttggtttctgttgcaagaaagatcattaaagaaggttattataatgaaactcacgaatctacggacattttgctttcagggtgaagcaagcttgaatttggattgcctgctctctttaaagcgaattcatactatgacagcagaaacaaaacttcagatttcagaatttgttattggcaaaatttattctcattatacctgcttcatatgggtatattactattaaaacagaataccatagagtaattgcattatttgaaaattctctcattttacaatgcacttcaccaatgaaacagctaatttccattttgaaaattaaaagaaaacagcacagagaagttaaatgcggtgtagcaaagttatggggtctgcttgagggcactaacctcaacagattattcctcctctccttagaataaccatgaaaatacaaatttacttagcacatttttgctttttaagtagctggttcattttctgaatttctcacattcagagttccagtcattattgttacatcatgtttgcagaaaccttgtcttatttagtgtctatttgcatataaccctgaaaacattattatttgaaaacttttctatatctcaaattaatatacattttcataacctacctttgtattaagacttgcaattttatcaatctattatttcttagaaacaatttactagcttagaatagaaagcaatgttatcgtcatataattttcatgtacaaatgccacaaataaattgaatgtttaaagcta

SEQ ID NO: 195840 - DNA, 3141 bp, Artificial Sequence
  derived and/or modified sequence
ctggccaacaagggctgcagaggatgcacacatcaggaagagggtgggggactacttgcttgctggttttgcttgcatctgatgagtagaaattcagcctattctttgttttggaaatacaaaagatataataatgatatatgaagaagatgctgaggaatgggctctgtacttgacagaagtatttttacatgttgtgaaaagggaagccatcctgttatatcgcttggagaatttctcttttcggcatttggagttgctgaacttaacgtcttacaaatgtaaacttttgatattatcaaatagcctgcttagagacctaactccaaagaaatgtcagtttctggaaaagatacttcattcaccaaaaagtgtagttactttgctttgtggagtgaagagttcagatcagctctatgaattactaaatatctctcaaagcagatgggagatctcaactgaacaggaacctgaagactacatctctgtaatccagagtatcatattcaaagattctgaagactactttgaggtcaacattccaacagacctacgagcaaaacattctggggaaataagtgagagaaaggaaattgaagaactatcagaagcttcaagaaacaccataccactagcagtggtgcttcccactgaaattccatgtgagaatcctggtgaaatattcataattttgagagatgaagtaattggtgatactgtagaggttgaatttacatcaagtaataagcgcattagaacacggccagccctttggaataagaaagtctggtgcatgaaagctttagagtttcctgctggttcagtccatgtcaatgtctactgtgatggaatcgttaaagctacaaccaaaattaagtactacccaacagcaaaggcaaaggaatgcctattcagaatggcagattcaggagagagtttgtgccagaatagcattgaagaacttgatggtgtccttacatccatattcaaacatgagataccatattatgagttccagtctcttcaaactgaaatttgttctcaaaacaaatatactcatttcaaagaacttccaactcttctccactgtgcagcaaaatttggcttaaagaacctggctattcatttgcttcaatgttcaggagcaacctgggcatctaagatgaaaaatatggagggttcagaccccgcacatattgctgaaaggcatggtcacaaagaactcaagaaaatcttcgaagacttttcaatccaagaaattgacataaataatgagcaagaaaatgattatgaagaggatattgcctcattttccacatatattccttccacacagaacccagcatttcatcatgaaagcaggaagacatacgggcagagtgcagatggagctgaggcaaatgaaatggaaggggaaggaaaacagaatggatcaggcatggagaccaaacacagcccactagaggttggcagtgagagttctgaagaccagtatgatgacttgtatgtgttcattcctggtgctgatccagaaaataattcacaagagccactcatgagcagcagacctcctctccccccgccgcgacctgtagctaatgccttccaactggaaagacctcacttcaccttaccagggacaatggtggaaggccaaatggaaagaagtcaaaactggggtcatcctggtgttagacaagaaacaggagatgaacccaaaggagaaaaagagaagaaagaagaggaaaaagagcaggaggaggaagaagacccatatacttttgctgagattgatgacagtgaatatgacatgatattggccaatctgagtataaagaaaaaaactgggagtcggtctttcattataaatagacctcctgcccccacaccccgacccacaagtatacctccaaaagaggaaactacaccttacatagctcaagtgtttcaacaaaagacagccagaagacaatctgatgatgacaagttctgtggtcttcctaagaaacaagacagagctcggatagagagtccagccttttctactctcaggggctgtctaactgatggtcaggaagaactcatcctcctgcaggagaaagtaaagaatgggaaaatgtctatggatgaagctctggagaaatttaaacactggcagatgggaaaaagtggcctggaaatgattcagcaggagaaattacgacaactacgagactgcattattgggaaaaggccagaagaagaaaatgtctataataaactcaccattgtgcaccatccaggtggtaaggaaactgcccacaatgaaaataagttttataatgtacacttcagcaataagcttcctgctcgaccccaagttgaaaaggaatttggtttctgttgcaagaaagatcattaaagaaggttattataatgaaactcacgaatctacggacattttgctttcagggtgaagcaagcttgaatttggattgcctgctctctttaaagcgaattcatactatgacagcagaaacaaaacttcagatttcagaatttgttattggcaaaatttattctcattatacctgcttcatatgggtatattactattaaaacagaataccatagagtaattgcattatttgaaaattctctcattttacaatgcacttcaccaatgaaacagctaatttccattttgaaaattaaaagaaaacagcacagagaagttaaatgcggtgtagcaaagttatggggtctgcttgagggcactaacctcaacagattattcctcctctccttagaataaccatgaaaatacaaatttacttagcacatttttgctttttaagtagctggttcattttctgaatttctcacattcagagttccagtcattattgttacatcatgtttgcagaaaccttgtcttatttagtgtctatttgcatataaccctgaaaacattattatttgaaaacttttctatatctcaaattaatatacattttcataacctacctttgtattaagacttgcaattttatcaatctattatttcttagaaacaatttactagcttagaatagaaagcaatgttatcgtcatataattttcatgtacaaatgccacaaataaattgaatgtttaaagcta

SEQ ID NO: 195841 - DNA, 3544 bp, Artificial Sequence
  derived and/or modified sequence
tttggtttctcttcaagaattaacaaaccacttactcttgaattctcttctagttaacacaggcatcactacttccaattgatctcaggatgtgggatcctcatacacattttgaacaaaatcctctgtttcagcaaggaattcatatttgcatatggtgaagatggtttctgaagtgagatcagaagtagagcttctaatgacccccagaagcactgagtgaccaagtgacatacctgccaggcccattgtgtccatcgctctcagagcagctggggattgtgcttggctcccagagctatggtgcaaaaggcggggtcgctagggccactcagggaaagagaacccagaaacatggcatgctgacaaaaggtagtctctgcttatccagcttcactttctgctgatttagttacccatggtcaactgccatctgaaaataggaaatacaaaagatataataatgatatatgaagaagatgctgaggaatgggctctgtacttgacagaagtatttttacatgttgtgaaaagggaagccatcctgttatatcgcttggagaatttctcttttcggcatttggagttgctgaacttaacgtcttacaaatgtaaacttttgatattatcaaatagcctgcttagagacctaactccaaagaaatgtcagtttctggaaaagatacttcattcaccaaaaagtgtagttactttgctttgtggagtgaagagttcagatcagctctatgaattactaaatatctctcaaagcagatgggagatctcaactgaacaggaacctgaagactacatctctgtaatccagagtatcatattcaaagattctgaagactactttgaggtcaacattccaacagacctacgagcaaaacattctggggaaataagtgagagaaaggaaattgaagaactatcagaagcttcaagaaacaccataccactagcagtggtgcttcccactgaaattccatgtgagaatcctggtgaaatattcataattttgagagatgaagtaattggtgatactgtagaggttgaatttacatcaagtaataagcgcattagaacacggccagccctttggaataagaaagtctggtgcatgaaagctttagagtttcctgctggttcagtccatgtcaatgtctactgtgatggaatcgttaaagctacaaccaaaattaagtactacccaacagcaaaggcaaaggaatgcctattcagaatggcagattcaggagagagtttgtgccagaatagcattgaagaacttgatggtgtccttacatccatattcaaacatgagataccatattatgagttccagtctcttcaaactgaaatttgttctcaaaacaaatatactcatttcaaagaacttccaactcttctccactgtgcagcaaaatttggcttaaagaacctggctattcatttgcttcaatgttcaggagcaacctgggcatctaagatgaaaaatatggagggttcagaccccgcacatattgctgaaaggcatggtcacaaagaactcaagaaaatcttcgaagacttttcaatccaagaaattgacataaataatgagcaagaaaatgattatgaagaggatattgcctcattttccacatatattccttccacacagaacccagcatttcatcatgaaagcaggaagacatacgggcagagtgcagatggagctgaggcaaatgaaatggaaggggaaggaaaacagaatggatcaggcatggagaccaaacacagcccactagaggttggcagtgagagttctgaagaccagtatgatgacttgtatgtgttcattcctggtgctgatccagaaaataattcacaagagccactcatgagcagcagacctcctctccccccgccgcgacctgtagctaatgccttccaactggaaagacctcacttcaccttaccagggacaatggtggaaggccaaatggaaagaagtcaaaactggggtcatcctggtgttagacaagaaacaggagatgaacccaaaggagaaaaagagaagaaagaagaggaaaaagagcaggaggaggaagaagacccatatacttttgctgagattgatgacagtgaatatgacatgatattggccaatctgagtataaagaaaaaaactgggagtcggtctttcattataaatagacctcctgcccccacaccccgacccacaagtatacctccaaaagaggaaactacaccttacatagctcaagtgtttcaacaaaagacagccagaagacaatctgatgatgacaagttctgtggtcttcctaagaaacaagacagagctcggatagagagtccagccttttctactctcaggggctgtctaactgatggtcaggaagaactcatcctcctgcaggagaaagtaaagaatgggaaaatgtctatggatgaagctctggagaaatttaaacactggcagatgggaaaaagtggcctggaaatgattcagcaggagaaattacgacaactacgagactgcattattgggaaaaggccagaagaagaaaatgtctataataaactcaccattgtgcaccatccaggtggtaaggaaactgcccacaatgaaaataagttttataatgtacacttcagcaataagcttcctgctcgaccccaagttgaaaaggaatttggtttctgttgcaagaaagatcattaaagaaggttattataatgaaactcacgaatctacggacattttgctttcagggtgaagcaagcttgaatttggattgcctgctctctttaaagcgaattcatactatgacagcagaaacaaaacttcagatttcagaatttgttattggcaaaatttattctcattatacctgcttcatatgggtatattactattaaaacagaataccatagagtaattgcattatttgaaaattctctcattttacaatgcacttcaccaatgaaacagctaatttccattttgaaaattaaaagaaaacagcacagagaagttaaatgcggtgtagcaaagttatggggtctgcttgagggcactaacctcaacagattattcctcctctccttagaataaccatgaaaatacaaatttacttagcacatttttgctttttaagtagctggttcattttctgaatttctcacattcagagttccagtcattattgttacatcatgtttgcagaaaccttgtcttatttagtgtctatttgcatataaccctgaaaacattattatttgaaaacttttctatatctcaaattaatatacattttcataacctacctttgtattaagacttgcaattttatcaatctattatttcttagaaacaatttactagcttagaatagaaagcaatgttatcgtcatataattttcatgtacaaatgccacaaataaattgaatgtttaaagctatgtctgagtttttaaagtaaatttataagaattagccaataaaattgcttctcggccttttggctaagatcaa

SEQ ID NO: 195842 - DNA, 2358 bp, Artificial Sequence
  derived and/or modified sequence
atgctgcccgccgcccccggcaagggcctgggcagccccgaccccgccccctgcggccccgccccccccggcaacaccaaggacatcatcatgatctacgaggaggacgccgaggagtgggccctgtacctgaccgaggtgttcctgcacgtggtgaagagagaggccatcctgctgtacagactggagaacttcagcttcagacacctggagctgctgaacctgaccagctacaagtgcaagctgctgatcctgagcaacagcctgctgagagacctgacccccaagaagtgccagttcctggagaagatcctgcacagccccaagagcgtggtgaccctgctgtgcggcgtgaagagcagcgaccagctgtacgagctgctgaacatcagccagagcagatgggagatcagcaccgagcaggagcccgaggactacatcagcgtgatccagagcatcatcttcaaggacagcgaggactacttcgaggtgaacatccccaccgacctgagagccaagcacagcggcgagatcagcgagagaaaggagatcgaggagctgagcgaggccagcagaaacaccatccccctggccgtggtgctgcccaccgagatcccctgcgagaaccccggcgagatcttcatcatcctgagagacgaggtgatcggcgacaccgtggaggtggagttcaccagcagcaacaagagaatcagaaccagacccgccctgtggaacaagaaggtgtggtgcatgaaggccctggagttccccgccggcagcgtgcacgtgaacgtgtactgcgacggcatcgtgaaggccaccaccaagatcaagtactaccccaccgccaaggccaaggagtgcctgttcagaatggccgacagcggcgagagcctgtgccagaacagcatcgaggagctggacggcgtgctgaccagcatcttcaagcacgagatcccctactacgagttccagagcctgcagaccgagatctgcagccagaacaagtacacccacttcaaggagctgcccaccctgctgcactgcgccgccaagttcggcctgaagaacctggccatccacctgctgcagtgcagcggcgccacctgggccagcaagatgaagaacatggagggcagcgaccccgcccacatcgccgagagacacggccacaaggagctgaagaagatcttcgaggacttcagcatccaggagatcgacatcaacaacgagcaggagaacgactacgaggaggacatcgccagcttcagcacctacatccccagcacccagaaccccgccttccaccacgagagcagaaagacctacggccagagcgccgacggcgccgaggccaacgagatggagggcgagggcaagcagaacggcagcggcatggagaccaagcacagccccctggaggtgggcagcgagagcagcgaggaccagtacgacgacctgtacgtgttcatccccggcgccgaccccgagaacaacagccaggagcccctgatgagcagcagaccccccctgcccccccccagacccgtggccaacgccttccagctggagagaccccacttcaccctgcccggcaccatggtggagggccagatggagagaagccagaactggggccaccccggcgtgagacaggagaccggcgacgagcccaagggcgagaaggagaagaaggaggaggagaaggagcaggaggaggaggaggacccctacaccttcgccgagatcgacgacagcgagtacgacatgatcctggccaacctgagcatcaagaagaagaccggcagcagaagcttcatcatcaacagaccccccgcccccacccccagacccaccagcatcccccccaaggaggagaccaccccctacatcgcccaggtgttccagcagaagaccgccagaagacagagcgacgacgacaagttctgcggcctgcccaagaagcaggacagagccagaatcgagagccccgccttcagcaccctgagaggctgcctgaccgacggccaggaggagctgatcctgctgcaggagaaggtgaagaacggcaagatgagcatggacgaggccctggagaagttcaagcactggcagatgggcaagagcggcctggagatgatccagcaggagaagctgagacagctgagagactgcatcatcggcaagagacccgaggaggagaacgtgtacaacaagctgaccatcgtgcaccaccccggcggcaaggagaccgcccacaacgagaacaagttctacaacgtgcacttcagcaacaagctgcccgccagaccccaggtggagaaggagttcggcttctgctgcaagaaggaccactag

SEQ ID NO: 195843 - DNA, 2313 bp, Artificial Sequence
  derived and/or modified sequence
atggtgaactgccacctgaagatcggcaacaccaaggacatcatcatgatctacgaggaggacgccgaggagtgggccctgtacctgaccgaggtgttcctgcacgtggtgaagagagaggccatcctgctgtacagactggagaacttcagcttcagacacctggagctgctgaacctgaccagctacaagtgcaagctgctgatcctgagcaacagcctgctgagagacctgacccccaagaagtgccagttcctggagaagatcctgcacagccccaagagcgtggtgaccctgctgtgcggcgtgaagagcagcgaccagctgtacgagctgctgaacatcagccagagcagatgggagatcagcaccgagcaggagcccgaggactacatcagcgtgatccagagcatcatcttcaaggacagcgaggactacttcgaggtgaacatccccaccgacctgagagccaagcacagcggcgagatcagcgagagaaaggagatcgaggagctgagcgaggccagcagaaacaccatccccctggccgtggtgctgcccaccgagatcccctgcgagaaccccggcgagatcttcatcatcctgagagacgaggtgatcggcgacaccgtggaggtggagttcaccagcagcaacaagagaatcagaaccagacccgccctgtggaacaagaaggtgtggtgcatgaaggccctggagttccccgccggcagcgtgcacgtgaacgtgtactgcgacggcatcgtgaaggccaccaccaagatcaagtactaccccaccgccaaggccaaggagtgcctgttcagaatggccgacagcggcgagagcctgtgccagaacagcatcgaggagctggacggcgtgctgaccagcatcttcaagcacgagatcccctactacgagttccagagcctgcagaccgagatctgcagccagaacaagtacacccacttcaaggagctgcccaccctgctgcactgcgccgccaagttcggcctgaagaacctggccatccacctgctgcagtgcagcggcgccacctgggccagcaagatgaagaacatggagggcagcgaccccgcccacatcgccgagagacacggccacaaggagctgaagaagatcttcgaggacttcagcatccaggagatcgacatcaacaacgagcaggagaacgactacgaggaggacatcgccagcttcagcacctacatccccagcacccagaaccccgccttccaccacgagagcagaaagacctacggccagagcgccgacggcgccgaggccaacgagatggagggcgagggcaagcagaacggcagcggcatggagaccaagcacagccccctggaggtgggcagcgagagcagcgaggaccagtacgacgacctgtacgtgttcatccccggcgccgaccccgagaacaacagccaggagcccctgatgagcagcagaccccccctgcccccccccagacccgtggccaacgccttccagctggagagaccccacttcaccctgcccggcaccatggtggagggccagatggagagaagccagaactggggccaccccggcgtgagacaggagaccggcgacgagcccaagggcgagaaggagaagaaggaggaggagaaggagcaggaggaggaggaggacccctacaccttcgccgagatcgacgacagcgagtacgacatgatcctggccaacctgagcatcaagaagaagaccggcagcagaagcttcatcatcaacagaccccccgcccccacccccagacccaccagcatcccccccaaggaggagaccaccccctacatcgcccaggtgttccagcagaagaccgccagaagacagagcgacgacgacaagttctgcggcctgcccaagaagcaggacagagccagaatcgagagccccgccttcagcaccctgagaggctgcctgaccgacggccaggaggagctgatcctgctgcaggagaaggtgaagaacggcaagatgagcatggacgaggccctggagaagttcaagcactggcagatgggcaagagcggcctggagatgatccagcaggagaagctgagacagctgagagactgcatcatcggcaagagacccgaggaggagaacgtgtacaacaagctgaccatcgtgcaccaccccggcggcaaggagaccgcccacaacgagaacaagttctacaacgtgcacttcagcaacaagctgcccgccagaccccaggtggagaaggagttcggcttctgctgcaagaaggaccactag

SEQ ID NO: 195844 - protein, 211 aa, Artificial Sequence
  derived and/or modified sequence
MRLFLWNAVLTLFVTSLIGALIPEPEVKIEVLQKPFICHRKTKGGDLMLVHYEGYLEKDGSLFHSTHKHNNGQPIWFTLGILEALKGWDQGLKGMCVGEKRKLIIPPALGYGKEGKGKIPPESTLIFNIDLLEIRNGPRSHESFQEMDLNDDWKLSKDEVKAYLKKEFEKHGAVVNESHHDALVEDIFDKEDEDKDGFISAREFTYKHDEL

SEQ ID NO: 195845 - DNA, 4960 bp, Artificial Sequence
  derived and/or modified sequence
aggttcgtgacccttgagaaaagagttggtggtaaatgtgccacgtcttctaagaagggggagtcctgaacttgtctgaagcccttgtccgtaagccttgaactacgttcttaaatctatgaagtcgagggacctttcgctgcttttgtagggacttctttccttgcttcagcaacatgaggcttttcttgtggaacgcggtcttgactctgttcgtcacttctttgattggggctttgatccctgaaccagaagtgaaaattgaagttctccagaagccattcatctgccatcgcaagaccaaaggaggggatttgatgttggtccactatgaaggctacttagaaaaggacggctccttatttcactccactcacaaacataacaatggtcagcccatttggtttaccctgggcatcctggaggctctcaaaggttgggaccagggcttgaaaggaatgtgtgtaggagagaagagaaagctcatcattcctcctgctctgggctatggaaaagaaggaaaaggtaaaattcccccagaaagtacactgatatttaatattgatctcctggagattcgaaatggaccaagatcccatgaatcattccaagaaatggatcttaatgatgactggaaactctctaaagatgaggttaaagcatatttaaagaaggagtttgaaaaacatggtgcggtggtgaatgaaagtcatcatgatgctttggtggaggatatttttgataaagaagatgaagacaaagatgggtttatatctgccagagaatttacatataaacacgatgagttatagagatacatctacccttttaatatagcactcatctttcaagagagggcagtcatctttaaagaacattttatttttatacaatgttctttcttgctttgttttttatttttatatattttttctgactcctatttaaagaaccccttaggtttctaagtacccatttctttctgataagttattgggaagaaaaagctaattggtctttgaatagaagacttctggacaatttttcactttcacagatatgaagctttgttttactttctcacttataaatttaaaatgttgcaactgggaatataccacgacatgagaccaggttatagcacaaattagcaccctatatttctgcttccctctattttctccaagttagaggtcaacatttgaaaagccttttgcaatagcccaaggcttgctattttcatgttataatgaaatagtttatgtgtaactggctctgagtctctgcttgaggaccagaggaaaatggttgttggacctgacttgttaatggctactgctttactaaggagatgtgcaatgctgaagttagaaacaaggttaatagccaggcatggtggctcatgcctgtaatcccagcactttgggaggctgaggcgggcggatcacctgaggttgggagttcgagaccagcctgaccaacacggagaaaccctatctctactaaaaatacaaaagtagccgggcgtggtgatgcgtgcctgtaatcccagctacccaggaaggctgaggcggcagaatcacttgaacccggaggcggaggttgcggtaagccgagatcacctccagcctggacactctgtctcgaaaaaaagaaaagaaacacggttaataacatataaatatgtatgcattgagacatgctacctaggacttaagctgatgaagcttggctcctagtgattggtggcctattatgataaataggacaaatcatttatgtgtgagtttctttgtaataaaatgtatcaatatgttatagatgaggtagaaagttatatttatattcaatatttacttcttaaggctagcggaatatccttcctggttctttaatgggtagtctatagtatattatactacaataacattgtatcataagataaagtagtaaaccagtctacattttcccatttctgtctcatcaaaaactgaagttagctgggtgtggtggctcatgcctgtaatcccagcactttgggggccaaggagggtggatcacttgagatcaggagttcaagaccagcctggccaacatggtgaaaccttgtctctactaaaaatacaaaaattagccaggcgtggtggtgcacacctgtagtcccagctactcgggaggctgagacaggagatttgcttgaacccgggaggcggaggttgcagtgagccaagattgtgccactgcactccagcctgggtgacagagcaagactccatctcaaaaaaaaaaaaagaagcagacctacagcagctactattgaataaatacctatcctggattttaaaaaagaaaaaaatatatataattttattttaaattggcttttatctttaattcttttttttaaagttatcaaatcttcattttctaagagtagccctttatagtgtacaaaatgatattaagtgcattattatcttcgcttttcatggctctgagtcataaaacaagctggtggatctcactgtacctaatttatagacgaggaaattgtcattcaaaaagattgactgttatgcccagggtcagcactaacctgcagaaccagtattcagtccccaagttcagtgtcttctactgccctctactaatgaaaagtgaaaatttccctggggtctaattctctcttcagtttgctgtgccgttgtttatctttgagtcttcattctctgaagatggctttctgcctgtttctggtacattagaattctcactatgatatagaaatggcttcagtttcatagcataatcttgcagttagctctgaattgcctcaaaaaccctgaacaacgcgaggttccagatgtgttttacttctttcattcatatttacccccatttgttgtttaaaaagaattatgaacaattattacatcatatgtagaccactttcactgattatatgttgacattttcctcagtaaaacataaagttcttaacaagactatactgtaacacctttctccaacaaaatcagctgtatgttgaaaactattaagtcattgctaatgttttaagccataatacagacagccttatactctatgatgggagaagggaaagtagtttgtccgatggtgctactctgtataaacattactgatgctatctatagtagggcaagaaaagtaaaaagagttttgattattcaggcagcatttttaaaaacctgtgaatttgtatcagttctcatctaaacatttggacacaagtataaaatgaaaacatatgcacaagttatggtttttaagttatctgctcttttttttggtttcactgtacctttgtactcttctattagtgggaataatcagacatgaactgtgacttcacatgtacagtcatacctcacttaatgatggagatgcactctgagaaatgtctaattaggttatttcatcgttgtgggaacatcatagagtgtacttacacaaacctagatagtgtagcctgctacacatgtaggacatgtatatagcctattgctcctaggctacagcatgttgctgttctgaatcatgtaggcaattgtaacacaatggcaagtgtctgtttattcaaacatctaaacacagaaaagatactacaacaataacaatatggtataaaagattttgtaaaaaatctggtcaggtgcagtggttcacgcctgtaatcctagcactttgggaggctgcctcagcaggtggattgcttgagcccagaagctcaagaccagcctgggcaacatggcgaaaccccgtctctgctaaaagtacaaaagctgaggttggaggatcacctgagcctggcaaggtcaaggctgcagtgagccatgatcataccactgcactccagcctgggtgacagagtgactccccatctaaaaaaaaaaatatatatatatatatatactatatatatatatataccatatatatggtatatatatatatagtatatatatatatggtgtgtgtatatatatatatatggtatacctgtatagggcacttactaacggagcttacagaactggaagttgctctggatgagtcagtggtgagtgaatgtaaaggcctaggacattactgtacactactgtagactttataaacaccgtacacttaggtgacactaaaatttataaaaaatgtttttcttctggttgggcatggtgccttatgcctataatcccagcattatgggaggccaaggtgggtggatcactcgaggtcatgagtttgggaccagccgggccaacatggctaaaccccatctctactaaaaatacgataattagccaggtgtggtggcacatgcgtgtagtcccagctaattgagaggctgaggcaggagaattgcttgaatccaggaggtggaggttgcagtgagccaagatcgaaccactgcactctagtctgggtgacagaggagcaagactctgtctcaaaaaaaaaaattctataatttttatagaaataataaaaaactaaccttagcttactgtaaattttctagtttagaaacttatttaaaaacaatttttggactcttctagtaataacgtagcttaaaacacacattgcatagctgtacaaaaatattttccttatatccttattatataagcttttatctatttaaattttgaatttttaaactttttggtcaaaaaccaagacaaacacactagcctaggcctatgcagggtcaggatcaagacatccctagcaggtgacaggaatttttcaactccattataatctgtggggccaccatcatatatatattgtacattgaccgaaacatggttacatgactatataatttgcgtcaatactgctcagtgtgccatatttaaatttacatgactatattgtgatattcttttcaaaataaagtttatttgggagataa

SEQ ID NO: 195846 - DNA, 636 bp, Artificial Sequence
  derived and/or modified sequence
atgagactgttcctgtggaacgccgtgctgaccctgttcgtgaccagcctgatcggcgccctgatccccgagcccgaggtgaagatcgaggtgctgcagaagcccttcatctgccacagaaagaccaagggcggcgacctgatgctggtgcactacgagggctacctggagaaggacggcagcctgttccacagcacccacaagcacaacaacggccagcccatctggttcaccctgggcatcctggaggccctgaagggctgggaccagggcctgaagggcatgtgcgtgggcgagaagagaaagctgatcatcccccccgccctgggctacggcaaggagggcaagggcaagatcccccccgagagcaccctgatcttcaacatcgacctgctggagatcagaaacggccccagaagccacgagagcttccaggagatggacctgaacgacgactggaagctgagcaaggacgaggtgaaggcctacctgaagaaggagttcgagaagcacggcgccgtggtgaacgagagccaccacgacgccctggtggaggacatcttcgacaaggaggacgaggacaaggacggcttcatcagcgccagagagttcacctacaagcacgacgagctgtag

SEQ ID NO: 195847 - DNA, 636 bp, Artificial Sequence
  derived and/or modified sequence
atgagactgttcctgtggaatgcagttcttaccctcttcgttacatctctcatcggcgcactgatacctgagccagaggtgaagatcgaagtactacagaaaccttttatctgtcatcgaaaaactaaaggcggggatcttatgcttgtgcactacgagggttatctggagaaagacggcagtctgtttcactctacgcacaaacacaacaacggacagcctatctggtttacactgggtattctggaagctctgaaggggtgggatcagggactgaaaggaatgtgcgtgggggaaaagaggaagctgattattccgccagcccttggatacggcaaagagggcaaaggaaaaatcccacctgaatccactctcattttcaacattgaccttctcgaaataaggaatggaccaagaagtcacgagtcctttcaagagatggatttaaatgatgactggaagttgtccaaggatgaagtaaaggcttatctgaagaaagagttcgaaaagcacggcgcagtggtcaacgaatctcatcacgacgctcttgtcgaggacatctttgacaaggaggacgaggataaggatggatttataagtgcacgggaatttacctacaagcacgatgaattgtag

SEQ ID NO: 195848 - DNA, 636 bp, Artificial Sequence
  derived and/or modified sequence
atgaggctcttcctgtggaatgctgtgctgaccctgtttgtgaccagcctcatcggggccctgatccctgagcctgaggtgaagattgaggtgctgcagaagcccttcatctgccacaggaagaccaagggcggggacctgatgctggtgcactatgagggctacctggagaaggatggcagcctcttccacagcacccacaagcacaacaacggccagcccatctggttcaccctgggcatcctggaggccctgaagggctgggaccagggcctgaagggcatgtgtgtgggggagaagaggaagctgatcatccccccagccctgggctacggcaaggagggcaagggcaagatccccccagagagcaccctcatcttcaacatcgacctgctggagatcagaaatggccccaggagccatgagagcttccaggagatggacctgaatgatgactggaagctgagcaaggatgaggtgaaggcctacctgaagaaggagtttgagaagcatggagctgtggtgaatgaaagccaccatgatgccctggtggaggacatctttgacaaggaggatgaggacaaggatggcttcatcagcgcccgggagttcacctacaagcatgatgagctgtag

SEQ ID NO: 195849 - DNA, 636 bp, Artificial Sequence
  derived and/or modified sequence
atgcggctgttcctgtggaacgccgtgctgaccctgttcgtgaccagtctcataggtgccctcatcccagaacctgaagtgaagatagaagtgctccagaagccttttatctgccatcgtaaaactaaggggggagacctgatgttggtgcactacgagggttaccttgaaaaagatggtagtcttttccactcgacccataaacacaacaatggtcagcccatctggtttactttgggtatcctagaggcccttaaaggctgggaccagggactgaaaggcatgtgcgtgggcgagaagcgtaaattaattattcctcccgccctaggttacggaaaagagggaaagggaaaaattccacccgaaagcactctcatattcaacatcgatctgctggaaattcgcaacggtcctcggtcccacgagtccttccaagaaatggatctgaatgatgactggaagctgtccaaagacgaagtcaaggcttatctcaaaaaagagtttgagaaacacggagcggtggttaatgagagtcaccacgatgctctcgtggaagacatttttgacaaggaggacgaggataaggatggcttcatcagtgcacgcgagtttacatacaagcacgatgagctgtag

SEQ ID NO: 195850 - DNA, 636 bp, Artificial Sequence
  derived and/or modified sequence
atgcgcctcttcttatggaatgcagttctcaccctcttcgtcaccagtctcataggagcgctcataccagaacctgaggtgaagattgaagtccttcagaaacccttcatttgccaccggaaaactaagggtggtgacctgatgctggttcactacgagggctacttggagaaggacggcagcctgttccatagtacacacaaacacaacaacggccagcccatctggtttactctcggcatactcgaggcactcaaaggctgggatcaggggcttaagggcatgtgcgtgggcgaaaaacgcaaactgattattccgccagctctgggctacggaaaagaaggaaaaggcaaaatccctcccgagagtacattaattttcaacatagatcttcttgaaattaggaatggacccaggagtcatgaaagcttccaggagatggacctgaatgacgactggaaactgagcaaagatgaagtgaaagcttacctcaagaaagagtttgagaagcatggagctgtagttaacgagagccaccatgacgctcttgtggaggacatctttgacaaagaagacgaagataaggacggcttcattagtgctagagaatttacctacaaacatgacgagctctag

SEQ ID NO: 195851 - protein, 888 aa, Artificial Sequence
  derived and/or modified sequence
MAGAAAESGRELWTFAGSRDPSAPRLAYGYGPGSLRELRAREFSRLAGTVYLDHAGATLFSQSQLESFTSDLMENTYGNPHSQNISSKLTHDTVEQVRYRILAHFHTTAEDYTVIFTAGSTAALKLVAEAFPWVSQGPESSGSRFCYLTDSHTSVVGMRNVTMAINVISTPVRPEDLWSAEERSASASNPDCQLPHLFCYPAQSNFSGVRYPLSWIEEVKSGRLHPVSTPGKWFVLLDAASYVSTSPLDLSAHQADFVPISFYKIFGFPTGLGALLVHNRAAPLLRKTYFGGGTASAYLAGEDFYIPRQSVAQRFEDGTISFLDVIALKHGFDTLERLTGGMENIKQHTFTLAQYTYVALSSLQYPNGAPVVRIYSDSEFSSPEVQGPIINFNVLDDKGNIIGYSQVDKMASLYNIHLRTGCFCNTGACQRHLGISNEMVRKHFQAGHVCGDNMDLIDGQPTGSVRISFGYMSTLDDVQAFLRFIIDTRLHSSGDWPVPQAHADTGETGAPSADSQADVIPAVMGRRSLSPQEDALTGSRVWNNSSTVNAVPVAPPVCDVARTQPTPSEKAAGVLEGALGPHVVTNLYLYPIKSCAAFEVTRWPVGNQGLLYDRSWMVVNHNGVCLSQKQEPRLCLIQPFIDLRQRIMVIKAKGMEPIEVPLEENSERTQIRQSRVCADRVSTYDCGEKISSWLSTFFGRPCHLIKQSSNSQRNAKKKHGKDQLPGTMATLSLVNEAQYLLINTSSILELHRQLNTSDENGKEELFSLKDLSLRFRANIIINGKRAFEEEKWDEISIGSLRFQVLGPCHRCQMICIDQQTGQRNQHVFQKLSESRETKVNFGMYLMHASLDLSSPCFLSVGSQVLPVLKENVEGHDLPASEKHQDVTS

SEQ ID NO: 195852 - DNA, 2667 bp, Artificial Sequence
  derived and/or modified sequence
atggccggcgccgctgccgagtctgggcgggagctgtggacattcgctggatcccgcgacccatctgcacccagattggcctatgggtatgggcctgggtctctgcgggagttgcgagcccgtgagttctccagattggctgggacagtgtacctggaccacgcaggagctaccctattcagtcagagccagctggaaagctttacctccgatctgatggaaaatacatatgggaacccccattcacaaaatattagcagtaagctgacccacgatactgtggaacaggttcgttataggattctcgcccactttcacacgacggctgaagactacaccgtgatttttactgctggctccacagctgctctgaagctggtcgccgaggcttttccatgggtgagccaagggcctgaatcctcaggcagtcggttttgttatttgacagattctcacacgagcgtggtgggcatgagaaatgtgactatggctattaatgtgatttcgactccagtgaggcctgaagacctgtggtccgcagaagaacgctcagcctccgcatccaatcctgattgccagctgcctcatctgttctgttatcctgcccagagcaactttagcggcgtgaggtatcctctgtcttggatcgaagaagtaaagagcggccgactacaccctgtctcaacccccggaaaatggtttgttttgctcgatgccgctagctacgtctcaacatccccactagatttgtccgcccatcaggccgacttcgttccaatttctttctacaaaatcttcggatttccaacaggcttaggagccctactcgtgcataaccgcgccgctccgctcttaaggaagacctattttggaggcgggactgcctcagcctacctcgccggggaagatttttatataccgcgccagagtgtggctcagaggttcgaggacgggacaatttcttttctggacgtgatcgccctgaagcacggattcgatactcttgaacgcctcacaggggggatggagaatattaagcagcacaccttcactttagcgcaatacacatacgtcgccttgtctagccttcagtatcccaatggggctccagtagtccgcatatactctgactcggagttttcatctcccgaagttcaaggaccaatcatcaattttaatgttctcgacgacaaaggcaacattatcggatatagccaagtagacaagatggcctctctctacaacatccacctcagaaccgggtgcttttgcaatacgggggcatgccaaaggcacctgggtatctcaaatgagatggtgcggaagcactttcaggccggccacgtctgtggggacaacatggatttgatcgatgggcagcccactggaagtgtgcggatttcattcgggtatatgagtaccctggacgatgtgcaagcgttcctccgctttatcatcgacactaggctccatagtagcggagattggcccgtgccccaagcgcacgctgacactggagagactggagcaccttctgccgattctcaggccgacgtgatccccgctgtgatgggtaggagaagtttgtcccctcaagaggatgctctcacggggtcgagagtctggaataacagcagcacggtgaacgctgtgcctgtggcgcctcccgtgtgcgatgtggctaggacacagcctacaccatctgaaaaggccgcgggcgtactggagggggccctgggacctcacgtcgttaccaatctctacctgtaccccatcaagtcatgtgccgctttcgaagttaccagatggcccgtcgggaatcagggtttgttgtacgaccgcagctggatggttgtgaaccacaatggagtgtgcctgtctcagaaacaggagcctcgtctatgtttgattcagccttttattgatctaaggcagagaattatggtcataaaggccaagggaatggagccaatcgaggtccctctggaggagaattccgagagaacacaaattcgtcaatcaagggtgtgcgccgaccgcgtttccacttacgattgcggagaaaagatcagctcttggctgagtacattcttcggtcgcccctgtcatttgatcaaacagtctagtaacagccaaaggaacgccaaaaagaagcacgggaaagaccagctcccaggcacaatggccacattatccttagttaacgaggcccaatacctgttgattaacacatcatccatcctggagttacataggcagctgaacacatctgacgaaaatgggaaagaagaactgtttagtttaaaagatctcagcctgagattcagagctaatatcattatcaacggaaagcgggcgtttgaggaggagaagtgggatgagatctcaataggcagcctgaggtttcaggtcctgggcccgtgccatcggtgccagatgatatgcattgaccagcagacgggtcagagaaaccagcatgtcttccaaaaattgagcgagtcaagggaaacaaaggtcaactttggaatgtaccttatgcacgcaagtctggatctgagctcaccctgctttcttagcgtgggcagccaagtactgcccgtgctgaaggagaatgtggaggggcacgacttgcccgccagtgagaagcaccaggacgtgacctcatag

SEQ ID NO: 195853 - DNA, 2667 bp, Artificial Sequence
  derived and/or modified sequence
atggccggggctgctgctgagagcggccgggagctgtggacctttgctggcagccgggaccccagcgccccccggctggcctacggctacggccctggcagcctgcgggagctgcgggcccgggagttcagccggctggccggcaccgtgtacctggaccatgctggggccaccctcttcagccagagccagctggagagcttcaccagtgacctgatggagaacacctacggcaacccccacagccagaacatcagcagcaagctgacccatgacacagtggagcaggtgcgctaccgcatcctggcccacttccacaccacagctgaggactacaccgtcatcttcaccgctggcagcacagctgccctgaagctggtggccgaggccttcccctgggtgtcccagggccctgagagcagcggcagccgcttctgctacctgacagacagccacacctctgtggtgggcatgagaaatgtgaccatggccatcaacgtcatcagcacccctgtgcggcctgaggacctgtggagcgctgaggagaggtctgccagcgccagcaacccagactgccagctgccccacctgttctgctacccagcccagagcaacttctctggagtgcgctaccccctgtcctggattgaggaggtgaagagcggccgcctgcaccctgtgtccacccctgggaagtggtttgtgctgctggatgctgccagctatgtgtccaccagccccctggacctgagcgcccaccaggccgactttgtgcccatctccttctacaagatcttcggcttccccaccggcctgggcgccctgctggtgcacaacagagctgcccccctgctgaggaagacctactttggaggcggcacagccagcgcctacctggccggggaggacttctacatcccccggcagagcgtggcccagagatttgaagatggcaccatctccttcctggatgtgattgccctgaagcacggctttgacaccctggagcggctgactggaggcatggagaacatcaagcagcacaccttcaccctggcccagtacacctacgtggccctgagcagcctgcagtacccaaatggagcccctgtggtgcgcatctacagcgacagcgagttcagcagccctgaggtgcagggccccatcatcaacttcaacgtgctggatgacaagggcaacatcatcggctacagccaggtggacaagatggccagcctgtacaacatccacctgaggacaggctgcttctgcaacacaggagcctgccagaggcacctgggcatcagcaatgagatggtgaggaagcacttccaggccggccacgtgtgtggggacaacatggacctgattgatggccagcccaccggctctgtgcgcatcagctttggctacatgagcaccctggatgatgtgcaggccttcctgcgcttcatcatcgacacccggctgcacagcagcggggactggcctgtgccccaggcccatgctgacacaggagagaccggggcccccagcgctgacagccaggctgatgtgatcccagctgtgatgggccgccgcagcctgagcccccaggaggatgccctgaccggcagccgggtgtggaacaacagcagcacagtgaatgctgtgcctgtggcccctcctgtgtgtgatgtggcccggacccagcccacccccagcgagaaggccgccggcgtgctggagggcgccctgggcccccacgtggtgaccaacctgtacctgtaccccatcaagagctgtgccgcctttgaggtgacccgctggcctgtgggcaaccagggcctgctgtatgaccgctcctggatggtggtgaaccacaacggggtgtgcctgagccagaagcaggagccccggctgtgcctgatccagcccttcatcgacctgcggcagaggatcatggtgatcaaggccaagggcatggagcccatcgaggtgcccctggaggagaacagcgagaggacccagatccggcagagccgggtgtgtgccgacagagtgtccacctatgactgtggggagaagatcagctcctggctgagcaccttcttcggccggccctgccacctgatcaagcagagcagcaacagccagagaaatgccaagaagaagcacggcaaggaccagctgcccggcaccatggccaccctgagcctggtgaatgaggcccagtacctgctgatcaacaccagcagcatcctggagctgcaccggcagctgaacaccagtgatgaaaatggcaaggaggagctgttcagcctgaaggacctgagcctgcgcttccgggccaacatcatcatcaacgggaagagggcctttgaggaggagaagtgggatgagatcagcatcggcagcctgcgcttccaggtgctgggcccctgccaccgctgccagatgatctgcatcgaccagcagacaggccagaggaaccagcacgtgttccagaagctgtctgagagccgggagaccaaggtgaactttggcatgtacctgatgcacgccagcctggacctgagcagcccctgcttcctgtctgtgggcagccaggtgctgcctgtgctgaaggaaaatgtggagggccatgacctgcctgccagcgagaagcaccaggatgtgaccagctag

SEQ ID NO: 195854 - DNA, 6160 bp, Artificial Sequence
  derived and/or modified sequence
ctggatggactagccggggccatggccggcgcggcggcggagtcagggcgggagctgtggaccttcgcgggttcccgggacccgagcgcaccgcggctagcctacggctacggcccgggcagcctgcgcgagctgcgggcgcgcgagttcagccgcctggcaggaactgtctatcttgaccatgcaggtgccaccttgttctcccagagccagctcgaaagcttcactagtgatctcatggaaaacacttatggtaatcctcacagccagaacatcagcagcaagctcacccatgacactgtggagcaggtgcgctacagaatcctggcgcacttccacaccaccgcagaagactacactgtgatcttcactgccgggagcacggctgctctcaaactggtggcagaggcctttccatgggtgtcccagggcccagagagcagtgggagtcgcttctgttacctcaccgacagccacacctccgtagtgggtatgcggaacgtgaccatggctataaatgtcatatccaccccggtcaggccagaggacctgtggtctgcagaggaacgtagtgcttcagccagcaacccagactgccagctgccgcatctcttctgctacccagctcagagtaacttttctggagtcagataccccctgtcctggatagaagaggtcaagtctgggcggttgcaccctgtgagcacgcctgggaagtggtttgtgctgctggatgcagcctcctacgtgagcacctcgcctttggacctgtcagctcaccaggccgactttgtccccatctccttctataagatcttcgggtttcctacaggcctgggcgctctgctggtccataatcgtgcggctcctctactgaggaagacctactttggaggagggacagcctctgcgtacctagcaggagaagacttctacatcccgaggcagtcggtagctcagaggtttgaagatggcaccatctcattccttgatgttatcgcgctaaaacatggatttgacaccctagagcgcctcacaggtggaatggagaatataaagcagcacaccttcaccttggctcagtatacctacgtggccctgtcctctctccagtaccccaatggagcccctgtggtgcggatttacagcgattctgagttcagcagccctgaggttcagggcccaatcatcaattttaatgtgctggatgacaaagggaacatcattggttactcccaggtggacaaaatggccagtctttacaacatccacctgcgaactggctgcttctgtaacactggggcctgccagaggcacctgggcataagcaacgagatggtcaggaagcattttcaggctggtcatgtctgtggggacaatatggacctcatagatgggcagcccacaggatctgtgaggatttcatttggatacatgtcgacgctggatgatgtccaggcctttcttaggttcatcatagacactcgcctgcactcatcaggggactggcctgtccctcaggcccatgctgacaccggggagactggagccccatcagcagacagccaggctgatgttatacctgctgtcatgggcagacgtagcctctcgcctcaggaagatgccctcacaggctccagggtttggaacaactcgtctactgtgaatgctgtgcctgtggccccacctgtgtgtgatgtcgccagaacccagccgactccttcagagaaagctgcaggagtcctggagggggcccttgggccacatgttgtcactaacctttatctctatccaatcaaatcctgtgctgcatttgaggtgaccaggtggcctgtaggaaaccaagggctgctatatgaccggagctggatggttgtgaatcacaatggtgtttgcctgagtcagaagcaggaaccccggctctgcctgatccagcccttcatcgacttgcggcaaaggatcatggtcatcaaagccaaagggatggagcctatagaggtgcctcttgaggaaaatagtgaacggactcagattcgccaaagcagggtctgtgctgacagagtaagtacttatgattgtggagaaaaaatttcaagctggttgtcaacattttttggccgtccttgtcatttgatcaaacaaagttcaaactctcaaaggaatgcaaagaagaaacatggaaaagatcaacttcctggtacaatggccaccctttctctggtgaatgaggcacagtatctgctgatcaacacatccagtattttggaacttcaccggcaactaaacaccagtgatgagaatggaaaggaggaattattctcactgaaggatctcagcttgcgttttcgtgccaatattattatcaatggaaaaagggcttttgaagaagagaaatgggatgagatttcaattggctctttgcgtttccaggttttggggccttgtcacagatgccagatgatttgcatcgaccagcaaactgggcaacgaaaccagcatgttttccaaaaactttctgagagtcgtgaaacaaaggtgaactttggcatgtacctgatgcatgcatcattggatttatcctccccatgtttcctgtctgtaggatctcaggtgctccctgtgttgaaagagaatgtggaaggtcatgatttacctgcatctgagaaacaccaggatgttacctcctaaaaaaaatttttagcataaagtttctcttttacagtgatctctattattgttaagatctgcaacttggttcagtagaacttgatgttttgaataaggagagctctttttctttagaggcagggaatgctctcacctgcttccttctgcctttgacttctcaccctgcaaatttgcactggctgtgctcaggagagcacttctgaggcctcaggaacgaatgctgcacccacatccagtgaggctcctgtaggtatttgaagtataatcacttgtaatcagatgaaatttttaatgaagttcactgggaagattgaacttactgcgggtccctattttgccattttctcacattgttactttgtttttagagagcatctttggatctctccaacccgtttgtagtgaggaagggagtctatgcccagtgatcctgggtatgagaaggtgctcctctcctcccatgtacatgatggtgtgggtttatgctcaggggcccagagggtaacttgtgaccacattccttgaggggagtttctaccagaatatttatattctgagcaaaggcacaggccagcaattcctttcctgttgcttcccatccctggcctccgtcctcatcccccactgagttgatgcactgaggatggctcacgagcctgaagttacactcagtgatggctgtgcttatgcaggttgtcatcctcccctccacaagcccacaggatggtgttggtccatcacccgagagcctccaaatcctatcgagggaggaactttggcattcaggaatcctgtctgtatcatctttgaccactgctcctgcagcctccagatgaaaatgtccagtgaggaaatctcattctctaatgaagttacccatcccgctgagtttctaagaagtttctccctgtgcggagcttgtgtgtgccttatctgcttctgcatgacttccagcctggggtcttaccctgtcctctggagcaatgcagagtgagtacatccactccacattcattctgctggcgtccttctgaagcctgctgtccatgtgtgaacccagtcccttcatcatcttccccctggatggttgtatttttccagtcacttctcccccaaatgtctgcctgctgcagcccactgcatcttttgaaagcctgtgccaccccatctctcctgctgctcagttggagagcaggctccaggctcaggcttccctaatgtatctgttcagagcctgtgggattcagggtcagtttgtttcattatcacatttgtaggactttgtgttgttcccagcactaggtgagatttgaaagatgaggtgtgctctgttctcaaggattgttgagatggagcctaatgattgcacactcacgtgctgtgaagagttaagggtaaaaagtacaactctgactctggttcctgagatcaccgaaagaagaggcaaatgaagttaggtggggtggggtggggtttattgttttgaactgtttattaaaaacgcaacctcttcaaagactcagcactgccacatcatatgagtggacttgtcctcatcagctaactgataggagaacaatgccctaaagtaatggatttatccacctactcaggccagtttcatgcaggagggaactttccagatggcacattgccccatttccaagaccttccgctgacaaatgcatcatattaattatgatggaaaacaagtaagaaggcatgctctacaaaaattaggtcacttgcccaggtgcggtggctcacacctgtaattccagcactttgggaggctgacgtgggcagatcatgaggtcaggagatcgagaccatcctggctaacacggtgaaaccccgtctctactaaaatacaaaaaattagctgggcatggtggcatgcacctgtagtcccagctacttgggaggctgaggcaggggaatcgcttgaacccgggaggcggaggttgcagtgagccgagatcatgccactgcacaccggcctggtgacagagcaagactccatctcaaaaaaaaaaaaaaaaaaattaggtcacttttgtcatcaagaatatgtttttcttatccacgtctatgtcaccttttgcagtagatactttcatgactgatttcaggctttttgtttttttgagacagggtctcactctgtcacccaggctggagtgcagtggcatgatcacagatcattgcagccttgacctcttgggctcaagcgattcccctgcctcagcctcccaagtagctgggactacaggcacacatcaccacatccagctaattttttttttcttttttttctttttggtagagatggcatctcactttgttgcccaggctagttttgaattcctgggctcaagccatcctcccgccacagcctcccaaagttctgggattacaagtgtgagccactgtgcccagcttttgatttcagacattttaatgcagatcctctcctttacagcactattatttggttatctacttataattactgatttaacattgatctgttttcactagactgtaagctccatgaggacaagtcctgtgccagtatatctctagtgtcagcagacaatactcaaaatttgttgacagactatttaaagctgcccctatttttatcattaattgattgaatattaattaaatatattttattaatttaaaatgaattttaaatgcattttttctttagtgtctaccttcaatatttcttgtatgaagtttcagctaaaaatgtactttgtgtatctgtagagtggcttcatattcagagtttatggacatttatgattttatgtcccctccttggttcttatctcctggagttcagccttatgtgcttctcaaagtgtataacaaaatcaaagacaatgtcatgtcccttgaatttaattctaacaccaaaccttggtgttagagtcacaaaaagtccttttttaaaaaaacttggtgagaacagacaataacttgtctttctgggcattcgcgtcatggtccttttagccagaagagaggttttcttttgcatagtttggtgagcatcaagaatcctttaaggagggtggcggtgctgacttctccccattgagagtcagcctcatcccctcctcagccttgtggatggagaagaacaggcagtgatatacattttctgctgttgaaagatgtccgcttatccttctctttcagtgaaaagttgcttttttattcaatatgtactgaacaggttctagagtttcagaaacaaaagaaacagaaccaacatttatagatctcactatagaggcatcactaattggggaaagacagactaggtaatagtcagatgtgatatagtatgtttaagctataggatggcaggtgcatgagtgttggttgtattattctttatttttttgtatgacttatgatattcatgataattaaaacgttttggaacaattca

SEQ ID NO: 195855 - DNA, 2667 bp, Artificial Sequence
  derived and/or modified sequence
atggccggcgccgccgccgagagcggccgggagctgtggaccttcgcaggtagccgggacccgtccgccccgaggctcgcgtacggctacggaccggggtcactgcgagagctgagagccagggagttttcaaggttagccgggactgtctacctggaccatgctggtgccacactgttttctcagtcgcagctggagtcttttaccagcgatctaatggagaacacctatggcaacccccatagccaaaatatttcctcaaagctgactcatgacactgtggaacaggtgagatacaggattttagcccatttccatacaaccgccgaggactacaccgtgatattcaccgcgggaagtaccgctgctcttaaactcgtggcggaggcgttcccctgggtgtcccagggacccgagagcagcggctcgagattttgttatctgaccgactcacatacaagcgtcgtgggcatgaggaacgtcaccatggcaatcaatgttatcagtacaccagtgagaccggaggacctatggtcggccgaggaaaggtccgctagcgcgtctaaccctgattgtcagttaccacatctgttttgctacccagctcaatcgaactttagtggggtgcgctaccctctgtcatggattgaagaggttaagagcggccggctgcatccggtgagcacacccggcaagtggtttgtactcctagacgctgcctcttatgtgtcgacatcacccttggacctgtccgcacaccaagcggactttgttcccatctctttttataagattttcggcttcccgacagggttgggagccttgctggttcataaccgggctgcaccactgctccgaaaaacgtacttcgggggtgggacagcttcggcctacctcgcaggtgaggacttctatatccctaggcaaagcgtagctcagcgctttgaggatgggaccatttctttcctcgatgtgatcgccctgaaacatggattcgataccctggaacgattgacaggaggaatggagaacatcaaacaacatacatttaccttagcccagtatacttatgtcgctctctccagtcttcagtacccaaacggcgccccggtggtgcgaatttattctgactccgagttctcctcgcccgaggtccagggccccataattaatttcaacgtgctggacgataaggggaacattatcgggtactcgcaggttgacaagatggcctctctttacaacattcacctgagaacgggctgtttctgcaacacaggcgcatgtcagcgccacctgggtataagcaatgaaatggttaggaagcatttccaagccggacacgtatgcggcgataacatggacttgatagatggacagcccaccgggtcagtccggatcagcttcggctacatgtccactttggatgatgtacaggcttttctcaggtttatcatcgatacccgattacatagcagcggagactggcccgtgcctcaagcacacgccgacactggcgagactggcgcccccagcgctgattcccaggccgacgttatacctgccgtcatgggcaggcgatccctcagcccacaggaagacgcactaaccggctctagagtttggaataactcaagtaccgtaaacgccgtgccagtagcaccccctgtctgtgacgttgcacggacccaaccaacaccatccgagaaggccgcaggagtgctggaaggcgcactggggccacatgtggtcactaacctgtacctctaccctataaaaagttgcgccgcgttcgaggtgacaaggtggcccgttggcaaccagggattgctgtacgatcggagttggatggtggtgaatcacaatggggtttgcctcagccagaagcaggagccccggctgtgtctgatacagcctttcattgatttgagacagagaatcatggtgatcaaggccaaaggcatggagcctatcgaggtcccactggaggagaattctgagaggactcagatacggcaatcgcgcgtctgcgcggaccgggtgtctacctacgactgtggagaaaagatcagctcctggttgtcaacattttttgggagaccatgccaccttatcaagcagtcctcgaattcccagcggaatgccaagaagaaacatgggaaagatcaattgcccggaaccatggctactttatcgctggtaaatgaggctcaatacctcctgattaatactagctccatcttagaactgcatagacagctcaatacttctgacgaaaatggcaaggaggagcttttttcattgaaggacttgagtctgcggttccgagctaacattattattaatgggaagcgggcgttcgaggaagaaaaatgggacgagattagtataggctcactgagattccaggtgttgggtccatgccaccgatgtcagatgatctgcatcgaccagcagacgggtcagcggaaccagcacgtgtttcagaagctctctgaatctagggaaacaaaagtcaatttcggcatgtatctgatgcacgccagccttgacctgagcagtccttgtttcttgtctgttgggtcccaggttctcccagtcctgaaagagaatgttgagggccacgacctgcccgcaagtgagaaacaccaggatgtgacttcctag

SEQ ID NO: 195856 - DNA, 2667 bp, Artificial Sequence
  derived and/or modified sequence
atggcgggagctgcagccgaatctggtcgagagctctggacttttgccggtagtcgtgacccgtcggcaccacggctggcttacggatacggaccaggctccctcagagaactgcgggctcgggagttcagcagattagctgggacagtctacctggaccatgccggagcaactctgttctcccagtcccagctcgaaagctttacgtccgatctgatggagaacacatacgggaaccctcattcccagaacatttcttctaagctgacgcacgacacagtagaacaagtccgttacagaatcctggcacacttccacaccactgctgaggattacacagttatctttacagcgggatcaacagccgctctaaagctggttgctgaggcctttccctgggtcagccagggccctgaaagcagcgggagccgcttttgttatctgaccgattctcatacctcagtcgttggcatgcgtaatgtgacaatggccatcaatgtcatttccacccctgtgaggcctgaagatctctggtctgccgaggagcgaagcgcttcagcctccaatccggattgccaactgccccatctcttttgctatcccgctcagagcaacttcagtggtgtccgctatcctctcagttggatcgaggaggttaagagtgggcgtctgcaccctgtcagcacgcccggaaagtggttcgtactgttagacgctgctagttatgtgagcaccagccccttggacctttcagcccatcaggctgactttgtccccatctccttctacaagatcttcggtttccccaccggactcggggcactgctggtgcacaatagagcagctcccctgctacgaaagacatattttggcggaggaacggcttccgcatatctcgccggagaagatttctatatcccaagacagtcggtagctcagcgcttcgaggacgggacaatcagtttccttgacgtcattgctcttaagcacgggttcgacaccctggaaaggcttactgggggaatggagaatattaaacagcacactttcaccttagcgcagtatacttatgtggcactttcatcattacagtaccctaacggtgcacctgttgttcgtatctactccgactcagaattttcatcaccagaagtgcagggaccgatcattaactttaatgtccttgatgataagggtaacatcatcggttacagccaggtggataagatggcttccttatacaatatccacctgagaacgggatgcttttgtaatactggggcttgtcaacgacacctcgggatctccaatgaaatggtgcgcaaacattttcaagccggacacgtatgtggcgacaacatggacctaattgacggacagccgactggctcagtgcgcatatcattcggctacatgagcacactcgacgacgtgcaggcctttctacgctttatcattgatacgcgtctacattcatcaggagattggcccgtcccacaagctcatgcggatacgggtgaaacaggagctccttctgctgattcccaagccgacgtcatccctgccgtaatggggagaagaagcctctcaccacaggaagatgccctcaccggcagcagagtctggaacaatagcagcacggtcaacgcagtcccagtggcccctcctgtgtgcgacgtcgcgagaacgcagcccactccgtccgaaaaggcagccggagtgttagagggcgctcttggcccacatgttgtgacaaatctctacctgtatcctattaaatcttgcgcagcttttgaggtaacacggtggcccgtggggaaccagggccttctctacgatcggtcatggatggtggtgaaccataacggggtgtgtctgtcccagaagcaggaaccacgactgtgtcttatccagcctttcattgatttgcgacaacgaattatggtcattaaagctaagggtatggaaccaattgaggtgcccctggaggaaaactcagagagaacccaaatccgccagtcacgtgtgtgtgcagatcgcgtgagcacgtatgattgcggtgaaaagatctcttcatggctctccactttcttcggaagaccctgccatctgattaagcagtccagtaatagccaaagaaacgccaaaaagaagcacggcaaagaccagttacctgggacaatggccacgttgtccctggtcaatgaagcccaataccttctcatcaacacatcatccatccttgagttacataggcagctgaacacatcagacgaaaacggtaaagaagaactgttttcactgaaagacctctctcttagattccgcgctaatatcataatcaatggcaagagggccttcgaagaagagaagtgggacgagataagcattggaagtctgagatttcaggtgctcggcccttgccacagatgtcaaatgatttgtattgaccagcagaccggacagagaaatcagcacgtttttcagaaactgagcgagtcccgggagacaaaggtgaactttggcatgtacttgatgcacgcctcccttgacctgagttctccatgcttccttagcgtgggatctcaggttttaccagtcctcaaagaaaacgtcgaaggacacgatctgccggcatccgaaaaacatcaggacgtcacatcttag

SEQ ID NO: 195857 - DNA, 2667 bp, Artificial Sequence
  derived and/or modified sequence
atggccggcgccgccgccgagagcggcagagagctgtggaccttcgccggcagcagagaccccagcgcccccagactggcctacggctacggccccggcagcctgagagagctgagagccagagagttcagcagactggccggcaccgtgtacctggaccacgccggcgccaccctgttcagccagagccagctggagagcttcaccagcgacctgatggagaacacctacggcaacccccacagccagaacatcagcagcaagctgacccacgacaccgtggagcaggtgagatacagaatcctggcccacttccacaccaccgccgaggactacaccgtgatcttcaccgccggcagcaccgccgccctgaagctggtggccgaggccttcccctgggtgagccagggccccgagagcagcggcagcagattctgctacctgaccgacagccacaccagcgtggtgggcatgagaaacgtgaccatggccatcaacgtgatcagcacccccgtgagacccgaggacctgtggagcgccgaggagagaagcgccagcgccagcaaccccgactgccagctgccccacctgttctgctaccccgcccagagcaacttcagcggcgtgagataccccctgagctggatcgaggaggtgaagagcggcagactgcaccccgtgagcacccccggcaagtggttcgtgctgctggacgccgccagctacgtgagcaccagccccctggacctgagcgcccaccaggccgacttcgtgcccatcagcttctacaagatcttcggcttccccaccggcctgggcgccctgctggtgcacaacagagccgcccccctgctgagaaagacctacttcggcggcggcaccgccagcgcctacctggccggcgaggacttctacatccccagacagagcgtggcccagagattcgaggacggcaccatcagcttcctggacgtgatcgccctgaagcacggcttcgacaccctggagagactgaccggcggcatggagaacatcaagcagcacaccttcaccctggcccagtacacctacgtggccctgagcagcctgcagtaccccaacggcgcccccgtggtgagaatctacagcgacagcgagttcagcagccccgaggtgcagggccccatcatcaacttcaacgtgctggacgacaagggcaacatcatcggctacagccaggtggacaagatggccagcctgtacaacatccacctgagaaccggctgcttctgcaacaccggcgcctgccagagacacctgggcatcagcaacgagatggtgagaaagcacttccaggccggccacgtgtgcggcgacaacatggacctgatcgacggccagcccaccggcagcgtgagaatcagcttcggctacatgagcaccctggacgacgtgcaggccttcctgagattcatcatcgacaccagactgcacagcagcggcgactggcccgtgccccaggcccacgccgacaccggcgagaccggcgcccccagcgccgacagccaggccgacgtgatccccgccgtgatgggcagaagaagcctgagcccccaggaggacgccctgaccggcagcagagtgtggaacaacagcagcaccgtgaacgccgtgcccgtggccccccccgtgtgcgacgtggccagaacccagcccacccccagcgagaaggccgccggcgtgctggagggcgccctgggcccccacgtggtgaccaacctgtacctgtaccccatcaagagctgcgccgccttcgaggtgaccagatggcccgtgggcaaccagggcctgctgtacgacagaagctggatggtggtgaaccacaacggcgtgtgcctgagccagaagcaggagcccagactgtgcctgatccagcccttcatcgacctgagacagagaatcatggtgatcaaggccaagggcatggagcccatcgaggtgcccctggaggagaacagcgagagaacccagatcagacagagcagagtgtgcgccgacagagtgagcacctacgactgcggcgagaagatcagcagctggctgagcaccttcttcggcagaccctgccacctgatcaagcagagcagcaacagccagagaaacgccaagaagaagcacggcaaggaccagctgcccggcaccatggccaccctgagcctggtgaacgaggcccagtacctgctgatcaacaccagcagcatcctggagctgcacagacagctgaacaccagcgacgagaacggcaaggaggagctgttcagcctgaaggacctgagcctgagattcagagccaacatcatcatcaacggcaagagagccttcgaggaggagaagtgggacgagatcagcatcggcagcctgagattccaggtgctgggcccctgccacagatgccagatgatctgcatcgaccagcagaccggccagagaaaccagcacgtgttccagaagctgagcgagagcagagagaccaaggtgaacttcggcatgtacctgatgcacgccagcctggacctgagcagcccctgcttcctgagcgtgggcagccaggtgctgcccgtgctgaaggagaacgtggagggccacgacctgcccgccagcgagaagcaccaggacgtgaccagctag

SEQ ID NO: 195858 - protein, 970 aa, Artificial Sequence
  derived and/or modified sequence
MKVNRETKRLYVGGLSQDISEADLQNQFSRFGEVSDVEIITRKDDQGNPQKVFAYINISVAEADLKKCMSVLNKTKWKGGTLQIQLAKESFLHRLAQEREAAKAKKEESTTGNANLLEKTGGVDFHMKAVPGTEVPGHKNWVVSKFGRVLPVLHLKNQHKRKIIKYDPSKYCHNLKKIGEDFSNTIPISSLTWELEGGNDPMSKKRRGEFSDFHGPPKKIIKVQKDESSTGSLAMSTRPRRVIERPPLTQQQAAQKRTCDSITPSKSSPVPVSDTQKLKNLPFKTSGLETAKKRNSISDDDTDSEDELRMMIAKEENLQRTTQPSINESESDPFEVVRDDFKSGVHKLHSLIGLGIKNRVSCHDSDDDIMRNDREYDSGDTDEIIAMKKNVAKVKNSTEFSQMEKSTKKTSFKNRENCELSDHCIKLQKRKSNVESALSHGLKSLNRKSPSHSSSSEDADSASELADSEGGEEYNAMMKNCLRVNLTLADLEQLAGSDLKVPNEDTKSDGPETTTQCKFDRGSKSPKTPTGLRRGRQCIRPAEIVASLLEGEENTCGKQKPKENNLKPKFQAFKGVGCLYEKESMKKSLKDSVASNNKDQNSMKHEDPSIISMEDGSPYVNGSLGEVTPCQHAKKANGPNYIQPQKRQTTFESQDRKAVSPSSSEKRSKNPISRPLEGKKSLSLSAKTHNIGFDKDSCHSTTKTEASQEERSDSSGLTSLKKSPKVSSKDTREIKTDFSLSISNSSDVSAKDKHAEDNEKRLAALEARQKAKEVQKKLVHNALANLDGHPEDKPTHIIFGSDSECETEETSTQEQSHPGEEWVKESMGKTSGKLFDSSDDDESDSEDDSNRFKIKPQFEGRAGQKLMDLQSHFGTDDRFRMDSRFLETDSEEEQEEVNEKKTAEEEELAEEKKKALNVVQSVLQINLSNSTNRGSVAAKKFKDIIHYDPTKQDHATYERKRDDKPKESKA

SEQ ID NO: 195859 - protein, 1167 aa, Artificial Sequence
  derived and/or modified sequence
MKVNRETKRLYVGGLSQDISEADLQNQFSRFGEVSDVEIITRKDDQGNPQKVFAYINISVAEADLKKCMSVLNKTKWKGGTLQIQLAKESFLHRLAQEREAAKAKKEESTTGNANLLEKTGGVDFHMKAVPGTEVPGHKNWVVSKFGRVLPVLHLKNQHKRKIIKYDPSKYCHNLKKIGEDFSNTIPISSLTWELEGGNDPMSKKRRGEFSDFHGPPKKIIKVQKDESSTGSLAMSTRPRRVIERPPLTQQQAAQKRTCDSITPSKSSPVPVSDTQKLKNLPFKTSGLETAKKRNSISDDDTDSEDELRMMIAKEENLQRTTQPSINESESDPFEVVRDDFKSGVHKLHSLIGLGIKNRVSCHDSDDDIMRNDREYDSGDTDEIIAMKKNVAKVKNSTEFSQMEKSTKKTSFKNRENCELSDHCIKLQKRKSNVESALSHGLKSLNRKSPSHSSSSEDADSASELADSEGGEEYNAMMKNCLRVNLTLADLEQLAGSDLKVPNEDTKSDGPETTTQCKFDRGSKSPKTPTGLRRGRQCIRPAEIVASLLEGEENTCGKQKPKENNLKPKFQAFKGVGCLYEKESMKKSLKDSVASNNKDQNSMKHEDPSIISMEDGSPYVNGSLGEVTPCQHAKKANGPNYIQPQKRQTTFESQDRKAVSPSSSEKRSKNPISRPLEGKKSLSLSAKTHNIGFDKDSCHSTTKTEASQEERSDSSGLTSLKKSPKVSSKDTREIKTDFSLSISNSSDVSAKDKHAEDNEKRLAALEARQKAKEVQKKLVHNALANLDGHPEDKPTHIIFGSDSECETEETSTQEQSHPGEEWVKESMGKTSGKLFDSSDDDESDSEDDSNRFKIKPQFEGRAGQKLMDLQSHFGTDDRFRMDSRFLETDSEEEQEEVNEKKTAEEEELAEEKKKALNVVQSVLQINLSNSTNRGSVAAKKFKDIIHYDPTKQDHATYERKRDDKPKESKAKRKKKREEAEKLPEVSKEMYYNIAMDLKEIFQTTKYTSEKEEGTPWNEDCGKEKPEEIQDPAALTSDAEQPSGFTFSFFDSDTKDIKEETYRVETVKPGKIVWQEDPRLQDSSSEEEDVTEETDHRNSSPGEASLLEKETTRFFFFSKNDERLQGSDLFWRGVGSNMSRNSWEARTTNLRMDCRKKHKDAKRKMKPK

SEQ ID NO: 195860 - DNA, 3300 bp, Artificial Sequence
  derived and/or modified sequence
atgagcgtattgaataaaaccaaatggaagggaggaacccttcagattcagcttgccaaggagtccttcctgcatagacttgcccaggagcgagaagctgccaaagccaagaaagaggagtcaacgacagggaatgccaacctgctggagaagaccggcggcgtcgattttcatatgaaagccgtccctggcactgaagtccccggtcacaagaattgggtcgtgtctaagtttggccgcgtattacccgtgttacacctcaagaaccaacataagcggaaaatcattaaatatgacccgtccaagtactgtcataatttgaagaaaattggagaggacttcagtaacaccattcctatctcctccttaacttgggagctagaaggggggaatgatccaatgtccaagaaacggcgtggtgaattttccgattttcacggaccacccaagaagattatcaaggttcagaaggacgagagcagcactggctcattggccatgagtacacggccacgtagagttatagagcgcccccccttaactcagcagcaagcagcacagaagcgcacatgcgactcaattaccccctctaagtccagtcctgtgcccgtcagcgatacccaaaaactgaaaaacctgccgtttaagacaagcggactggagaccgcaaagaaacggaacagtatctccgatgatgacacggactctgaggacgagcttcgaatgatgattgccaaagaagagaacctgcagcgcacaacacagccaagtattaatgaatctgaaagtgatccattcgaagtcgtacgggacgacttcaaaagtggcgtgcataaacttcatagcctcatcggactggggattaaaaatcgagtctcctgtcatgactctgacgatgacattatgaggaacgatagagagtacgacagcggggatacggatgagatcatagctatgaaaaagaacgtagcgaaagtgaagaactccactgaattctcacaaatggagaagtccactaagaagacatcatttaagaaccgcgaaaattgcgagctttctgaccactgcattaaactccagaaaagaaaaagcaatgtcgagtccgcactttctcacggacttaagagcctcaatcgcaaatcaccctcccactcatccagctccgaagacgccgacagtgctagcgagctggcggattccgaaggcggagaagagtataacgccatgatgaagaactgccttagagtcaatcttactttggctgacctggaacagctggcgggttccgacttaaaagtcccgaatgaggataccaagagcgatggcccagaaacaaccactcagtgtaaattcgacagaggctccaagtcgccgaagacaccaaccggcctgcggagaggccgtcagtgtattcggcccgctgagatagtggctagtctactcgagggggaggaaaatacctgtggcaagcagaagcctaaggaaaataacctgaaaccaaaatttcaggcattcaagggggttgggtgcctctatgagaaggaatctatgaaaaagtctctgaaagattcggtcgcttcgaataacaaggaccagaattctatgaagcatgaagatccttctattatctcaatggaggacggatctccttacgtcaatgggtccctcggagaagtcactccatgtcagcacgcaaagaaagcaaatggcccaaactacatccagccccaaaaacgtcagaccactttcgaatcacaggacaggaaggccgtgtccccatcatccagcgaaaagaggagcaagaaccccatctcacgtcctctggagggcaaaaaaagcctcagcctgagcgccaaaacgcacaacatcggatttgataaggactcttgccatagtacaaccaagactgaggcatcccaggaagagcggtcagatagtagtggattaacctccttgaaaaaatccccgaaagtcagcagcaaggacacacgagaaattaaaaccgatttctcattaagcatcagcaactcttcagacgtgagcgctaaggataaacacgctgaggacaatgagaaacgcctcgccgccctagaggcccgacagaaggccaaagaggtgcagaaaaaactagtccataatgctttagccaacctcgacggtcaccctgaagataagcccacacatattattttcggtagcgacagcgagtgcgaaaccgaggaaacatccacgcaggaacagtctcacccgggtgaggagtgggtgaaagaatctatgggcaagacttctgggaagctgttcgactctagcgatgatgacgagtccgattctgaggacgatagcaacaggttcaagatcaagccacagtttgaaggacgggcaggccagaagcttatggacctgcaaagccattttggcactgacgacagatttaggatggactcaagattcctcgagaccgattctgaggaggagcaagaagaggttaacgagaagaagacagcagaagaggaggaattagccgaggaaaaaaagaaagcacttaacgttgtgcaatctgtgctgcaaattaatctatccaatagcaccaatagagggagtgtggcagccaagaagttcaaggacatcatccactatgaccccacaaagcaggatcatgccacatacgaaaggaagagagatgataaaccaaaagagagcaaagcaaagcggaagaagaaaagggaagaggccgaaaaactgccggaggtatctaaagaaatgtattataacatagccatggacctaaaggaaatcttccagactactaaatataccagtgagaaagaggaaggcaccccatggaatgaggactgtggcaaagagaagcccgaggagattcaggacccagcagccctgacttctgatgccgagcagcctagcggcttcacttttagcttttttgattccgatacgaaggacataaaagaagaaacataccgcgttgaaaccgtgaagcccggtaaaattgtctggcaggaagacccaagactgcaggactctagctccgaggaagaagatgtcacggaagagactgaccatcggaactctagcccaggtgaggctagtctgcttgaaaaggaaacaacccgattttttttcttctccaagaatgacgagcgactgcaaggcagtgacctgttttggcgcggagtgggcagtaatatgtctcgcaattcatgggaggcacgaaccacgaacctccgaatggattgtcggaagaaacataaagacgccaaacgcaagatgaaacctaagtag

SEQ ID NO: 195861 - DNA, 2913 bp, Artificial Sequence
  derived and/or modified sequence
atgaaagtgaacagggagacaaaacgcctttatgtaggcggcttgtcccaggacatctcagaggctgaccttcaaaaccagtttagcaggttcggcgaggtgagtgatgtagagatcatcacacgtaaagatgatcagggtaatccccaaaaagtgtttgcatatatcaatatctctgtggcggaggccgaccttaagaaatgtatgtccgtgctgaataaaacaaagtggaagggaggaacactccagattcaactcgccaaggagtcctttctgcacagactagctcaggaacgtgaggctgcaaaggccaagaaagaagaatccactaccgggaacgctaacctccttgagaaaacaggcggagtcgactttcacatgaaggcggttcccgggacagaagtccctggtcataagaactgggtggttagcaagttcggacgagtgttgcccgttctgcacctgaaaaatcagcataaaagaaaaattattaagtacgatcctagtaagtactgtcacaacctgaaaaaaatcggggaggatttcagcaataccatccctatttcatcccttacatgggagctcgaggggggaaacgatcctatgtctaagaaacgtagaggagagtttagtgatttccatggtccccccaagaaaataattaaagttcagaaagatgagagtagcactggctcattggcgatgtcaacgaggccacggcgagtgatagaacgacctccactcactcagcagcaggccgctcagaagcgcacatgcgactcgatcacaccgtctaaaagcagtccggtgccagtgtcagatacacagaagctcaaaaatctgcccttcaagaccagtgggctcgagacagccaaaaaaagaaattccatcagcgatgacgacaccgacagtgaggatgagctacggatgatgatcgcgaaagaggaaaacctgcagcggaccacccagcccagcatcaatgaaagcgaatccgaccctttcgaggtcgtccgggacgatttcaaaagcggggtccataaactgcattccctcatcggcctaggcatcaaaaatagggtgagctgccatgactcggacgatgatataatgcgaaatgaccgagagtatgatagcggcgacacggacgagattattgcgatgaagaagaatgtggctaaagtcaaaaactccactgaatttagccagatggagaaaagcacaaagaagactagcttcaaaaatagggaaaattgtgagctgtcggatcactgcatcaaactccagaaacgcaagtcgaatgtcgaaagtgcactcagccacggtctaaagagtctaaatagaaagagccctagccatagctcctcatccgaggacgcagatagcgcatccgaattggctgactccgaagggggcgaagagtataatgcaatgatgaaaaattgtctcagagtcaatctgacattggccgacctggagcagctcgctgggagtgatcttaaggtccccaatgaagacaccaaaagcgacggccctgaaaccacaactcagtgcaagttcgaccgaggttccaaaagccccaaaactcctactggactccgtcgaggccgtcagtgcattagacctgcggagatagtcgccagtcttctggagggtgaggagaacacatgtggtaaacaaaaacccaaggagaacaacttgaagcccaagtttcaggcattcaagggggtcggttgcctctacgaaaaggagagcatgaagaagtccctcaaagattctgtggcttccaacaataaggaccagaattccatgaaacacgaagatccttcaattatcagcatggaggatgggagcccctatgtcaacggaagccttggtgaagtgacgccctgtcaacacgcgaagaaagccaatggcccaaattatatccagccccagaaaaggcagacaacctttgagagtcaggacagaaaagcagtgtccccctctagcagcgagaagagatccaaaaacccaatcagcaggcctcttgaaggtaagaaatcattgagcctgagtgcaaaaacccacaacattggatttgataaggattcatgccacagcacaacaaagaccgaagcatcacaggaagagagatctgatagcagcggtcttacttcactcaagaagagccctaaagttagctcaaaggacacacgtgagattaagactgattttagcctctctatatcaaactcctcagatgtatcagcaaaggacaagcacgccgaagataacgagaagaggcttgcagctctagaagcccggcagaaggcgaaagaagtgcagaaaaagttggtgcataacgccctggccaatctggatggacaccctgaggacaagccaactcatataatattcgggtctgacagtgaatgtgagacagaggagaccagtactcaggaacagagccacccaggagaagaatgggtgaaagaatctatgggtaagactagcggtaagctcttcgattcgagtgacgatgacgagtctgactcggaggatgattctaaccggttcaagatcaagcctcaatttgaggggcgggcaggacagaaacttatggatctccagtcgcattttggtaccgatgaccgctttagaatggacagtagattcctagaaacagactccgaggaggaacaggaagaagttaatgaaaaaaagactgctgaagaggaagagctcgccgaggagaagaagaaagccctcaatgtcgtgcagtccgtgctgcagattaacctatcaaactcgactaatcgcggtagcgtcgccgccaaaaagttcaaagacatcattcactacgatcctaccaagcaggatcacgccacctacgagcggaagagagacgacaagccgaaggagtctaaagcgtag

SEQ ID NO: 195862 - DNA, 3504 bp, Artificial Sequence
  derived and/or modified sequence
atgaaggtcaacagggaaacaaagagactatatgtcgggggcctgtcacaggacatttcagaggccgacctccagaatcaattctctcgattcggagaagtgtccgatgtcgaaataatcacgaggaaagacgaccagggcaatccccagaaggtgtttgcttacattaacatcagcgtggccgaggccgacctaaagaagtgtatgagcgtgctaaacaagaccaaatggaaaggcggtacccttcagatacagctggccaaggaaagttttttacatcgactcgcacaagagcgggaggcagccaaggccaagaaggaggaaagtacaaccggcaatgcaaatctgcttgaaaaaactggcggggtggatttccacatgaaagccgtacccggtacagaggttccgggccataaaaattgggtagtgtccaaatttggtcgcgtgctgccagtgctccacttgaaaaaccagcataagcgaaagataataaagtacgatcctagcaaatactgtcacaacctcaaaaagataggcgaagacttttccaatactattccaatcagcagcctgacttgggaactggagggagggaatgatcccatgagcaagaagcgccggggcgagttctcagatttccatggtccgccaaagaagataatcaaggtgcagaaagacgagtcctctacgggctccctggccatgtccacccgcccacgacgcgtgatcgaacgaccgccgctcactcagcagcaggctgcacagaagcggacctgtgattccattacacccagtaagtcatcacctgttcctgtctcggatacacagaagcttaagaatctgccatttaagacatctggattagaaactgcgaaaaaacgcaattcgattagtgatgatgacaccgattctgaggacgaactacgaatgatgatcgctaaggaggaaaacctgcaacgcaccacgcaaccaagcattaatgagtccgagtccgaccccttcgaagtcgtccgcgacgatttcaaaagcggcgtgcataagctccatagcctaatcggcctcggcatcaagaaccgtgtgagctgtcacgactctgacgatgacataatgcgcaacgacagagaatatgacagtggagatacagacgaaattattgccatgaaaaagaacgtcgctaaggtgaaaaatagcaccgaattttcccagatggagaaaagcacgaaaaagacttcctttaaaaacagagaaaactgcgaactttccgatcactgcatcaaactccagaagcgtaagtctaatgtagagtccgctctttcacacgggctgaaatcactgaataggaaaagtccgagccattcctcatcttctgaggacgccgacagcgcgtccgagctggctgactcagaaggaggcgaggagtataatgctatgatgaagaactgcctgagggtgaatctgaccttggctgatctggaacaattggccggatcagacctgaaggttccaaatgaggataccaagagtgacggcccagagaccaccacccaatgcaagtttgatagaggctcaaaatcccccaaaactcccacggggctgcgacggggaagacagtgcatcagaccagccgagattgtcgcttcattattagagggtgaggaaaacacttgcggtaagcagaaacctaaagaaaacaatttgaaacccaaattccaagcattcaagggagttggttgtttatatgagaaagagtcaatgaaaaagagtttaaaggattccgtagcatctaataacaaagaccagaactccatgaagcatgaagatccatctataatcagcatggaggatggctcgccttacgtgaacggctcgctgggagaggtgacaccctgccagcacgccaaaaaggccaatggccccaactatatccagcctcagaagcgacagaccacttttgagtcccaggaccgtaaggccgttagcccttctagcagtgagaaacggtctaaaaaccctatctctaggcctctagagggaaagaagtccttatccctgagcgctaagacacacaacattggctttgataaagattcctgccactccacgactaagacagaagcttcacaagaagagcgttctgacagctcaggcttgaccagtctgaagaaatcaccaaaggtgtccagcaaggacactagagaaataaaaactgatttctccctgtcaatctccaattcatccgacgtttctgctaaggacaagcatgcggaggataacgaaaagaggctcgcagccctagaagctcgtcagaaagctaaagaggtgcagaaaaagctcgtgcataatgccttggcaaacctcgatggacatcctgaggacaagccaacacacatcatctttgggtccgatagtgagtgcgaaactgaagaaacaagcacacaagaacagtcacatccaggggaagagtgggtcaaggaaagcatgggcaagacctccggcaaactgttcgactcgtcagatgatgatgaaagcgacagcgaagacgattccaatcgctttaaaatcaagccacagttcgagggacgggctggccagaaactgatggacctccaaagccacttcgggaccgacgaccgattccggatggatagccgcttcctcgaaacagacagcgaggaagaacaggaggaagtcaacgagaaaaagacagctgaagaagaagagctggctgaagaaaagaagaaggctttaaacgtagtgcaatctgtgcttcagattaacctctctaactccacaaatcgaggttccgtggctgcaaaaaaatttaaggatatcattcattacgatcccaccaagcaggatcatgctacctacgaacggaaacgggatgataagcctaaggagagcaaagcgaaacgtaagaagaaacgcgaggaggctgaaaagcttccggaagtgtcaaaggagatgtattacaacattgccatggacctgaaagagatttttcagaccacgaaatacacaagcgagaaggaagagggcaccccctggaacgaagactgtgggaaggagaaacccgaggagatccaggaccctgccgccctgacatcagatgccgaacaaccaagcgggtttaccttcagttttttcgactccgataccaaagatataaaagaagaaacatatcgcgtggagactgtgaagccgggcaagattgtttggcaggaagatcccagattacaagatagctcatccgaagaggaagatgtcaccgaggaaacagaccatcgcaatagctctccaggagaggcatctttgttagaaaaagagacaaccagattctttttcttctctaaaaatgacgaacgtctgcagggatctgacttgttctggcgcggtgttggctcgaacatgtccagaaacagctgggaagctagaacgacaaacctcagaatggactgtagaaaaaagcataaagacgcaaaaaggaagatgaaaccaaagtag

SEQ ID NO: 195863 - DNA, 3504 bp, Artificial Sequence
  derived and/or modified sequence
atgaaagtgaaccgagaaacaaaacgcctgtatgtgggcggtctttcccaggatatttctgaggccgatctccagaatcaatttagcaggtttggcgaagtgagcgacgtagagatcattactcggaaggacgaccagggaaatcctcaaaaagtctttgcctatattaacatctcagtcgcggaagcagacttgaagaagtgcatgagcgtgctgaataagaccaagtggaaaggcggaactctgcagattcagttagccaaagagagctttctgcaccgactggctcaggaaagggaggccgcaaaagccaagaaagaggagagtacaacaggcaacgctaatctcctagaaaagaccggtggagtagatttccacatgaaagctgtgccgggcacagaggtcccgggccacaaaaactgggtcgttagcaaatttggccgcgttctgcctgtgcttcatctcaagaaccagcacaagagaaagattattaaatatgaccccagcaagtactgccacaatctgaagaagatcggggaggacttttccaacactatccccatcagtagtctgacatgggagcttgaagggggcaacgaccccatgagcaagaaacgacgcggagagttctctgactttcacggtccacctaaaaaaattataaaagtgcaaaaggatgagtcttcaacgggtagcttggctatgagtacgcggccaaggcgtgtgatagaacggccgcctctgacacagcaacaagctgcccagaagcgtacttgtgactcaattaccccttctaagtcctctcccgtccctgtcagcgacacacagaaactcaagaatttaccttttaagaccagcggcctcgaaaccgcgaagaagcgcaacagcatttccgacgatgacaccgattcagaagacgagctgcggatgatgatagccaaagaagaaaatctgcaacgcaccacccaaccatcgattaatgaatccgaatctgatccttttgaggtggtacgtgatgattttaaatctggggtccacaaactgcactccctgattgggctaggcatcaaaaatcgagtcagctgccacgatagtgacgacgatatcatgcggaatgacagggaatacgacagcggcgataccgacgagatcattgcaatgaaaaaaaatgtcgcgaaggtgaagaactccactgagttcagccagatggagaagtctactaaaaagacgagctttaaaaatcgtgagaattgtgagttgtcagatcattgtatcaagttgcagaaacgaaagtccaatgtggagtctgcccttagccatggccttaaatccctgaatagaaagagtcccagccatagctcttcctcagaggatgccgatagcgcctccgaactcgccgactccgagggtggagaggagtataatgccatgatgaagaactgtcttagagtcaatctaaccttagccgacctggagcaactggcaggctctgatctgaaagtacctaacgaagatacgaagtcagacggccccgaaaccacgacacagtgcaagttcgataggggtagtaaaagtcctaaaaccccaacgggtctgcggcgaggccggcaatgtattcgacctgcggagatcgttgcgtctctactggaaggagaagagaacacatgtggcaagcaaaaacccaaagaaaacaatttaaagccaaagttccaagccttcaagggcgtaggttgtctttacgagaaagagtctatgaaaaaatccctgaaagatagcgtcgcctctaacaataaagaccagaattctatgaaacacgaggacccatccattatcagtatggaggacggcagcccatacgtgaatggtagcttgggagaagtcactccctgccagcacgccaagaaggcaaacggtccaaattatattcagccacagaagcggcagaccaccttcgagtctcaagacagaaaagccgtgtcaccctcttcaagtgagaaaagaagcaaaaatccgatctcccggcctttggaagggaagaagtctctgagtctcagcgcaaaaacccataatattgggtttgacaaggatagctgccattcgacaactaagacggaagcttctcaagaggagcgctcggacagctctggtctgacttcgctcaaaaagtctccaaaagtgtcatctaaggatactagagagataaaaaccgatttttcactctcgatttcaaatagcagcgatgtgtccgctaaagataaacacgctgaagataatgagaaacggcttgccgcccttgaggctcggcagaaagccaaggaagtgcaaaagaagcttgtgcacaacgctctggcaaacctggatggccatcccgaggataaaccaactcatatcattttcgggtcggactccgaatgcgaaaccgaggaaacatcgacgcaggagcagagtcaccctggcgaagagtgggtgaaggaatcaatgggcaagacatccgggaaattatttgatagctctgacgacgacgagtcggactcagaagatgatagcaataggttcaagataaagcctcagttcgaaggcagagctgggcagaaactcatggatttgcagtcccattttgggaccgatgaccggttcaggatggattctcgctttctggagaccgacagcgaggaagagcaggaagaggtgaacgagaaaaaaaccgcggaagaagaggagctcgcggaagaaaaaaagaaggctctgaacgttgtacagtcagtcctccaaattaacttgtcaaactccactaaccgcgggagcgtggctgcaaaaaaattcaaggatattatccactacgatccaaccaagcaagaccacgccacatatgaaagaaaaagagatgataagccaaaggagagtaaggccaagaggaaaaagaagcgggaggaggctgagaagctccctgaggtcagcaaggaaatgtattacaacatagccatggatctgaaggaaatttttcaaacaacgaagtacacatccgaaaaagaggagggaactccgtggaacgaggactgtgggaaggagaagcccgaggagatccaggatccggccgctctgacatctgacgctgagcagcctagtgggttcacattttccttcttcgattccgacaccaaagacattaaggaagaaacctatcgtgtggaaacagtgaagcctggcaaaatcgtttggcaggaagatccacgcttacaggattcatcttctgaagaggaggacgtaacggaagaaaccgaccaccgcaactcctctcccggcgaagcaagcctgttagagaaggagaccaccagattcttctttttctccaaaaatgatgaacgactccaaggatcagaccttttctggcgcggagtcggaagcaatatgagtagaaattcctgggaagcccgcaccacgaatttaagaatggactgccggaaaaaacataaagacgcaaaacgcaagatgaagccaaaatag

SEQ ID NO: 195864 - DNA, 3300 bp, Artificial Sequence
  derived and/or modified sequence
atgtctgtgctgaacaagaccaagtggaagggcggcaccctgcagatccagctggccaaggagagcttcctgcaccggctggcccaggagcgggaggccgccaaggccaagaaggaggagagcaccactggaaatgccaacctgctggagaagacaggaggagtggacttccacatgaaggctgtgcctggaacagaggtgcccggccacaagaactgggtggtgtccaagtttggccgggtgctgcctgtgctgcacctgaagaaccagcacaagaggaagatcatcaagtatgaccccagcaagtactgccacaacctgaagaagatcggggaggacttcagcaacaccatccccatcagcagcctgacctgggagctggagggcggcaatgaccccatgagcaagaagagaagaggagagttcagtgacttccacggcccccccaagaagatcatcaaggtgcagaaggatgagagcagcacaggcagcctggccatgagcacccggccccggcgggtgattgagcggccccccctgacccagcagcaggccgcccagaagaggacctgtgacagcatcacccccagcaagagcagccctgtgcctgtgtctgacacccagaagctgaagaacctgcccttcaagaccagcggcctggagacagccaagaagaggaacagcatcagtgatgatgacacagacagtgaagatgagctgaggatgatgattgccaaggaggagaacctgcagaggaccacccagcccagcatcaatgaaagtgaaagtgacccctttgaggtggtgagagatgacttcaagtctggagtgcacaagctgcacagcctcatcggcctgggcatcaagaacagagtgtcctgccacgacagtgatgatgacatcatgagaaatgaccgggagtatgacagcggggacacagatgagatcatcgccatgaagaagaatgtggccaaggtgaagaacagcacagagttcagccagatggagaagagcaccaagaagaccagcttcaagaaccgggagaactgtgagctgagtgaccactgcatcaagctgcagaagaggaagagcaatgtggagagcgccctgagccacggcctgaagagcctgaacaggaagagccccagccacagcagcagcagtgaagatgctgacagcgccagcgagctggccgacagcgagggcggggaggagtacaatgccatgatgaagaactgcctgcgggtgaacctgaccctggccgacctggagcagctggccggcagtgacctgaaggtgcccaatgaagacaccaagagtgatggccctgagaccaccacccagtgcaagtttgaccggggcagcaagagccccaagacccccaccggcctgcggcggggccggcagtgcatccggcctgctgagatcgtggccagcctgctggagggggaggagaacacctgtgggaagcagaagcccaaggagaacaacctgaagcccaagttccaggccttcaagggcgtgggctgcctgtatgagaaggagagcatgaagaagagcctgaaggacagcgtggccagcaacaacaaggaccagaacagcatgaagcatgaggaccccagcatcatctccatggaggatggcagcccctacgtgaatggcagcctgggggaggtgaccccctgccagcacgccaagaaggccaacggccccaactacatccagccccagaagaggcagaccacctttgagagccaggacaggaaggctgtgagccccagcagcagcgagaagaggagcaagaaccccatcagccggcccctggagggcaagaagagcctgagcctgagcgccaagacccacaacattggatttgacaaggacagctgccacagcaccaccaagacagaggccagccaggaggagaggagtgacagcagcggcctgaccagcctgaagaagagccccaaggtgagcagcaaggacacccgggagatcaagacagacttcagcctgagcatcagcaacagcagtgatgtgtctgccaaggacaagcatgctgaggacaatgagaagaggctggccgccctggaggcccggcagaaggccaaggaggtgcagaagaagctggtgcacaatgccctggccaacctggatggccaccctgaggacaagcccacccacatcatctttggaagtgacagtgaatgtgaaacagaggagaccagcacccaggagcagagccaccctggagaggagtgggtgaaggagagcatgggcaagaccagcggcaagctgtttgacagcagtgatgatgatgaaagtgacagtgaagatgacagcaaccgcttcaagatcaagccccagtttgagggccgggccggccagaagctgatggacctgcagagccactttggaacagatgaccgcttcaggatggacagccgcttcctggagacagacagcgaggaggagcaggaggaggtgaatgagaagaagacagctgaggaggaggagctggccgaggagaagaagaaggccctgaatgtggtgcagagcgtgctgcagatcaacctgagcaacagcaccaacagaggctctgtggccgccaagaagttcaaggacatcatccactatgaccccaccaagcaggaccacgccacctatgaaaggaagagagatgacaagcccaaggagagcaaggccaagaggaagaagaagcgggaggaggccgagaagctgcctgaggtgtccaaggagatgtactacaacatcgccatggacctgaaggagatcttccagaccaccaagtacaccagcgagaaggaggagggcaccccctggaatgaagactgtgggaaggagaagccagaggagatccaggaccctgctgccctgaccagtgatgctgagcagcccagcggcttcaccttctccttctttgacagcgacaccaaggacatcaaggaggagacctacagagtggagaccgtgaagccaggcaagatcgtgtggcaggaggacccccggctgcaggacagcagcagcgaggaggaggatgtgacagaggagacagaccacaggaacagcagccctggagaggccagcctgctggagaaggagaccacccgcttcttcttcttcagcaagaatgatgagcggctgcagggcagtgacctcttctggaggggcgtgggcagcaacatgagcagaaattcctgggaggcccggaccaccaacctgaggatggactgcaggaagaagcacaaggatgccaagaggaagatgaagcccaagtag

SEQ ID NO: 195865 - DNA, 2913 bp, Artificial Sequence
  derived and/or modified sequence
atgaaggtgaaccgggagaccaagaggctgtatgtgggcggcctgagccaggacatcagcgaggccgacctgcagaaccagttcagcagatttggagaggtgtctgatgtggagatcatcaccaggaaggatgaccagggcaacccccagaaggtgtttgcctacatcaacatctctgtggccgaggccgacctgaagaagtgcatgtctgtgctgaacaagaccaagtggaagggcggcaccctgcagatccagctggccaaggagagcttcctgcaccggctggcccaggagcgggaggccgccaaggccaagaaggaggagagcaccactggaaatgccaacctgctggagaagacaggaggagtggacttccacatgaaggctgtgcctggaacagaggtgcccggccacaagaactgggtggtgtccaagtttggccgggtgctgcctgtgctgcacctgaagaaccagcacaagaggaagatcatcaagtatgaccccagcaagtactgccacaacctgaagaagatcggggaggacttcagcaacaccatccccatcagcagcctgacctgggagctggagggcggcaatgaccccatgagcaagaagagaagaggagagttcagtgacttccacggcccccccaagaagatcatcaaggtgcagaaggatgagagcagcacaggcagcctggccatgagcacccggccccggcgggtgattgagcggccccccctgacccagcagcaggccgcccagaagaggacctgtgacagcatcacccccagcaagagcagccctgtgcctgtgtctgacacccagaagctgaagaacctgcccttcaagaccagcggcctggagacagccaagaagaggaacagcatcagtgatgatgacacagacagtgaagatgagctgaggatgatgattgccaaggaggagaacctgcagaggaccacccagcccagcatcaatgaaagtgaaagtgacccctttgaggtggtgagagatgacttcaagtctggagtgcacaagctgcacagcctcatcggcctgggcatcaagaacagagtgtcctgccacgacagtgatgatgacatcatgagaaatgaccgggagtatgacagcggggacacagatgagatcatcgccatgaagaagaatgtggccaaggtgaagaacagcacagagttcagccagatggagaagagcaccaagaagaccagcttcaagaaccgggagaactgtgagctgagtgaccactgcatcaagctgcagaagaggaagagcaatgtggagagcgccctgagccacggcctgaagagcctgaacaggaagagccccagccacagcagcagcagtgaagatgctgacagcgccagcgagctggccgacagcgagggcggggaggagtacaatgccatgatgaagaactgcctgcgggtgaacctgaccctggccgacctggagcagctggccggcagtgacctgaaggtgcccaatgaagacaccaagagtgatggccctgagaccaccacccagtgcaagtttgaccggggcagcaagagccccaagacccccaccggcctgcggcggggccggcagtgcatccggcctgctgagatcgtggccagcctgctggagggggaggagaacacctgtgggaagcagaagcccaaggagaacaacctgaagcccaagttccaggccttcaagggcgtgggctgcctgtatgagaaggagagcatgaagaagagcctgaaggacagcgtggccagcaacaacaaggaccagaacagcatgaagcatgaggaccccagcatcatctccatggaggatggcagcccctacgtgaatggcagcctgggggaggtgaccccctgccagcacgccaagaaggccaacggccccaactacatccagccccagaagaggcagaccacctttgagagccaggacaggaaggctgtgagccccagcagcagcgagaagaggagcaagaaccccatcagccggcccctggagggcaagaagagcctgagcctgagcgccaagacccacaacattggatttgacaaggacagctgccacagcaccaccaagacagaggccagccaggaggagaggagtgacagcagcggcctgaccagcctgaagaagagccccaaggtgagcagcaaggacacccgggagatcaagacagacttcagcctgagcatcagcaacagcagtgatgtgtctgccaaggacaagcatgctgaggacaatgagaagaggctggccgccctggaggcccggcagaaggccaaggaggtgcagaagaagctggtgcacaatgccctggccaacctggatggccaccctgaggacaagcccacccacatcatctttggaagtgacagtgaatgtgaaacagaggagaccagcacccaggagcagagccaccctggagaggagtgggtgaaggagagcatgggcaagaccagcggcaagctgtttgacagcagtgatgatgatgaaagtgacagtgaagatgacagcaaccgcttcaagatcaagccccagtttgagggccgggccggccagaagctgatggacctgcagagccactttggaacagatgaccgcttcaggatggacagccgcttcctggagacagacagcgaggaggagcaggaggaggtgaatgagaagaagacagctgaggaggaggagctggccgaggagaagaagaaggccctgaatgtggtgcagagcgtgctgcagatcaacctgagcaacagcaccaacagaggctctgtggccgccaagaagttcaaggacatcatccactatgaccccaccaagcaggaccacgccacctatgaaaggaagagagatgacaagcccaaggagagcaaggcctag

SEQ ID NO: 195866 - DNA, 3504 bp, Artificial Sequence
  derived and/or modified sequence
atgaaggtgaaccgggagaccaagaggctgtatgtgggcggcctgagccaggacatcagcgaggccgacctgcagaaccagttcagcagatttggagaggtgtctgatgtggagatcatcaccaggaaggatgaccagggcaacccccagaaggtgtttgcctacatcaacatctctgtggccgaggccgacctgaagaagtgcatgtctgtgctgaacaagaccaagtggaagggcggcaccctgcagatccagctggccaaggagagcttcctgcaccggctggcccaggagcgggaggccgccaaggccaagaaggaggagagcaccactggaaatgccaacctgctggagaagacaggaggagtggacttccacatgaaggctgtgcctggaacagaggtgcccggccacaagaactgggtggtgtccaagtttggccgggtgctgcctgtgctgcacctgaagaaccagcacaagaggaagatcatcaagtatgaccccagcaagtactgccacaacctgaagaagatcggggaggacttcagcaacaccatccccatcagcagcctgacctgggagctggagggcggcaatgaccccatgagcaagaagagaagaggagagttcagtgacttccacggcccccccaagaagatcatcaaggtgcagaaggatgagagcagcacaggcagcctggccatgagcacccggccccggcgggtgattgagcggccccccctgacccagcagcaggccgcccagaagaggacctgtgacagcatcacccccagcaagagcagccctgtgcctgtgtctgacacccagaagctgaagaacctgcccttcaagaccagcggcctggagacagccaagaagaggaacagcatcagtgatgatgacacagacagtgaagatgagctgaggatgatgattgccaaggaggagaacctgcagaggaccacccagcccagcatcaatgaaagtgaaagtgacccctttgaggtggtgagagatgacttcaagtctggagtgcacaagctgcacagcctcatcggcctgggcatcaagaacagagtgtcctgccacgacagtgatgatgacatcatgagaaatgaccgggagtatgacagcggggacacagatgagatcatcgccatgaagaagaatgtggccaaggtgaagaacagcacagagttcagccagatggagaagagcaccaagaagaccagcttcaagaaccgggagaactgtgagctgagtgaccactgcatcaagctgcagaagaggaagagcaatgtggagagcgccctgagccacggcctgaagagcctgaacaggaagagccccagccacagcagcagcagtgaagatgctgacagcgccagcgagctggccgacagcgagggcggggaggagtacaatgccatgatgaagaactgcctgcgggtgaacctgaccctggccgacctggagcagctggccggcagtgacctgaaggtgcccaatgaagacaccaagagtgatggccctgagaccaccacccagtgcaagtttgaccggggcagcaagagccccaagacccccaccggcctgcggcggggccggcagtgcatccggcctgctgagatcgtggccagcctgctggagggggaggagaacacctgtgggaagcagaagcccaaggagaacaacctgaagcccaagttccaggccttcaagggcgtgggctgcctgtatgagaaggagagcatgaagaagagcctgaaggacagcgtggccagcaacaacaaggaccagaacagcatgaagcatgaggaccccagcatcatctccatggaggatggcagcccctacgtgaatggcagcctgggggaggtgaccccctgccagcacgccaagaaggccaacggccccaactacatccagccccagaagaggcagaccacctttgagagccaggacaggaaggctgtgagccccagcagcagcgagaagaggagcaagaaccccatcagccggcccctggagggcaagaagagcctgagcctgagcgccaagacccacaacattggatttgacaaggacagctgccacagcaccaccaagacagaggccagccaggaggagaggagtgacagcagcggcctgaccagcctgaagaagagccccaaggtgagcagcaaggacacccgggagatcaagacagacttcagcctgagcatcagcaacagcagtgatgtgtctgccaaggacaagcatgctgaggacaatgagaagaggctggccgccctggaggcccggcagaaggccaaggaggtgcagaagaagctggtgcacaatgccctggccaacctggatggccaccctgaggacaagcccacccacatcatctttggaagtgacagtgaatgtgaaacagaggagaccagcacccaggagcagagccaccctggagaggagtgggtgaaggagagcatgggcaagaccagcggcaagctgtttgacagcagtgatgatgatgaaagtgacagtgaagatgacagcaaccgcttcaagatcaagccccagtttgagggccgggccggccagaagctgatggacctgcagagccactttggaacagatgaccgcttcaggatggacagccgcttcctggagacagacagcgaggaggagcaggaggaggtgaatgagaagaagacagctgaggaggaggagctggccgaggagaagaagaaggccctgaatgtggtgcagagcgtgctgcagatcaacctgagcaacagcaccaacagaggctctgtggccgccaagaagttcaaggacatcatccactatgaccccaccaagcaggaccacgccacctatgaaaggaagagagatgacaagcccaaggagagcaaggccaagaggaagaagaagcgggaggaggccgagaagctgcctgaggtgtccaaggagatgtactacaacatcgccatggacctgaaggagatcttccagaccaccaagtacaccagcgagaaggaggagggcaccccctggaatgaagactgtgggaaggagaagccagaggagatccaggaccctgctgccctgaccagtgatgctgagcagcccagcggcttcaccttctccttctttgacagcgacaccaaggacatcaaggaggagacctacagagtggagaccgtgaagccaggcaagatcgtgtggcaggaggacccccggctgcaggacagcagcagcgaggaggaggatgtgacagaggagacagaccacaggaacagcagccctggagaggccagcctgctggagaaggagaccacccgcttcttcttcttcagcaagaatgatgagcggctgcagggcagtgacctcttctggaggggcgtgggcagcaacatgagcagaaattcctgggaggcccggaccaccaacctgaggatggactgcaggaagaagcacaaggatgccaagaggaagatgaagcccaagtag

SEQ ID NO: 195867 - DNA, 3300 bp, Artificial Sequence
  derived and/or modified sequence
atgagcgtgctgaacaagaccaagtggaagggcggcaccctgcagatccagctggcaaaagagagctttttgcaccgccttgcacaagaacgagaagccgcaaaagccaagaaagaggagagcacaactgggaacgccaacctcttggagaaaacaggtggcgtcgattttcacatgaaagccgtacccgggacggaagtgcctggacataaaaactgggtcgtcagcaagtttggccgagtcctacccgtactacaccttaagaaccaacacaagcgcaaaataatcaaatacgacccttcaaagtattgtcataatctgaaaaaaatcggggaagactttagtaatacaatccccatctcatccctaacctgggaacttgagggaggcaacgatcccatgtccaaaaaacgccgcggagagttctccgacttccatggtccgccaaaaaagatcatcaaggtgcaaaaagacgagtcgtcaaccggctcattagcaatgagtactagaccaagaagggtcatcgagcgcccccctctgacgcaacagcaggcagcccagaagagaacttgcgattcaataaccccatctaaaagtagtcccgtgcctgtgtcagacactcagaagctaaagaacttgcctttcaagacatcgggccttgagactgctaagaagaggaattcaatcagcgacgacgataccgatagtgaagacgagctgcgaatgatgatcgcaaaagaggaaaatttgcagcgaactacccagccctctatcaatgaaagtgaaagtgacccgtttgaggtggtgcgggacgacttcaagtcaggggtccataagctccactctttaattgggcttgggatcaagaacagagtgtcctgccacgattcggacgacgacatcatgaggaatgatcgagagtacgactcgggagatacagatgagatcatcgctatgaaaaagaacgtagccaaggtcaaaaacagcaccgagttctcccaaatggagaagagtactaagaaaacctctttcaagaacagagagaattgtgagctgtcagaccactgcatcaagctccagaagagaaaatccaacgttgaatcagcgctctcccacggccttaagtctctgaaccgcaaatcaccgtctcactcctcttcgagtgaggacgccgatagtgccagcgaactggctgattcagaggggggcgaggagtacaatgctatgatgaaaaactgtctgagagtcaacctgactctggctgatctagaacagttagccggctccgacctgaaagtcccgaacgaggatacaaaatcagacggtcccgaaacgactacccaatgtaaatttgatcgcgggagtaagagccccaagacccctaccggattgcggcgagggcgacagtgcattcgccccgccgagatagtagcttccttattagagggggaggagaacacatgcggaaaacaaaaaccaaaggagaacaatctgaagcctaagttccaggccttcaaaggcgtggggtgtctttacgaaaaggaaagcatgaaaaaatccttaaaggactcagtggcgtcaaataataaggaccagaactccatgaaacacgaagaccctagtattatctctatggaagacggtagcccttacgtgaacggttctctcggggaagtcactccctgtcagcacgctaaaaaagctaacggccccaattatatccagccccagaagcgccagacaactttcgaaagtcaagaccgtaaagctgtgtctccaagcagtagcgaaaagcgctctaagaatcctatcagtaggccattagaagggaagaagtcactctcactgtccgccaagactcataatatcgggtttgacaaggactcctgtcacagcacgacaaagaccgaagcttcccaggaggagcgctcggattcgagtggactcacatccctgaagaaatctccaaaggtttcctccaaggatacccgagagataaagactgatttctccctctctatctcgaacagttccgacgtgtcggctaaagataagcacgccgaagacaatgaaaagcgactggctgccctggaagccagacaaaaggctaaggaagtgcagaagaaactggtgcacaacgccctggcgaatctggatggccatcccgaagacaaacctacccatattattttcgggtctgattccgaatgcgagaccgaagaaaccagtacccaggagcagagccaccctggcgaggagtgggtgaaagagtcaatgggtaaaacgtctggtaagctctttgacagctcagacgatgacgaatccgattccgaagatgattctaatagattcaaaattaaacctcagttcgaggggagggccggtcaaaaactgatggacctccagagtcatttcggaacagatgacaggtttaggatggacagccgattcctcgagacagacagtgaagaagaacaggaggaagtgaatgaaaagaagaccgccgaggaagaggaacttgcggaggaaaaaaagaaagcactcaacgtggtgcagtccgtgctccaaatcaacctgagtaactcgaccaatcgcgggtcagtagcggctaaaaaattcaaggacatcatccactacgacccgaccaagcaggaccacgctacctatgaacgcaaaagagatgataaacccaaagaaagcaaagctaagagaaagaagaagcgggaggaggctgagaaactcccagaggtcagcaaggagatgtactataatattgctatggacttgaaggagatttttcagacaacaaaatatacgagcgaaaaggaggaagggaccccctggaacgaggattgcggcaaggaaaagccggaagagatacaggatcccgccgcactgacaagtgacgcagagcaacctagtggcttcaccttcagctttttcgactcagacaccaaagacattaaggaggagacatatcgggtcgagactgtcaaacccggcaagattgtgtggcaggaggacccacgtttgcaggacagctctagcgaggaggaggacgttacggaggagactgaccacaggaatagctctccaggggaggcttccttgcttgaaaaggaaaccactcggttcttcttcttttccaaaaacgatgaacggctgcagggcagtgacctcttctggcggggcgttggttccaacatgagccgaaattcttgggaggcccgcacgaccaatttgcgcatggattgtagaaagaagcacaaagacgctaaaagaaagatgaagcccaaatag

SEQ ID NO: 195868 - DNA, 2913 bp, Artificial Sequence
  derived and/or modified sequence
atgaaggtgaaccgggagaccaagcggctgtacgtgggcggcctgtctcaggatatctctgaggccgacctacagaatcagtttagtagattcggggaagtgtctgacgtcgaaattattacacggaaggacgatcaaggaaatccccagaaagtattcgcttatattaacatctcagtggcagaggcggatttgaaaaaatgcatgagtgtgttgaataagacgaagtggaaggggggaacactgcagattcagctcgctaaggaatcctttctgcaccgcctagcacaggagagagaagctgcgaaggccaaaaaggaagagtcaacaaccggaaacgccaatttactggaaaagaccgggggagttgacttccacatgaaggcggtacctgggaccgaagtccccggccacaagaactgggtcgtgagtaaattcggccgggtgctccctgtgctccacctcaagaaccagcacaaacggaaaatcattaagtacgacccctccaaatactgccataacttgaagaaaattggcgaagattttagcaacactatcccaattagcagcctaacatgggaactcgaaggaggcaatgaccccatgtctaaaaaaaggagaggtgagttttcagattttcacgggccaccaaagaaaattatcaaggttcagaaagatgagtcctctacaggctccctcgccatgtctactaggccaaggagagttatcgagcgtccaccactgacgcaacaacaagccgcccagaagcgaacctgcgacagcatcaccccgtcaaagtcttcaccggtgccagtgtcggacacccagaagctaaaaaatttgcctttcaaaacatcagggcttgagacagctaagaaacgcaactccatctctgatgatgatactgactctgaagacgagttgcggatgatgatcgcgaaagaagaaaacctacaacggactacccagccctccatcaatgaatctgaatccgatccatttgaggttgtgcgcgatgacttcaagagcggagttcataaactccattccctgatcggcttaggaatcaaaaacagggtctcttgccatgactctgatgacgatataatgcggaatgatcgcgaatacgattctggtgacactgatgagataatcgctatgaagaagaacgtggcaaaggtaaagaacagcacggagtttagccagatggaaaaatcgaccaaaaagaccagcttcaaaaatagggaaaactgcgaattgtccgaccattgcattaagcttcaaaagcgcaagtctaacgtggagagtgccttgtctcatggactaaaatcactcaaccgcaaatctccatcccattcttctagttccgaagatgccgacagtgcctcagaattggccgacagtgaaggtggcgaagagtacaacgccatgatgaaaaactgcctcagagtcaatctcacactggccgatttagagcagttggcaggctcagacctgaaggtcccgaatgaagacacaaagtctgacggacctgaaacgacaacacaatgtaaatttgatagggggagcaagtctcccaagacccccaccggactacgccgcggacgccaatgcattcgccccgcggaaatcgtcgcctcattactggaaggcgaagaaaatacttgtggcaaacagaagcccaaggaaaataatttgaaacccaagtttcaggcttttaagggcgtaggatgcttgtacgaaaaggagtctatgaagaaatcactaaaagatagcgtggccagcaacaacaaagaccaaaactccatgaagcatgaggaccccagcattatctcgatggaggacggttctccatatgtgaatggtagcctgggcgaggtgaccccttgccagcacgcgaagaaagcgaatgggcctaactatatccagccccagaaaagacagactacctttgagagccaggatagaaaggcagtgtcccccagctcctccgagaagagaagtaaaaatcctatctctcggccgctagaaggcaaaaaaagcctctcattgtccgccaagacacataatatcgggtttgacaaggatagctgccactcgacgaccaaaacagaggcttcccaggaggagcggtccgactcatctggcctcactagccttaagaaatccccgaaggtgtctagtaaagacacccgtgaaatcaaaaccgatttcagtttatctatcagtaattcaagcgacgtgtctgccaaggataagcatgctgaggacaatgagaagcggctggctgctttggaagcacgtcagaaggccaaggaagtccagaagaagcttgttcataatgcactggcaaatttggatggacacccagaagataaaccgactcacatcatcttcggaagtgattcagaatgtgaaactgaagagacatccacccaggagcagtcacatccgggcgaagaatgggtgaaagaatccatgggaaagacctccggcaagttgttcgactcttcagacgatgacgagtctgattcggaggacgactcaaaccggtttaagatcaagccccagttcgaaggccgggctggccagaaactgatggatttacagtctcatttcgggaccgacgatagattccgaatggattcccgatttctagagactgactctgaggaggaacaagaggaggtcaacgagaagaaaactgctgaagaggaagagttagctgaagagaagaagaaggctttgaatgtggtccagagtgtgctgcagatcaacctaagtaatagcaccaacaggggcagcgtggctgcaaagaaattcaaagatataatccactacgaccccaccaagcaggatcacgccacttacgagcggaagagggacgacaagcccaaggagagtaaggcctag

SEQ ID NO: 195869 - DNA, 3504 bp, Artificial Sequence
  derived and/or modified sequence
atgaaggtgaaccgggagaccaagcggctgtacgtgggcggcctgtctcaggacatctcagaagccgaccttcagaatcaatttagccgctttggcgaagtttccgatgtagaaatcatcaccagaaaggatgaccagggaaacccccagaaggtcttcgcgtatatcaatatcagtgtcgccgaagcagatctgaaaaaatgcatgtccgtgttaaacaaaactaagtggaaggggggtaccttgcagatccagctggccaaagagagcttcctgcaccgcctggcccaggagcgtgaagcagcaaaagccaagaaagaggaaagtacaactggcaacgcaaatctactagagaagactggcggggtggacttccacatgaaagcagttcccggcacggaggttcctgggcataaaaattgggtggtatctaagtttggccgagtgttgcctgtgttgcacctcaagaaccagcataaacgaaaaattatcaagtacgacccgtcaaagtactgtcataacctgaaaaagatcggggaggacttttcgaacacaataccaatctcatctctgacatgggaactggaaggcggaaatgacccgatgagtaagaagagacgtggggagttctctgattttcacggccctccaaagaagattattaaggtgcagaaggacgaatcctcaacagggtctctagccatgtctacacggcctcggagggttatcgagaggcccccactgacccaacagcaagctgctcagaagagaacttgcgacagcatcaccccctccaagtcttcaccggttcccgtctctgatacacagaagctgaaaaatctgccattcaaaacttctgggctggaaaccgccaaaaaaaggaatagtatctccgacgacgataccgactccgaagatgagctgagaatgatgatcgctaaggaggaaaacctccagcgtaccacccagccatccatcaacgaaagcgaatccgatcctttcgaagtggtacgcgatgatttcaagtctggtgtccataaactccactctctcataggactggggatcaaaaaccgcgtgagctgccacgattctgatgatgatatcatgcgcaacgacagggagtatgattctggcgacaccgatgaaatcattgccatgaaaaagaatgtagctaaagtgaagaacagcacagagttcagccaaatggaaaaatcaactaagaagacttccttcaagaatagggagaactgcgagttaagtgatcattgcatcaagctacagaagcgaaagtcaaatgtagaaagtgcgctcagccacggattaaagtctctaaaccggaaaagcccctcccatagctcaagctctgaagacgcagactcagcatccgagctggccgactcagaggggggcgaggaatataacgctatgatgaaaaattgcttgcgggtgaacctcacactggctgatttggagcagctggccgggtccgatctgaaagtgccaaacgaagatactaagagcgacggccctgagacaaccactcaatgtaagttcgaccgggggagcaaatctccaaagactccgaccgggctgaggcgcggacgacagtgtatccgtcctgctgaaattgtcgcctcgctcttagaaggtgaagaaaacacctgtggaaagcagaagcccaaggaaaataatctgaagcccaagtttcaggcatttaagggagtcggctgcctctacgagaaggagagcatgaagaaatctctgaaagacagtgtggcttcaaacaacaaagatcaaaatagcatgaaacatgaggacccgtctattatttctatggaggacgggtctccttatgtcaacggctccctaggtgaagttactccatgccaacatgccaagaaagccaacggccccaattacatccagcctcagaaaagacagaccactttcgaatctcaggaccggaaggctgtatccccttcctcgtccgagaaacggtctaagaatccgatttctaggccactcgaagggaagaagtcactgtccctctctgcaaagactcacaacatcgggttcgataaagatagctgccactccactactaagacagaggcttctcaggaggagcgcagtgactcttccggcttaacatccttgaagaagtcgccaaaagtgagtagcaaagacacccgagagattaagaccgatttctccctgtcaatctctaattccagtgatgtcagcgccaaggacaagcacgccgaggataacgaaaagaggttggctgctctcgaggcgcgccagaaagcaaaagaggtccaaaagaaactggtgcacaatgcgctggccaacctggatggtcaccccgaggacaaacctacgcacattatcttcgggtccgattctgagtgcgagacggaggagacaagtacacaggagcagtctcacccaggggaagagtgggtgaaagaaagtatgggtaaaactagtggcaaactgtttgatagcagtgacgatgatgaaagcgattctgaagacgattcaaataggttcaagattaaaccgcagtttgagggtagggctggccagaaactgatggacttgcagagtcatttcgggacagatgaccggtttcgcatggactcacggttccttgagaccgattccgaggaggaacaggaggaagtcaacgagaagaagaccgcggaggaggaggagctggcagaggagaagaaaaaggccctcaatgtggtgcaatctgtcctgcagatcaatctgtccaattccaccaaccggggatctgtggctgccaagaagtttaaagatatcatccattacgacccaaccaagcaggaccacgcaacctacgaacggaagcgcgacgacaaacccaaagagagcaaagcaaagagaaaaaaaaagagagaggaggcggaaaaactccccgaagtcagtaaagagatgtattacaacattgcaatggatcttaaggagatcttccaaaccaccaagtatacatcggagaaagaagaggggaccccctggaatgaggattgcggcaaagaaaaacccgaagagattcaggaccccgctgctttgacatccgacgcagagcagcccagtggatttaccttcagtttctttgatagcgacaccaaggacattaaggaagagacttaccgagttgaaacggtcaagccaggcaagattgtctggcaagaagatccgcgcctgcaggactcctctagtgaagaggaggacgttacagaagagacagaccatcggaattcaagtccaggagaggccagtctgctggagaaggagacaacaagattcttctttttctccaaaaatgacgagcggcttcaggggtctgacctcttttggcggggggtggggtcgaacatgtcaagaaattcctgggaagcaagaacaacaaacctgcgaatggactgtcggaaaaagcacaaagatgcgaagagaaagatgaagccgaagtag

SEQ ID NO: 195870 - DNA, 3504 bp, Artificial Sequence
  derived and/or modified sequence
atgaaggtgaaccgggagaccaagcggctgtacgtgggcggcctgtctcaggacatttctgaggccgacctccagaaccagttcagccgtttcggcgaggttagcgacgtagagatcatcacaagaaaagacgaccaagggaacccacagaaggtattcgcatatattaatatcagtgtggcagaagccgatctgaagaagtgtatgagcgtgcttaacaagaccaaatggaaggggggcaccctacagatccagctggcgaaggaaagcttcctccaccggctggcacaagagagagaagcggcaaaagctaagaaggaggagtccacaacaggcaatgctaacttattagagaagactggaggcgtggattttcacatgaaagccgtgccaggcaccgaagtaccaggccacaagaactgggtggtatcgaagttcgggagggtcctgcctgttctgcaccttaagaatcagcacaaaagaaaaataatcaagtatgatccatccaagtactgtcacaatctgaaaaagataggcgaggacttctccaataccatccctatcagcagcctaacatgggaactggaggggggaaatgaccctatgagcaagaaacggaggggagagttttcggatttccacggaccacccaaaaagatcattaaagttcagaaggacgagagttcaactggctctttagccatgagtacccgacccagacgggtcatcgagcgcccaccactaacccaacagcaggcagcccagaaacggacctgcgattctattaccccgtcaaagagctctccggtacctgtgtccgacactcagaagctgaaaaacttacccttcaagacaagcggactggagacggcaaagaaacgcaactcgatcagcgatgacgatactgattccgaagacgaactgcggatgatgatcgcaaaggaagaaaacttgcaaaggacgacccagccaagtatcaacgagtccgagtcagacccctttgaggtcgttagagatgatttcaagtctggggtgcataaactgcacagcctcatcggtcttggcatcaagaatagagtcagctgtcacgactcggatgacgatattatgaggaatgatcgagaatacgactcgggcgatacggatgaaatcattgccatgaaaaagaatgtggcaaaggttaagaacagcaccgagttcagccaaatggaaaaatcaacgaagaaaacatccttcaaaaatcgcgagaattgtgaattatccgaccactgcattaaactccagaagcgaaaatctaatgttgaatccgctttgagtcatggcctcaaaagtctgaatagaaagagcccctcgcatagttcctcatcagaggatgcagactccgcttcagaactggccgattccgaaggtggtgaggagtacaatgcaatgatgaagaattgtttaagagtaaatctgacactggctgacctggagcaacttgcggggtctgatctgaaagtccctaatgaggacactaaatccgatggtcccgagactaccactcaatgcaagttcgaccggggctctaaatcgcctaaaactcccaccggcttgagaaggggccgacagtgtatcagaccagctgagatcgttgcctccctgttagagggtgaggaaaacacgtgtggcaaacagaaaccgaaggagaataacctcaaacctaaatttcaggccttcaaaggagtgggatgcctatacgaaaaggaaagtatgaagaaatctctgaaggacagcgtggcaagtaataataaagatcagaactctatgaaacacgaggaccccagtatcatttcaatggaggatgggtctccttacgtgaatggatccttaggggaagtgactccctgtcagcacgccaagaaggcaaacgggcccaattatatacagcctcagaagcgacagaccacgtttgagtcccaggataggaaagcggtgtctccttcttcttcagaaaagagatctaaaaaccctatctctaggccgctggaggggaagaagtctctctcccttagcgccaaaacccataatattggtttcgataaggactcatgccattcaaccaccaaaaccgaggctagccaggaagagcggtccgactctagcgggctgacttctttgaagaagtcaccaaaggtgtctagtaaagacacaagggaaatcaagaccgattttagcctctctatctccaattccagcgacgtgtctgctaaggataaacatgcagaagacaacgaaaagaggttagctgctctcgaggcccggcagaaagctaaggaagtccagaaaaagctggtgcacaacgcgctggccaacctggacggtcatcctgaggacaaaccaactcatatcatctttgggtctgactctgagtgcgaaactgaggagacttccacccaggaacagagtcatccaggcgaagaatgggtgaaggagtccatgggtaagacaagcgggaagttgtttgactcttccgacgacgatgaatcagattcagaggacgattctaaccgtttcaagatcaaacctcagtttgagggccgggctggtcaaaaattgatggatctgcaatcacacttcggtactgatgacaggtttcgtatggactcaaggttcctcgaaacggatagcgaagaggaacaggaagaggtgaatgagaagaaaaccgccgaggaggaggaacttgccgaggagaaaaaaaaggcgcttaacgtggtacagtctgtcctacagatcaacctttcaaattctacaaaccgaggatcagtggcagctaagaaattcaaggacattatccactatgatcccacaaagcaggatcacgccacttatgagcggaagcgcgatgataagccaaaggaatcgaaggctaagcggaaaaagaagcgcgaagaagcagagaaactgccagaagtgagcaaagaaatgtactataacatcgccatggacctcaaggagatttttcagactactaagtacacatctgaaaaggaggaaggtaccccttggaatgaggactgcggcaaagagaaacccgaagagattcaggatccagctgctctaacgtcggacgctgagcaacctagcggatttacattttctttcttcgactcggacactaaagacatcaaggaggaaacttacagagtggagacagtcaaacctgggaagatagtgtggcaagaggaccctagattacaggactccagttctgaagaagaagacgtgacagaagaaaccgatcacaggaattctagccccggggaagcctccctgctagagaaagaaacaacccgcttctttttcttcagtaaaaatgatgaaaggctccagggaagtgatctcttctggaggggcgtgggcagcaatatgtcccgcaattcttgggaggctagaacaactaatctgcggatggactgccgtaaaaagcacaaggatgcaaagcggaaaatgaaacccaagtag

SEQ ID NO: 195871 - DNA, 4051 bp, Artificial Sequence
  derived and/or modified sequence
agaagttaggggctgcagcggcgctggctttagaaaattacttttcccactgaaacacacccaagtatatgcccagccttcatgaaagtgaacagagaaacgaagcgcctttatgtgggtggccttagccaggacatttctgaggcagacctacaaaatcagttcagcagatttggagaagtttcggatgtggagatcatcacacggaaagatgaccaaggaaacccacagaaagtttttgcatatatcaacatcagtgtagcagaagcggacctgaaaaaatccatttttcacgttatccagagggacagcagtgatgaagagaattccagtatcgtataactcagcaggtttaggtccattccatttggcatcagcagacatggtagcactttactggtatgtctgttttaaataaaacaaaatggaaaggtggaacattacaaattcaactagcaaaagaaagctttctgcacagattggcccaagagagagaagcagcaaaagctaagaaagaagaatcaacaacaggtaacgccaacttgttagaaaagacaggaggagtggatttccatatgaaagctgtgccagggacagaagtgccagggcataagaattgggttgtgagcaaatttggaagagtcttacctgttcttcaccttaaaaatcaacataaacgtaaaatcatcaaatatgatccctcaaaatactgccacaacctgaagaagataggggaggatttctcaaacaccattcctatatccagcctgacttgggaattagaaggagggaatgaccctatgagtaagaaacggcgaggagagttctctgactttcatggccctcccaagaagataataaaagtgcagaaggatgagagttccactgggtctctggccatgagtacaaggcccaggagggtaatagagagaccacccttaacacagcaacaggctgcacaaaaaagaacttgtgattccattactccttctaaatcatctcctgtacctgtttctgatactcagaaacttaaaaatctaccttttaagacttctggcttggaaactgccaagaagagaaacagcatttctgatgatgatactgattctgaagatgaattgagaatgatgattgcgaaagaggaaaacttacagagaactacacaaccctcaataaatgaatctgaaagtgatccttttgaagttgtaagggatgatttcaaatcaggcgttcacaaactgcattctttaataggtttaggtatcaaaaatcgtgtctcttgccatgatagtgatgatgatattatgagaaatgatcgtgagtatgactcaggagatacagatgaaattattgcgatgaaaaaaaatgttgctaaggtcaaaaacagtacagaattttcacaaatggaaaaatctacgaagaaaacttctttcaaaaatagagaaaactgtgagctttctgatcactgtattaaactacaaaaaagaaaaagcaatgtagagtcagccctcagtcatggattaaagtctcttaatcgtaaatctccctctcactccagtagcagtgaagatgctgattctgcatcagaattagctgactctgaaggaggtgaggagtataatgccatgatgaaaaactgccttcgtgtgaatctcactttagctgatttggaacaattggctggcagtgatctgaaggttccaaatgaagatactaagagtgatggaccagaaaccaccacccaatgcaagtttgacagaggctccaagagccccaagactcccactggcctccgcagaggccgacagtgtattcgtcctgcggagattgtggcttccctgttagaaggagaggagaacacctgtggcaaacagaaaccaaaggaaaacaatttaaagccaaaatttcaggctttcaagggagtaggctgtctatatgaaaaggagtcaatgaaaaaatccttgaaagacagtgttgcctctaacaataaagatcagaattccatgaaacatgaggatcccagtatcatatccatggaagatgggtccccatatgttaatggctcattaggtgaagtgactccatgccaacatgcaaagaaggcgaatggcccaaactatattcagcctcaaaaaagacagaccacttttgaaagccaggatcgcaaggcagtgtcccctagcagttctgaaaagagaagtaagaatcctatttctaggccattagaaggtaagaagtccttaagtcttagtgcaaagactcacaacataggctttgacaaagacagctgccatagtaccacaaagacagaagcttcacaggaagagcggtctgattcaagcggcctcacatctctcaagaaatcaccaaaggtctcatccaaggacactcgggaaatcaaaactgatttctcactttctattagtaattcgtcagatgtgagtgctaaagataagcatgctgaagacaatgagaagcgtttggcagccttggaagcgaggcaaaaagcaaaagaagtgcagaagaagctggtgcataatgctctggcaaatttggatggtcatccagaggataagccaacgcacatcatcttcggttctgacagtgaatgtgaaacagaggagacatcgactcaggagcagagccatccaggagaggaatgggtgaaagagtctatgggtaaaacatcagggaagctgtttgatagcagtgatgatgacgaatctgattctgaagatgacagtaataggttcaaaattaaacctcagtttgagggcagagctggacagaagctcatggatttacagtcgcactttggcaccgatgacagattccgcatggactctcgatttctagaaactgacagtgaagaggaacaggaagaggtaaatgaaaagaaaactgctgaggaagaagagcttgctgaagaaaaaaagaaagccctgaatgttgtacaaagtgttttgcaaatcaacttaagcaattctacaaacagaggatcagtagctgctaagaaatttaaggacatcatacattatgatccaacgaagcaagaccatgccacttacgaaagaaaaagagatgataagccaaaagaaagtaaagcaaaacgaaaaaagaaaagggaggaagctgagaaactacctgaggtgtctaaagaaatgtattataatattgctatggatctgaaagaaatattccaaactacaaaatataccagtgaaaaggaagagggcacaccctggaatgaggactgtggtaaagagaaacctgaggaaatccaggaccctgcagctctgaccagtgacgctgagcagcccagcgggttcacgttctctttttttgattcagacactaaagacataaaggaagagacctacagagttgaaacagtgaaacctggaaagattgtctggcaggaagaccctcgtttacaagacagcagttcagaagaggaagatgttactgaagaaacagatcacagaaactccagtcctggagaagcatcattacttgagaaagagaccactagatttttctttttctctaagaatgatgaacgacttcaaggttctgacttattctggagaggagtaggaagtaatatgagcaggaactcttgggaggccagaacaaccaacctgcgtatggattgtcgaaagaaacataaagacgcaaaaaggaaaatgaaaccaaaataataaatgtcagctggttttgatactgaatgtgaacaaggctcacctaaggaaactgacccagaaaacagttttagctgacaaagaagaaatttcagagtgaaggaattttaaaaatctggctgacggaatatcattctggttgccatctttttctgtggaactcctctgcatttcttcctaagtaattacttcaaaaattaaattcaacttcttataaaggaagaacaagatagtccttgaaaatactttttgtatataatctctttgccctctatcctgagtaactaatggacatcttctcatgcaaggtttatatgaagcctttttaaataaatgagtcaaagcacttg

SEQ ID NO: 195872 - DNA, 3136 bp, Artificial Sequence
  derived and/or modified sequence
acgtgaccagaagttaggggctgcagcggcgctggctttaggtgaacgacgtggtgaggagtgggtttcgggcatgagaagtcacagggccgtttcctagtctctcttcacttctttgggtcttctcagagaaagaaggctgccgtgggtaggctgggggcggagactatcgggaagagaaaattacttttcccactgaaacacacccaagtatatgcccagccttcatgaaagtgaacagagaaacgaagcgcctttatgtgggtggccttagccaggacatttctgaggcagacctacaaaatcagttcagcagatttggagaagtttcggatgtggagatcatcacacggaaagatgaccaaggaaacccacagaaagtttttgcatatatcaacatcagtgtagcagaagcggacctgaaaaaatgtatgtctgttttaaataaaacaaaatggaaaggtggaacattacaaattcaactagcaaaagaaagctttctgcacagattggcccaagagagagaagcagcaaaagctaagaaagaagaatcaacaacaggtaacgccaacttgttagaaaagacaggaggagtggatttccatatgaaagctgtgccagggacagaagtgccagggcataagaattgggttgtgagcaaatttggaagagtcttacctgttcttcaccttaaaaatcaacataaacgtaaaatcatcaaatatgatccctcaaaatactgccacaacctgaagaagataggggaggatttctcaaacaccattcctatatccagcctgacttgggaattagaaggagggaatgaccctatgagtaagaaacggcgaggagagttctctgactttcatggccctcccaagaagataataaaagtgcagaaggatgagagttccactgggtctctggccatgagtacaaggcccaggagggtaatagagagaccacccttaacacagcaacaggctgcacaaaaaagaacttgtgattccattactccttctaaatcatctcctgtacctgtttctgatactcagaaacttaaaaatctaccttttaagacttctggcttggaaactgccaagaagagaaacagcatttctgatgatgatactgattctgaagatgaattgagaatgatgattgcgaaagaggaaaacttacagagaactacacaaccctcaataaatgaatctgaaagtgatccttttgaagttgtaagggatgatttcaaatcaggcgttcacaaactgcattctttaataggtttaggtatcaaaaatcgtgtctcttgccatgatagtgatgatgatattatgagaaatgatcgtgagtatgactcaggagatacagatgaaattattgcgatgaaaaaaaatgttgctaaggtcaaaaacagtacagaattttcacaaatggaaaaatctacgaagaaaacttctttcaaaaatagagaaaactgtgagctttctgatcactgtattaaactacaaaaaagaaaaagcaatgtagagtcagccctcagtcatggattaaagtctcttaatcgtaaatctccctctcactccagtagcagtgaagatgctgattctgcatcagaattagctgactctgaaggaggtgaggagtataatgccatgatgaaaaactgccttcgtgtgaatctcactttagctgatttggaacaattggctggcagtgatctgaaggttccaaatgaagatactaagagtgatggaccagaaaccaccacccaatgcaagtttgacagaggctccaagagccccaagactcccactggcctccgcagaggccgacagtgtattcgtcctgcggagattgtggcttccctgttagaaggagaggagaacacctgtggcaaacagaaaccaaaggaaaacaatttaaagccaaaatttcaggctttcaagggagtaggctgtctatatgaaaaggagtcaatgaaaaaatccttgaaagacagtgttgcctctaacaataaagatcagaattccatgaaacatgaggatcccagtatcatatccatggaagatgggtccccatatgttaatggctcattaggtgaagtgactccatgccaacatgcaaagaaggcgaatggcccaaactatattcagcctcaaaaaagacagaccacttttgaaagccaggatcgcaaggcagtgtcccctagcagttctgaaaagagaagtaagaatcctatttctaggccattagaaggtaagaagtccttaagtcttagtgcaaagactcacaacataggctttgacaaagacagctgccatagtaccacaaagacagaagcttcacaggaagagcggtctgattcaagcggcctcacatctctcaagaaatcaccaaaggtctcatccaaggacactcgggaaatcaaaactgatttctcactttctattagtaattcgtcagatgtgagtgctaaagataagcatgctgaagacaatgagaagcgtttggcagccttggaagcgaggcaaaaagcaaaagaagtgcagaagaagctggtgcataatgctctggcaaatttggatggtcatccagaggataagccaacgcacatcatcttcggttctgacagtgaatgtgaaacagaggagacatcgactcaggagcagagccatccaggagaggaatgggtgaaagagtctatgggtaaaacatcagggaagctgtttgatagcagtgatgatgacgaatctgattctgaagatgacagtaataggttcaaaattaaacctcagtttgagggcagagctggacagaagctcatggatttacagtcgcactttggcaccgatgacagattccgcatggactctcgatttctagaaactgacagtgaagaggaacaggaagaggtaaatgaaaagaaaactgctgaggaagaagagcttgctgaagaaaaaaagaaagccctgaatgttgtacaaagtgttttgcaaatcaacttaagcaattctacaaacagaggatcagtagctgctaagaaatttaaggacatcatacattatgatccaacgaagcaagaccatgccacttacgaaagaaaaagagatgataagccaaaagaaagtaaagc

SEQ ID NO: 195873 - DNA, 4281 bp, Artificial Sequence
  derived and/or modified sequence
atagtgttcaatagaaactaggggattttggtttaggctcttttgcagtcgttgagggggaggtgacggaggcgtcagggaaggtgggaggacggaaaaggaaattaaaagctcttgggaactgaattgtggtaacggaaccttaggaggctgggttggaaatcgagtaggaaggaagagaggatgctccgttgggacacgtgaccagaagttaggggctgcagcggcgctggctttaggtgaacgacgtgaaaattacttttcccactgaaacacacccaagtatatgcccagccttcatgaaagtgaacagagaaacgaagcgcctttatgtgggtggccttagccaggacatttctgaggcagacctacaaaatcagttcagcagatttggagaagtttcggatgtggagatcatcacacggaaagatgaccaaggaaacccacagaaagtttttgcatatatcaacatcagtgtagcagaagcggacctgaaaaaatgtatgtctgttttaaataaaacaaaatggaaaggtggaacattacaaattcaactagcaaaagaaagctttctgcacagattggcccaagagagagaagcagcaaaagctaagaaagaagaatcaacaacaggtaacgccaacttgttagaaaagacaggaggagtggatttccatatgaaagctgtgccagggacagaagtgccagggcataagaattgggttgtgagcaaatttggaagagtcttacctgttcttcaccttaaaaatcaacataaacgtaaaatcatcaaatatgatccctcaaaatactgccacaacctgaagaagataggggaggatttctcaaacaccattcctatatccagcctgacttgggaattagaaggagggaatgaccctatgagtaagaaacggcgaggagagttctctgactttcatggccctcccaagaagataataaaagtgcagaaggatgagagttccactgggtctctggccatgagtacaaggcccaggagggtaatagagagaccacccttaacacagcaacaggctgcacaaaaaagaacttgtgattccattactccttctaaatcatctcctgtacctgtttctgatactcagaaacttaaaaatctaccttttaagacttctggcttggaaactgccaagaagagaaacagcatttctgatgatgatactgattctgaagatgaattgagaatgatgattgcgaaagaggaaaacttacagagaactacacaaccctcaataaatgaatctgaaagtgatccttttgaagttgtaagggatgatttcaaatcaggcgttcacaaactgcattctttaataggtttaggtatcaaaaatcgtgtctcttgccatgatagtgatgatgatattatgagaaatgatcgtgagtatgactcaggagatacagatgaaattattgcgatgaaaaaaaatgttgctaaggtcaaaaacagtacagaattttcacaaatggaaaaatctacgaagaaaacttctttcaaaaatagagaaaactgtgagctttctgatcactgtattaaactacaaaaaagaaaaagcaatgtagagtcagccctcagtcatggattaaagtctcttaatcgtaaatctccctctcactccagtagcagtgaagatgctgattctgcatcagaattagctgactctgaaggaggtgaggagtataatgccatgatgaaaaactgccttcgtgtgaatctcactttagctgatttggaacaattggctggcagtgatctgaaggttccaaatgaagatactaagagtgatggaccagaaaccaccacccaatgcaagtttgacagaggctccaagagccccaagactcccactggcctccgcagaggccgacagtgtattcgtcctgcggagattgtggcttccctgttagaaggagaggagaacacctgtggcaaacagaaaccaaaggaaaacaatttaaagccaaaatttcaggctttcaagggagtaggctgtctatatgaaaaggagtcaatgaaaaaatccttgaaagacagtgttgcctctaacaataaagatcagaattccatgaaacatgaggatcccagtatcatatccatggaagatgggtccccatatgttaatggctcattaggtgaagtgactccatgccaacatgcaaagaaggcgaatggcccaaactatattcagcctcaaaaaagacagaccacttttgaaagccaggatcgcaaggcagtgtcccctagcagttctgaaaagagaagtaagaatcctatttctaggccattagaaggtaagaagtccttaagtcttagtgcaaagactcacaacataggctttgacaaagacagctgccatagtaccacaaagacagaagcttcacaggaagagcggtctgattcaagcggcctcacatctctcaagaaatcaccaaaggtctcatccaaggacactcgggaaatcaaaactgatttctcactttctattagtaattcgtcagatgtgagtgctaaagataagcatgctgaagacaatgagaagcgtttggcagccttggaagcgaggcaaaaagcaaaagaagtgcagaagaagctggtgcataatgctctggcaaatttggatggtcatccagaggataagccaacgcacatcatcttcggttctgacagtgaatgtgaaacagaggagacatcgactcaggagcagagccatccaggagaggaatgggtgaaagagtctatgggtaaaacatcagggaagctgtttgatagcagtgatgatgacgaatctgattctgaagatgacagtaataggttcaaaattaaacctcagtttgagggcagagctggacagaagctcatggatttacagtcgcactttggcaccgatgacagattccgcatggactctcgatttctagaaactgacagtgaagaggaacaggaagaggtaaatgaaaagaaaactgctgaggaagaagagcttgctgaagaaaaaaagaaagccctgaatgttgtacaaagtgttttgcaaatcaacttaagcaattctacaaacagaggatcagtagctgctaagaaatttaaggacatcatacattatgatccaacgaagcaagaccatgccacttacgaaagaaaaagagatgataagccaaaagaaagtaaagcaaaacgaaaaaagaaaagggaggaagctgagaaactacctgaggtgtctaaagaaatgtattataatattgctatggatctgaaagaaatattccaaactacaaaatataccagtgaaaaggaagagggcacaccctggaatgaggactgtggtaaagagaaacctgaggaaatccaggaccctgcagctctgaccagtgacgctgagcagcccagcgggttcacgttctctttttttgattcagacactaaagacataaaggaagagacctacagagttgaaacagtgaaacctggaaagattgtctggcaggaagaccctcgtttacaagacagcagttcagaagaggaagatgttactgaagaaacagatcacagaaactccagtcctggagaagcatcattacttgagaaagagaccactagatttttctttttctctaagaatgatgaacgacttcaaggttctgacttattctggagaggagtaggaagtaatatgagcaggaactcttgggaggccagaacaaccaacctgcgtatggattgtcgaaagaaacataaagacgcaaaaaggaaaatgaaaccaaaataataaatgtcagctggttttgatactgaatgtgaacaaggctcacctaaggaaactgacccagaaaacagttttagctgacaaagaagaaatttcagagtgaaggaattttaaaaatctggctgacggaatatcattctggttgccatctttttctgtggaactcctctgcatttcttcctaagtaattacttcaaaaattaaattcaacttcttataaaggaagaacaagatagtccttgaaaatactttttgtatataatctctttgccctctatcctgagtaactaatggacatcttctcatgcaaggtttatatgaagcctttttaaataaatgagtcaaagcacttgtattttccagcctaggctttgtgtgaattataggctatttgaaattttatttctgattatgtcaaatacaccttccattttgtcatttttgtttaaactgataaattacaagtcaacattgagtttta

SEQ ID NO: 195874 - DNA, 4343 bp, Artificial Sequence
  derived and/or modified sequence
agaagttaggggctgcagcggcgctggctttaggtgaacgacgtggtgaggagtgggtttcgggcatgagaagtcacagggccgtttcctagtctctcttcacttctttgggtcttctcagagaaagaaggctgccgtgggtaggctgggggcggagactatcgggaagaggtaggccgaagttctgcccagaatacacgccatgtggtggacgctggttgggagtctcttctggaaagagtctgtcagctcttggggaagggaagggcgagagctgagcgcctgccgggtgctaaacgaaatgagagatactatgatgggccctagtacctctggaaaagttttcctgagtcccctgtgatacagcaaccttcatagtatagtgttaagaattccaagttctgaaggtagacctgcattataatcctggattcactaattttcgaaaattacttttcccactgaaacacacccaagtatatgcccagccttcatgaaagtgaacagagaaacgaagcgcctttatgtgggtggccttagccaggacatttctgaggcagacctacaaaatcagttcagcagatttggagaagtttcggatgtggagatcatcacacggaaagatgaccaaggaaacccacagaaagtttttgcatatatcaacatcagtgtagcagaagcggacctgaaaaaatgtatgtctgttttaaataaaacaaaatggaaaggtggaacattacaaattcaactagcaaaagaaagctttctgcacagattggcccaagagagagaagcagcaaaagctaagaaagaagaatcaacaacaggtaacgccaacttgttagaaaagacaggaggagtggatttccatatgaaagctgtgccagggacagaagtgccagggcataagaattgggttgtgagcaaatttggaagagtcttacctgttcttcaccttaaaaatcaacataaacgtaaaatcatcaaatatgatccctcaaaatactgccacaacctgaagaagataggggaggatttctcaaacaccattcctatatccagcctgacttgggaattagaaggagggaatgaccctatgagtaagaaacggcgaggagagttctctgactttcatggccctcccaagaagataataaaagtgcagaaggatgagagttccactgggtctctggccatgagtacaaggcccaggagggtaatagagagaccacccttaacacagcaacaggctgcacaaaaaagaacttgtgattccattactccttctaaatcatctcctgtacctgtttctgatactcagaaacttaaaaatctaccttttaagacttctggcttggaaactgccaagaagagaaacagcatttctgatgatgatactgattctgaagatgaattgagaatgatgattgcgaaagaggaaaacttacagagaactacacaaccctcaataaatgaatctgaaagtgatccttttgaagttgtaagggatgatttcaaatcaggcgttcacaaactgcattctttaataggtttaggtatcaaaaatcgtgtctcttgccatgatagtgatgatgatattatgagaaatgatcgtgagtatgactcaggagatacagatgaaattattgcgatgaaaaaaaatgttgctaaggtcaaaaacagtacagaattttcacaaatggaaaaatctacgaagaaaacttctttcaaaaatagagaaaactgtgagctttctgatcactgtattaaactacaaaaaagaaaaagcaatgtagagtcagccctcagtcatggattaaagtctcttaatcgtaaatctccctctcactccagtagcagtgaagatgctgattctgcatcagaattagctgactctgaaggaggtgaggagtataatgccatgatgaaaaactgccttcgtgtgaatctcactttagctgatttggaacaattggctggcagtgatctgaaggttccaaatgaagatactaagagtgatggaccagaaaccaccacccaatgcaagtttgacagaggctccaagagccccaagactcccactggcctccgcagaggccgacagtgtattcgtcctgcggagattgtggcttccctgttagaaggagaggagaacacctgtggcaaacagaaaccaaaggaaaacaatttaaagccaaaatttcaggctttcaagggagtaggctgtctatatgaaaaggagtcaatgaaaaaatccttgaaagacagtgttgcctctaacaataaagatcagaattccatgaaacatgaggatcccagtatcatatccatggaagatgggtccccatatgttaatggctcattaggtgaagtgactccatgccaacatgcaaagaaggcgaatggcccaaactatattcagcctcaaaaaagacagaccacttttgaaagccaggatcgcaaggcagtgtcccctagcagttctgaaaagagaagtaagaatcctatttctaggccattagaaggtaagaagtccttaagtcttagtgcaaagactcacaacataggctttgacaaagacagctgccatagtaccacaaagacagaagcttcacaggaagagcggtctgattcaagcggcctcacatctctcaagaaatcaccaaaggtctcatccaaggacactcgggaaatcaaaactgatttctcactttctattagtaattcgtcagatgtgagtgctaaagataagcatgctgaagacaatgagaagcgtttggcagccttggaagcgaggcaaaaagcaaaagaagtgcagaagaagctggtgcataatgctctggcaaatttggatggtcatccagaggataagccaacgcacatcatcttcggttctgacagtgaatgtgaaacagaggagacatcgactcaggagcagagccatccaggagaggaatgggtgaaagagtctatgggtaaaacatcagggaagctgtttgatagcagtgatgatgacgaatctgattctgaagatgacagtaataggttcaaaattaaacctcagtttgagggcagagctggacagaagctcatggatttacagtcgcactttggcaccgatgacagattccgcatggactctcgatttctagaaactgacagtgaagaggaacaggaagaggtaaatgaaaagaaaactgctgaggaagaagagcttgctgaagaaaaaaagaaagccctgaatgttgtacaaagtgttttgcaaatcaacttaagcaattctacaaacagaggatcagtagctgctaagaaatttaaggacatcatacattatgatccaacgaagcaagaccatgccacttacgaaagaaaaagagatgataagccaaaagaaagtaaagcaaaacgaaaaaagaaaagggaggaagctgagaaactacctgaggtgtctaaagaaatgtattataatattgctatggatctgaaagaaatattccaaactacaaaatataccagtgaaaaggaagagggcacaccctggaatgaggactgtggtaaagagaaacctgaggaaatccaggaccctgcagctctgaccagtgacgctgagcagcccagcgggttcacgttctctttttttgattcagacactaaagacataaaggaagagacctacagagttgaaacagtgaaacctggaaagattgtctggcaggaagaccctcgtttacaagacagcagttcagaagaggaagatgttactgaagaaacagatcacagaaactccagtcctggagaagcatcattacttgagaaagagaccactagatttttctttttctctaagaatgatgaacgacttcaaggttctgacttattctggagaggagtaggaagtaatatgagcaggaactcttgggaggccagaacaaccaacctgcgtatggattgtcgaaagaaacataaagacgcaaaaaggaaaatgaaaccaaaataataaatgtcagctggttttgatactgaatgtgaacaaggctcacctaaggaaactgacccagaaaacagttttagctgacaaagaagaaatttcagagtgaaggaattttaaaaatctggctgacggaatatcattctggttgccatctttttctgtggaactcctctgcatttcttcctaagtaattacttcaaaaattaaattcaacttcttataaaggaagaacaagatagtccttgaaaatactttttgtatataatctctttgccctctatcctgagtaactaatggacatcttctcatgcaaggtttatatgaagcctttttaaataaatgagtcaaagca

SEQ ID NO: 195875 - DNA, 4053 bp, Artificial Sequence
  derived and/or modified sequence
agaagttaggggctgcagcggcgctggctttagaaaattacttttcccactgaaacacacccaagtatatgcccagccttcatgaaagtgaacagagaaacgaagcgcctttatgtgggtggccttagccaggacatttctgaggcagacctacaaaatcagttcagcagatttggagaagtttcggatgtggagatcatcacacggaaagatgaccaaggaaacccacagaaagtttttgcatatatcaacatcagtgtagcagaagcggacctgaaaaaatccatttttcacgttatccagagggacagcagtgatgaagagaattccagtatcgtataactcagcaggtttaggtccattccatttggcatcagcagacatggtagcactttactggtatgtctgttttaaataaaacaaaatggaaaggtggaacattacaaattcaactagcaaaagaaagctttctgcacagattggcccaagagagagaagcagcaaaagctaagaaagaagaatcaacaacaggtaacgccaacttgttagaaaagacaggaggagtggatttccatatgaaagctgtgccagggacagaagtgccagggcataagaattgggttgtgagcaaatttggaagagtcttacctgttcttcaccttaaaaatcaacataaacgtaaaatcatcaaatatgatccctcaaaatactgccacaacctgaagaagataggggaggatttctcaaacaccattcctatatccagcctgacttgggaattagaaggagggaatgaccctatgagtaagaaacggcgaggagagttctctgactttcatggccctcccaagaagataataaaagtgcagaaggatgagagttccactgggtctctggccatgagtacaaggcccaggagggtaatagagagaccacccttaacacagcaacaggctgcacaaaaaagaacttgtgattccattactccttctaaatcatctcctgtacctgtttctgatactcagaaacttaaaaatctaccttttaagacttctggcttggaaactgccaagaagagaaacagcatttctgatgatgatactgattctgaagatgaattgagaatgatgattgcgaaagaggaaaacttacagagaactacacaaccctcaataaatgaatctgaaagtgatccttttgaagttgtaagggatgatttcaaatcaggcgttcacaaactgcattctttaataggtttaggtatcaaaaatcgtgtctcttgccatgatagtgatgatgatattatgagaaatgatcgtgagtatgactcaggagatacagatgaaattattgcgatgaaaaaaaatgttgctaaggtcaaaaacagtacagaattttcacaaatggaaaaatctacgaagaaaacttctttcaaaaatagagaaaactgtgagctttctgatcactgtattaaactacaaaaaagaaaaagcaatgtagagtcagccctcagtcatggattaaagtctcttaatcgtaaatctccctctcactccagtagcagtgaagatgctgattctgcatcagaattagctgactctgaaggaggtgaggagtataatgccatgatgaaaaactgccttcgtgtgaatctcactttagctgatttggaacaattggctggcagtgatctgaaggttccaaatgaagatactaagagtgatggaccagaaaccaccacccaatgcaagtttgacagaggctccaagagccccaagactcccactggcctccgcagaggccgacagtgtattcgtcctgcggagattgtggcttccctgttagaaggagaggagaacacctgtggcaaacagaaaccaaaggaaaacaatttaaagccaaaatttcaggctttcaagggagtaggctgtctatatgaaaaggagtcaatgaaaaaatccttgaaagacagtgttgcctctaacaataaagatcagaattccatgaaacatgaggatcccagtatcatatccatggaagatgggtccccatatgttaatggctcattaggtgaagtgactccatgccaacatgcaaagaaggcgaatggcccaaactatattcagcctcaaaaaagacagaccacttttgaaagccaggatcgcaaggcagtgtcccctagcagttctgaaaagagaagtaagaatcctatttctaggccattagaaggtaagaagtccttaagtcttagtgcaaagactcacaacataggctttgacaaagacagctgccatagtaccacaaagacagaagcttcacaggaagagcggtctgattcaagcggcctcacatctctcaagaaatcaccaaaggtctcatccaaggacactcgggaaatcaaaactgatttctcactttctattagtaattcgtcagatgtgagtgctaaagataagcatgctgaagacaatgagaagcgtttggcagccttggaagcgaggcaaaaagcaaaagaagtgcagaagaagctggtgcataatgctctggcaaatttggatggtcatccagaggataagccaacgcacatcatcttcggttctgacagtgaatgtgaaacagaggagacatcgactcaggagcagagccatccaggagaggaatgggtgaaagagtctatgggtaaaacatcagggaagctgtttgatagcagtgatgatgacgaatctgattctgaagatgacagtaataggttcaaaattaaacctcagtttgagggcagagctggacagaagctcatggatttacagtcgcactttggcaccgatgacagattccgcatggactctcgatttctagaaactgacagtgaagaggaacaggaagaggtaaatgaaaagaaaactgctgaggaagaagagcttgctgaagaaaaaaagaaagccctgaatgttgtacaaagtgttttgcaaatcaacttaagcaattctacaaacagaggatcagtagctgctaagaaatttaaggacatcatacattatgatccaacgaagcaagaccatgccacttacgaaagaaaaagagatgataagccaaaagaaagtaaagcaaaacgaaaaaagaaaagggaggaagctgagaaactacctgaggtgtctaaagaaatgtattataatattgctatggatctgaaagaaatattccaaactacaaaatataccagtgaaaaggaagagggcacaccctggaatgaggactgtggtaaagagaaacctgaggaaatccaggaccctgcagctctgaccagtgacgctgagcagcccagcgggttcacgttctctttttttgattcagacactaaagacataaaggaagagacctacagagttgaaacagtgaaacctggaaagattgtctggcaggaagaccctcgtttacaagacagcagttcagaagaggaagatgttactgaagaaacagatcacagaaactccagtcctggagaagcatcattacttgagaaagagaccactagatttttctttttctctaagaatgatgaacgacttcaaggttctgacttattctggagaggagtaggaagtaatatgagcaggaactcttgggaggccagaacaaccaacctgcgtatggattgtcgaaagaaacataaagacgcaaaaaggaaaatgaaaccaaaataataaatgtcagctggttttgatactgaatgtgaacaaggctcacctaaggaaactgacccagaaaacagttttagctgacaaagaagaaatttcagagtgaaggaattttaaaaatctggctgacggaatatcattctggttgccatctttttctgtggaactcctctgcatttcttcctaagtaattacttcaaaaattaaattcaacttcttataaaggaagaacaagatagtccttgaaaatactttttgtatataatctctttgccctctatcctgagtaactaatggacatcttctcatgcaaggtttatatgaagcctttttaaataaatgagtcaaagcacttgta

SEQ ID NO: 195876 - DNA, 3300 bp, Artificial Sequence
  derived and/or modified sequence
atgtccgtcctgaataagacaaagtggaagggcggaaccctccagatccagcttgccaaggagtcctttcttcaccggttagcccaggagagggaagctgctaaggccaagaaggaggagtcaacgactggaaatgccaacctgctcgaaaagactggtggtgtggacttccatatgaaggccgttccgggaacagaggtccccggtcacaaaaactgggtcgttagtaagtttggacgcgtcttgcctgtattacacctcaaaaaccagcacaagagaaaaattattaaatacgatccgtcaaagtactgccacaaccttaaaaagatcggggaggacttcagtaacactattcctattagtagtttgacgtgggaacttgaaggaggtaacgatccaatgtcaaagaagagaaggggggagttcagcgatttccatgggccacctaaaaaaatcataaaagttcagaaagacgagagttccacggggagtctcgcaatgagcaccaggcccagacgggtcatcgagaggccaccattaacccagcaacaagctgctcagaaacggacatgtgacagcatcaccccaagcaagagtagccctgttcccgtttccgacactcagaagctgaaaaacttgccattcaagacaagtggattagagactgctaagaaacgcaattcgatcagcgacgatgacactgattcggaggacgaacttcgcatgatgattgcgaaggaggagaacctgcagcgaaccacccagccctccatcaatgaatctgagagcgatccattcgaggtagtgcgggatgacttcaagagcggtgttcataagctccactcactcattggattaggcattaaaaatagggtgtcttgtcatgacagtgacgacgacatcatgcgtaatgacagagagtatgactctggtgacaccgacgaaatcattgccatgaaaaagaacgtcgccaaggttaaaaactcaacggaattttcgcagatggagaaatcaacaaaaaagacctcgttcaaaaatagggagaactgcgagttatctgaccactgtatcaaattgcaaaagaggaagagtaacgtggaaagcgccttgagccacggtctgaagagcctgaatcgtaaatcacctagtcattcatcatcatcggaagacgccgattctgcgtctgaacttgctgatagcgaagggggtgaggagtacaacgcaatgatgaagaactgtctccgcgtgaaccttactctcgccgatctagaacaactagcgggttcggacctgaaggtgccaaatgaggataccaaatccgacggacccgagacaactacacagtgtaagttcgacaggggaagcaaaagtccgaagacccctacaggattacggaggggccgacaatgtatcaggccagcggaaatagttgcaagtctgttagaaggggaagagaatacctgcggtaagcaaaaaccaaaggaaaataacctcaagccgaagtttcaggcttttaagggtgtgggctgcctgtatgaaaaggaaagtatgaaaaagtccctcaaagactctgttgcaagtaataataaggatcagaacagtatgaagcacgaggacccttccatcattagcatggaggatggctctccatacgtcaacggctccttgggcgaggtgaccccctgccagcacgctaagaaagccaacgggccaaattacattcaaccacagaaaaggcagacgacgttcgagtcacaggacagaaaggcagtgagcccaagctcatctgagaaaaggagtaagaaccccattagccgtcccctggagggcaaaaagagcttgtcactctcggctaaaacccacaatatcggatttgataaggacagttgccattccaccactaagaccgaagcctctcaggaggaacgctcagacagcagtggcctgacatccttaaaaaaatcccccaaggtaagcagcaaagatacgcgggagattaagactgatttcagcctgagcatttccaatagttcagacgtgtcagccaaagacaagcatgccgaggataatgagaagagactggctgctctggaagctagacagaaagcgaaggaggtgcagaaaaaacttgttcataacgcgctcgccaatcttgacggtcatcctgaagacaaacccacccacatcattttcggaagcgacagtgagtgcgaaactgaggaaacgagcactcaagagcagtctcaccctggggaggagtgggtgaaggagtccatgggtaagaccagcgggaaactctttgattcatccgacgacgacgagagtgacagcgaggacgattctaataggttcaagataaagccacagttcgaaggacgcgctggacagaagctgatggacctccagtctcatttcgggaccgatgatcggtttcgtatggattcaagattcctggaaaccgactcagaggaagagcaggaggaggttaatgagaagaagaccgccgaagaggaagaactcgccgaagaaaaaaagaaagccttaaatgtggtgcagtcagtcctgcagataaatcttagtaactccactaaccggggatccgtggccgctaaaaagttcaaagacattatccactacgaccccactaagcaggaccacgccacctatgagaggaaacgcgatgataagcccaaagagtcaaaagccaaaagaaagaaaaagcgagaggaggcagagaagcttccagaggtctccaaggagatgtattacaacattgctatggatctgaaggagattttccagacaacaaagtacaccagtgaaaaggaggaaggtaccccatggaacgaagattgcgggaaagagaaaccagaggaaattcaggatccagcagctctgacctcagacgccgagcagccgtcaggctttactttttcattctttgacagcgataccaaggacatcaaagaggagacgtaccgggtcgagactgttaaaccaggcaagatagtgtggcaggaggatccacggctgcaggatagttccagcgaagaggaggacgttactgaagaaacagaccacagaaacagttcacctggtgaggccagtttgctggaaaaagagaccacccggttttttttctttagtaaaaacgatgaacgactccaagggtcagatttgttttggcggggtgttggatccaacatgtcccggaattcctgggaggcgcgtactaccaatctgaggatggactgtagaaaaaaacataaagacgctaagcggaagatgaaacccaagtag

SEQ ID NO: 195877 - DNA, 2913 bp, Artificial Sequence
  derived and/or modified sequence
atgaaggtgaatcgagaaacaaagagattatatgtgggcggactaagccaggacatctctgaagccgatcttcagaatcagttctctagatttggggaagtctctgacgtcgaaatcatcacccgaaaggatgatcaaggaaatccgcagaaagtgtttgcttacatcaatatcagcgtcgccgaagccgatctcaaaaaatgcatgtccgtgctgaacaaaactaagtggaaaggaggaactctgcaaatccagcttgccaaggagtcatttctgcatcggctggcacaggagagagaagctgctaaggccaaaaaagaggaaagcacgaccggtaatgcgaacctgcttgaaaaaacaggcggagtggactttcatatgaaggcagtgccagggacagaggtgccaggccataagaattgggtcgtcagcaaattcggaagagtgctacccgtgctacatctgaagaaccagcacaagcggaagatcattaagtacgacccttccaaatattgtcacaatttgaagaagattggagaggatttttccaacacaattcctatatcgtctctgacttgggaacttgagggcggaaacgatcctatgtctaagaagcggagaggtgagtttagcgatttccatggacctccaaagaagatcattaaggtacagaaagatgagtcatcaacaggatctcttgccatgagcacacgtcctaggagggtcattgaaaggccccctctgactcagcagcaggctgcacagaagaggacatgcgactccatcactccatcaaaaagctccccagtccccgtttcggatactcagaaacttaagaatctgccatttaaaacttctggtttggaaaccgccaagaagcgtaacagcatttccgacgatgataccgactccgaagacgagctgagaatgatgatcgcaaaggaggagaatctgcaaaggacaacccaacctagcatcaatgagtcagagagcgacccatttgaggttgttagagatgattttaagtcaggcgtgcataagctgcattcgttgatcggactgggaattaagaacagggtgagctgtcacgattcagatgacgacattatgcgcaatgatagggagtacgacagcggggacacagatgagattatagctatgaagaaaaatgtggctaaagttaagaatagcaccgaattctcacagatggagaaatcaactaaaaagacttcttttaaaaatcgagagaactgcgagttgtcagaccattgcatcaagctccagaaacgtaaaagcaacgtcgaaagtgccctcagtcacgggttaaagtccttgaatcgcaaaagccctagccattcttcctctagcgaggacgcagatagcgcctccgagttggcagattctgagggaggcgaggagtacaacgctatgatgaagaattgcctgcgcgtgaacttgacgctggccgatctagagcagctcgcaggtagcgatctgaaagtacctaatgaggacaccaagtctgacggaccagaaaccactacacagtgtaagttcgaccggggaagtaagagccccaagaccccgacgggccttagacgaggccgtcaatgcatcaggcccgcagaaatcgtcgcctccctgctcgagggagaggagaacacatgcggtaagcagaagccaaaagaaaataatttgaagcccaaattccaggcatttaagggagtcggatgtctctatgagaaagaatccatgaagaaatccctcaaggacagcgtggcatccaataataaagaccaaaactccatgaagcatgaagacccttccattatatctatggaggacggaagcccctatgttaacgggagtctcggggaggtgactccttgccagcacgcaaaaaaggcaaacggacctaattacatccaaccacagaagcgacagaccacttttgaaagtcaggacagaaaagctgtgtctcctagctcttccgaaaagcgcagcaagaatcccatctcccggcctctggagggtaaaaagtcactctcactgtctgctaagacccataatattgggtttgacaaagactcttgtcattcaacaactaaaacagaagcatcccaggaggaacggagtgattcatcaggtttgacctctctcaagaagagccccaaggtaagtagtaaggatacaagggaaatcaaaaccgacttcagcctctcaatcagcaacagcagtgacgtttccgccaaggacaagcacgctgaagataacgaaaagaggcttgccgcacttgaagcccgtcagaaggctaaggaagtgcagaagaaactagttcataatgctttagcaaacctcgatggacaccctgaggataagcctacccatatcattttcggatctgactccgaatgtgagaccgaagaaacctccacccaggaacagagtcacccaggggaggaatgggtgaaagagtccatgggcaagacctccgggaagctgttcgatagttcagatgatgacgagtcagattctgaggacgattccaaccgcttcaagattaagccacaattcgagggaagagcaggacagaaactcatggacttgcagagccattttggcacggacgacaggttccggatggacagccgctttctcgaaacagatagcgaggaggaacaggaagaagttaacgaaaaaaagactgcagaggaagaggagctggccgaagagaagaaaaaagccctgaacgttgtgcagtcagtactgcagatcaaccttagcaatagcacaaatagagggtcagtagccgcaaaaaagtttaaggacattatccactatgacccaacaaagcaagatcacgcgacctacgaaaggaagcgcgatgacaagcctaaggaatctaaggcatag

SEQ ID NO: 195878 - DNA, 3504 bp, Artificial Sequence
  derived and/or modified sequence
atgaaggtcaaccgagagacaaagcgactgtacgtcgggggactaagccaagatatctccgaggcagaccttcaaaaccaattctcacgatttggggaggtaagcgatgtcgagattatcacccgcaaagatgatcagggcaacccccagaaagttttcgcgtatatcaacatatccgttgcagaggccgacctgaagaaatgtatgagcgtcttgaataagactaagtggaagggtggtacactgcagattcagctggccaaggagtccttcctgcaccgtctggcccaggaacgggaggccgcaaaggccaagaaagaggaatctacgaccggcaatgctaacctcctcgagaagactggaggcgttgatttccatatgaaggctgtcccgggaaccgaggtgcctgggcacaagaactgggtggtgtctaaatttggcagggtgctccctgtcctccatctgaaaaaccagcacaagaggaaaatcataaagtacgacccatctaagtattgccacaatctgaagaagataggcgaagacttctccaacactatccccatctccagtctcacttgggagctggagggcggtaatgatcccatgagtaagaagaggaggggcgaattttcagactttcacggccctcctaagaagataattaaagtccagaaagatgagtcttccaccggaagcttggcaatgagcacccgcccaagacgggtgattgagcgcccaccactcacacaacagcaggcagcccagaagaggacatgcgattcaattacaccgagtaagagcagccctgtacccgttagcgacactcagaaactgaagaaccttccctttaagacctccggcctggagaccgccaagaagcgcaattccatttccgatgatgataccgactcagaagatgaactgcggatgatgattgctaaagaggagaatctgcagcggacaactcagcctagcattaatgagagtgaaagcgaccctttcgaggtagtgcgcgacgattttaagtcaggggtgcacaagcttcactcgttgatcggtctgggaattaagaatcgggttagttgccatgactcagatgacgatatcatgcggaacgaccgtgagtatgacagcggcgacactgatgaaattatcgcgatgaaaaagaacgtggcaaaggtcaaaaacagcaccgaattcagccagatggaaaagagtactaaaaaaacttcttttaagaatagggaaaattgtgaactgtctgaccactgtatcaagctacagaaaaggaagtcaaacgtggagtccgcccttagtcacggcctcaaaagtttaaatcgtaaaagcccatcccactccagtagtagtgaagacgccgacagcgcttcggaactggcagactcagaggggggtgaggaatacaatgcaatgatgaagaactgcctaagagtcaacctcaccttagctgacctagagcaactggccggatcagatttaaaagtgccaaatgaagacactaaatccgatgggccagagaccacaacccagtgcaaatttgatcgcggttcgaaatctccaaaaacaccaacgggactgaggagagggagacagtgcattaggccagctgaaatcgtggcttctttgctggagggggaggaaaacacctgcggcaagcagaagcccaaggaaaataacctgaagcccaagtttcaagcatttaagggagtgggctgcttgtacgagaaagagtccatgaagaagagtcttaaggactccgtcgcttcaaataacaaggatcagaatagcatgaaacacgaagatccatctatcatttctatggaagatggttctccatacgtcaatgggtcattgggagaggttactccatgtcagcacgcgaaaaaggccaacgggccaaactacattcagccccagaagaggcaaaccacatttgagtctcaggatcgtaaagccgtcagcccgtctagtagcgagaaaagaagtaagaatccaatcagccggccactcgaaggcaagaaatccctctcattgagcgctaaaacccataacatcggttttgacaaggacagctgtcactccacaacaaagacagaagcttcgcaggaagagcgatctgattcttcaggacttacctccctcaaaaagtcgcccaaggtgtcctcgaaggatacaagggagatcaagacagatttttccctgtctattagcaactcaagtgatgtgagcgccaaggataaacatgctgaagacaatgaaaagcgactagccgctctcgaggcgcgacagaaagccaaagaagttcagaagaaattggtgcataacgccctggcaaacttagacggccaccccgaagataagcctacacacatcatcttcggtagcgacagcgagtgcgaaacagaagaaacatctactcaggagcagagtcacccgggagaggaatgggtgaaagaaagcatggggaagacaagcggcaagttgttcgatagctccgacgatgacgagtccgactccgaggacgactccaatcgattcaagattaaacctcaatttgagggcagggcaggacaaaaacttatggatctgcagtcccattttgggactgacgaccgcttcagaatggattcaagattcctggaaacggatagtgaagaggagcaggaggaagttaatgagaagaaaaccgccgaggaggaggagctcgccgaagagaagaagaaggcgcttaacgttgtccagtctgtgctacagatcaatctgtccaattccaccaaccgtggctccgtagccgcaaaaaagtttaaggacattattcactacgatccaaccaaacaggaccacgccacctacgagcggaagcgggatgacaagccaaaggagagcaaggctaagagaaaaaaaaagcgggaggaggccgaaaagctcccagaggtttccaaagagatgtattataatatcgcaatggatctcaaggagatctttcagacaaccaagtacacctccgagaaggaagagggcactccatggaatgaagactgtgggaaagagaaaccagaagagatccaggacccggcagccttgactagcgacgccgagcagcccagcggctttacattcagcttcttcgattctgacacaaaagacatcaaagaggagacatacagagtggagacagtgaaacctggtaagattgtttggcaggaggatccccgactgcaagatagctcgagcgaagaggaggacgtgactgaggagacggaccatagaaactcctctcccggtgaagcatctttgctggagaaagagacaacacggttcttcttcttttccaaaaatgatgagcggctgcagggctcagatctgttctggagaggcgtcggatccaacatgtctagaaattcttgggaggctcgtacaactaacctgagaatggattgtcgaaaaaagcacaaagacgccaagaggaaaatgaaaccaaagtag

SEQ ID NO: 195879 - DNA, 3504 bp, Artificial Sequence
  derived and/or modified sequence
atgaaggtaaacagagagacaaagagattgtatgtaggaggcctgagtcaagatatctctgaagcagaccttcagaaccagttttcgcgttttggagaggtttcagatgtcgagattatcacccgcaaggacgatcaggggaatccccaaaaagtgttcgcttacattaacatctctgttgcggaagcagatcttaagaaatgtatgtcggtgctgaacaagactaagtggaagggaggcacccttcagatccagctcgccaaggaatccttcttgcaccgattggctcaggagcgggaggcagcaaaggccaaaaaagaggaatctacgacaggaaatgccaatttgctagaaaaaaccggtggagtggactttcacatgaaagcagtgcctggcactgaggtgcctggccacaagaactgggtggttagcaagtttgggcgtgtccttccggtgttgcacctgaagaatcagcataagcggaaaataatcaagtacgacccatccaaatattgtcataatctgaagaagataggggaggatttctcgaacaccatcccaatttctagcctcacgtgggagctggaagggggtaatgacccaatgagcaagaagagacgcggtgaattttctgactttcacggacctcccaaaaaaatcattaaagtgcagaaagacgagtccagcaccggtagcctcgctatgtccacccggcctcggagggtcatagagagacctccgctgacccagcagcaagccgcacaaaaaaggacatgcgactcaataacaccctccaagtcctcccccgtgcccgtgtcggacacacagaaactcaagaatctgcctttcaaaacttcaggcctcgaaaccgccaaaaaacgaaacagtatcagtgatgacgataccgacagcgaggacgaactgcgcatgatgattgctaaagaagagaatttgcaaagaaccacacagccctctattaatgaaagtgaatctgatccatttgaagtggttcgcgatgatttcaagtcaggcgtgcataaactccacagtctgattggtttgggcatcaagaatcgagtgtcctgccacgattccgacgacgatattatgagaaacgatcgggagtatgattccggcgacacagatgaaataatcgcaatgaagaaaaatgtggccaaagtgaaaaactccaccgaattctctcagatggaaaagtccaccaagaaaacttccttcaaaaatagagagaactgtgaactgtcagaccactgcataaagctgcagaagagaaagagcaacgtagaaagcgcactctctcacggcctgaagtcactgaatagaaagtctccctctcactcttccagtagcgaagatgccgactccgccagcgaactcgccgattctgagggaggcgaggaatataacgcgatgatgaaaaattgcctgcgtgtgaatctaactctagccgacctcgaacagttggccggtagcgatttgaaagtcccaaacgaggacacaaaaagcgacggtccagagacgaccacacaatgtaagttcgaccggggaagcaagtcaccgaagacacccaccggcctgaggcgcggacgtcaatgtatccgcccagcagaaattgtcgcaagtctcctggagggcgaggagaatacctgcggcaaacagaaacccaaggagaacaacctcaagcccaagtttcaggcctttaaaggagtgggctgcctatacgagaaagagtcaatgaaaaagtcacttaaagattctgtcgcttccaataacaaagatcagaactccatgaaacacgaggacccatctataataagtatggaggatggttccccctatgtgaatgggtctctgggcgaagttacaccctgtcagcacgccaagaaagccaatggaccaaattatatacagccgcagaagcggcaaacaaccttcgagtcccaggataggaaagcagtgtcaccctcctcctcagaaaaacgcagcaagaatccgatttctagacccttagagggcaaaaagtccctgagcctgtctgcaaagactcataatattggctttgacaaagactcctgtcactccacaaccaagaccgaggcatctcaggaagaaaggagcgattctagtggcctcacatccctgaagaagtcaccgaaggtcagctccaaggacacacgggaaatcaaaacggacttttcactgtctatctctaatagtagcgacgtgagcgctaaggataagcatgcagaggataacgagaagaggctagctgctctcgaggctcgccagaaagctaaggaggttcagaagaaacttgtccataatgcactagcgaatctggacgggcaccctgaggataaacctactcacatcatattcggcagtgactctgagtgtgagaccgaggagacgtcaacacaggagcagtctcacccaggtgaggagtgggttaaggaaagcatgggtaagacctctggtaagctttttgattcgagtgacgacgatgaatccgactcagaagacgatagtaaccggtttaagattaaaccccaattcgagggcagggctggccagaaactgatggacctgcagagtcatttcgggacggacgaccgattcagaatggactcaagatttttagaaacagatagtgaggaagagcaggaggaagttaacgaaaagaaaacggcggaggaggaggagctcgccgaagagaagaagaaggccttgaatgtggtgcaaagcgtactccagattaaccttagcaatagcaccaaccggggtagcgtggcggctaaaaaattcaaagatattattcactacgatcccacaaagcaggatcacgccacgtacgagcgcaagagggacgataagcctaaggagtctaaggccaagaggaaaaagaaaagagaggaggcagaaaagttgccagaggtgtctaaagagatgtactacaatattgccatggacctgaaggagatttttcagactactaaatatacttcagagaaggaggaagggaccccttggaatgaggactgcggtaaagagaagccggaggaaattcaggaccctgccgcactcacctccgatgccgaacagcctagtggttttactttttctttcttcgattcagacaccaaagatatcaaagaggagacataccgtgttgagacggtcaagccaggtaagatcgtttggcaagaggacccacgccttcaagactcttcatccgaggaggaagacgtgacagaggaaacggaccacagaaatagcagccctggagaggccagcctcttggagaaagagacgactcgattcttcttttttagtaagaatgacgaaaggctgcaggggtccgacctattttggcggggagtggggtccaacatgtcgcggaactcttgggaggcccgaacaacaaatctcagaatggactgtaggaaaaagcataaagacgctaagcgcaaaatgaagcctaagtag

SEQ ID NO: 195880 - DNA, 3300 bp, Artificial Sequence
  derived and/or modified sequence
atgagcgtgctgaacaagaccaagtggaagggcggcaccctgcagatccagctggccaaggagagcttcctgcacagactggcccaggagagagaggccgccaaggccaagaaggaggagagcaccaccggcaacgccaacctgctggagaagaccggcggcgtggacttccacatgaaggccgtgcccggcaccgaggtgcccggccacaagaactgggtggtgagcaagttcggcagagtgctgcccgtgctgcacctgaagaaccagcacaagagaaagatcatcaagtacgaccccagcaagtactgccacaacctgaagaagatcggcgaggacttcagcaacaccatccccatcagcagcctgacctgggagctggagggcggcaacgaccccatgagcaagaagagaagaggcgagttcagcgacttccacggcccccccaagaagatcatcaaggtgcagaaggacgagagcagcaccggcagcctggccatgagcaccagacccagaagagtgatcgagagaccccccctgacccagcagcaggccgcccagaagagaacctgcgacagcatcacccccagcaagagcagccccgtgcccgtgagcgacacccagaagctgaagaacctgcccttcaagaccagcggcctggagaccgccaagaagagaaacagcatcagcgacgacgacaccgacagcgaggacgagctgagaatgatgatcgccaaggaggagaacctgcagagaaccacccagcccagcatcaacgagagcgagagcgaccccttcgaggtggtgagagacgacttcaagagcggcgtgcacaagctgcacagcctgatcggcctgggcatcaagaacagagtgagctgccacgacagcgacgacgacatcatgagaaacgacagagagtacgacagcggcgacaccgacgagatcatcgccatgaagaagaacgtggccaaggtgaagaacagcaccgagttcagccagatggagaagagcaccaagaagaccagcttcaagaacagagagaactgcgagctgagcgaccactgcatcaagctgcagaagagaaagagcaacgtggagagcgccctgagccacggcctgaagagcctgaacagaaagagccccagccacagcagcagcagcgaggacgccgacagcgccagcgagctggccgacagcgagggcggcgaggagtacaacgccatgatgaagaactgcctgagagtgaacctgaccctggccgacctggagcagctggccggcagcgacctgaaggtgcccaacgaggacaccaagagcgacggccccgagaccaccacccagtgcaagttcgacagaggcagcaagagccccaagacccccaccggcctgagaagaggcagacagtgcatcagacccgccgagatcgtggccagcctgctggagggcgaggagaacacctgcggcaagcagaagcccaaggagaacaacctgaagcccaagttccaggccttcaagggcgtgggctgcctgtacgagaaggagagcatgaagaagagcctgaaggacagcgtggccagcaacaacaaggaccagaacagcatgaagcacgaggaccccagcatcatcagcatggaggacggcagcccctacgtgaacggcagcctgggcgaggtgaccccctgccagcacgccaagaaggccaacggccccaactacatccagccccagaagagacagaccaccttcgagagccaggacagaaaggccgtgagccccagcagcagcgagaagagaagcaagaaccccatcagcagacccctggagggcaagaagagcctgagcctgagcgccaagacccacaacatcggcttcgacaaggacagctgccacagcaccaccaagaccgaggccagccaggaggagagaagcgacagcagcggcctgaccagcctgaagaagagccccaaggtgagcagcaaggacaccagagagatcaagaccgacttcagcctgagcatcagcaacagcagcgacgtgagcgccaaggacaagcacgccgaggacaacgagaagagactggccgccctggaggccagacagaaggccaaggaggtgcagaagaagctggtgcacaacgccctggccaacctggacggccaccccgaggacaagcccacccacatcatcttcggcagcgacagcgagtgcgagaccgaggagaccagcacccaggagcagagccaccccggcgaggagtgggtgaaggagagcatgggcaagaccagcggcaagctgttcgacagcagcgacgacgacgagagcgacagcgaggacgacagcaacagattcaagatcaagccccagttcgagggcagagccggccagaagctgatggacctgcagagccacttcggcaccgacgacagattcagaatggacagcagattcctggagaccgacagcgaggaggagcaggaggaggtgaacgagaagaagaccgccgaggaggaggagctggccgaggagaagaagaaggccctgaacgtggtgcagagcgtgctgcagatcaacctgagcaacagcaccaacagaggcagcgtggccgccaagaagttcaaggacatcatccactacgaccccaccaagcaggaccacgccacctacgagagaaagagagacgacaagcccaaggagagcaaggccaagagaaagaagaagagagaggaggccgagaagctgcccgaggtgagcaaggagatgtactacaacatcgccatggacctgaaggagatcttccagaccaccaagtacaccagcgagaaggaggagggcaccccctggaacgaggactgcggcaaggagaagcccgaggagatccaggaccccgccgccctgaccagcgacgccgagcagcccagcggcttcaccttcagcttcttcgacagcgacaccaaggacatcaaggaggagacctacagagtggagaccgtgaagcccggcaagatcgtgtggcaggaggaccccagactgcaggacagcagcagcgaggaggaggacgtgaccgaggagaccgaccacagaaacagcagccccggcgaggccagcctgctggagaaggagaccaccagattcttcttcttcagcaagaacgacgagagactgcagggcagcgacctgttctggagaggcgtgggcagcaacatgagcagaaacagctgggaggccagaaccaccaacctgagaatggactgcagaaagaagcacaaggacgccaagagaaagatgaagcccaagtag

SEQ ID NO: 195881 - DNA, 2913 bp, Artificial Sequence
  derived and/or modified sequence
atgaaggtgaacagagagaccaagagactgtacgtgggcggcctgagccaggacatcagcgaggccgacctgcagaaccagttcagcagattcggcgaggtgagcgacgtggagatcatcaccagaaaggacgaccagggcaacccccagaaggtgttcgcctacatcaacatcagcgtggccgaggccgacctgaagaagtgcatgagcgtgctgaacaagaccaagtggaagggcggcaccctgcagatccagctggccaaggagagcttcctgcacagactggcccaggagagagaggccgccaaggccaagaaggaggagagcaccaccggcaacgccaacctgctggagaagaccggcggcgtggacttccacatgaaggccgtgcccggcaccgaggtgcccggccacaagaactgggtggtgagcaagttcggcagagtgctgcccgtgctgcacctgaagaaccagcacaagagaaagatcatcaagtacgaccccagcaagtactgccacaacctgaagaagatcggcgaggacttcagcaacaccatccccatcagcagcctgacctgggagctggagggcggcaacgaccccatgagcaagaagagaagaggcgagttcagcgacttccacggcccccccaagaagatcatcaaggtgcagaaggacgagagcagcaccggcagcctggccatgagcaccagacccagaagagtgatcgagagaccccccctgacccagcagcaggccgcccagaagagaacctgcgacagcatcacccccagcaagagcagccccgtgcccgtgagcgacacccagaagctgaagaacctgcccttcaagaccagcggcctggagaccgccaagaagagaaacagcatcagcgacgacgacaccgacagcgaggacgagctgagaatgatgatcgccaaggaggagaacctgcagagaaccacccagcccagcatcaacgagagcgagagcgaccccttcgaggtggtgagagacgacttcaagagcggcgtgcacaagctgcacagcctgatcggcctgggcatcaagaacagagtgagctgccacgacagcgacgacgacatcatgagaaacgacagagagtacgacagcggcgacaccgacgagatcatcgccatgaagaagaacgtggccaaggtgaagaacagcaccgagttcagccagatggagaagagcaccaagaagaccagcttcaagaacagagagaactgcgagctgagcgaccactgcatcaagctgcagaagagaaagagcaacgtggagagcgccctgagccacggcctgaagagcctgaacagaaagagccccagccacagcagcagcagcgaggacgccgacagcgccagcgagctggccgacagcgagggcggcgaggagtacaacgccatgatgaagaactgcctgagagtgaacctgaccctggccgacctggagcagctggccggcagcgacctgaaggtgcccaacgaggacaccaagagcgacggccccgagaccaccacccagtgcaagttcgacagaggcagcaagagccccaagacccccaccggcctgagaagaggcagacagtgcatcagacccgccgagatcgtggccagcctgctggagggcgaggagaacacctgcggcaagcagaagcccaaggagaacaacctgaagcccaagttccaggccttcaagggcgtgggctgcctgtacgagaaggagagcatgaagaagagcctgaaggacagcgtggccagcaacaacaaggaccagaacagcatgaagcacgaggaccccagcatcatcagcatggaggacggcagcccctacgtgaacggcagcctgggcgaggtgaccccctgccagcacgccaagaaggccaacggccccaactacatccagccccagaagagacagaccaccttcgagagccaggacagaaaggccgtgagccccagcagcagcgagaagagaagcaagaaccccatcagcagacccctggagggcaagaagagcctgagcctgagcgccaagacccacaacatcggcttcgacaaggacagctgccacagcaccaccaagaccgaggccagccaggaggagagaagcgacagcagcggcctgaccagcctgaagaagagccccaaggtgagcagcaaggacaccagagagatcaagaccgacttcagcctgagcatcagcaacagcagcgacgtgagcgccaaggacaagcacgccgaggacaacgagaagagactggccgccctggaggccagacagaaggccaaggaggtgcagaagaagctggtgcacaacgccctggccaacctggacggccaccccgaggacaagcccacccacatcatcttcggcagcgacagcgagtgcgagaccgaggagaccagcacccaggagcagagccaccccggcgaggagtgggtgaaggagagcatgggcaagaccagcggcaagctgttcgacagcagcgacgacgacgagagcgacagcgaggacgacagcaacagattcaagatcaagccccagttcgagggcagagccggccagaagctgatggacctgcagagccacttcggcaccgacgacagattcagaatggacagcagattcctggagaccgacagcgaggaggagcaggaggaggtgaacgagaagaagaccgccgaggaggaggagctggccgaggagaagaagaaggccctgaacgtggtgcagagcgtgctgcagatcaacctgagcaacagcaccaacagaggcagcgtggccgccaagaagttcaaggacatcatccactacgaccccaccaagcaggaccacgccacctacgagagaaagagagacgacaagcccaaggagagcaaggcctag

SEQ ID NO: 195882 - DNA, 3504 bp, Artificial Sequence
  derived and/or modified sequence
atgaaggtgaacagagagaccaagagactgtacgtgggcggcctgagccaggacatcagcgaggccgacctgcagaaccagttcagcagattcggcgaggtgagcgacgtggagatcatcaccagaaaggacgaccagggcaacccccagaaggtgttcgcctacatcaacatcagcgtggccgaggccgacctgaagaagtgcatgagcgtgctgaacaagaccaagtggaagggcggcaccctgcagatccagctggccaaggagagcttcctgcacagactggcccaggagagagaggccgccaaggccaagaaggaggagagcaccaccggcaacgccaacctgctggagaagaccggcggcgtggacttccacatgaaggccgtgcccggcaccgaggtgcccggccacaagaactgggtggtgagcaagttcggcagagtgctgcccgtgctgcacctgaagaaccagcacaagagaaagatcatcaagtacgaccccagcaagtactgccacaacctgaagaagatcggcgaggacttcagcaacaccatccccatcagcagcctgacctgggagctggagggcggcaacgaccccatgagcaagaagagaagaggcgagttcagcgacttccacggcccccccaagaagatcatcaaggtgcagaaggacgagagcagcaccggcagcctggccatgagcaccagacccagaagagtgatcgagagaccccccctgacccagcagcaggccgcccagaagagaacctgcgacagcatcacccccagcaagagcagccccgtgcccgtgagcgacacccagaagctgaagaacctgcccttcaagaccagcggcctggagaccgccaagaagagaaacagcatcagcgacgacgacaccgacagcgaggacgagctgagaatgatgatcgccaaggaggagaacctgcagagaaccacccagcccagcatcaacgagagcgagagcgaccccttcgaggtggtgagagacgacttcaagagcggcgtgcacaagctgcacagcctgatcggcctgggcatcaagaacagagtgagctgccacgacagcgacgacgacatcatgagaaacgacagagagtacgacagcggcgacaccgacgagatcatcgccatgaagaagaacgtggccaaggtgaagaacagcaccgagttcagccagatggagaagagcaccaagaagaccagcttcaagaacagagagaactgcgagctgagcgaccactgcatcaagctgcagaagagaaagagcaacgtggagagcgccctgagccacggcctgaagagcctgaacagaaagagccccagccacagcagcagcagcgaggacgccgacagcgccagcgagctggccgacagcgagggcggcgaggagtacaacgccatgatgaagaactgcctgagagtgaacctgaccctggccgacctggagcagctggccggcagcgacctgaaggtgcccaacgaggacaccaagagcgacggccccgagaccaccacccagtgcaagttcgacagaggcagcaagagccccaagacccccaccggcctgagaagaggcagacagtgcatcagacccgccgagatcgtggccagcctgctggagggcgaggagaacacctgcggcaagcagaagcccaaggagaacaacctgaagcccaagttccaggccttcaagggcgtgggctgcctgtacgagaaggagagcatgaagaagagcctgaaggacagcgtggccagcaacaacaaggaccagaacagcatgaagcacgaggaccccagcatcatcagcatggaggacggcagcccctacgtgaacggcagcctgggcgaggtgaccccctgccagcacgccaagaaggccaacggccccaactacatccagccccagaagagacagaccaccttcgagagccaggacagaaaggccgtgagccccagcagcagcgagaagagaagcaagaaccccatcagcagacccctggagggcaagaagagcctgagcctgagcgccaagacccacaacatcggcttcgacaaggacagctgccacagcaccaccaagaccgaggccagccaggaggagagaagcgacagcagcggcctgaccagcctgaagaagagccccaaggtgagcagcaaggacaccagagagatcaagaccgacttcagcctgagcatcagcaacagcagcgacgtgagcgccaaggacaagcacgccgaggacaacgagaagagactggccgccctggaggccagacagaaggccaaggaggtgcagaagaagctggtgcacaacgccctggccaacctggacggccaccccgaggacaagcccacccacatcatcttcggcagcgacagcgagtgcgagaccgaggagaccagcacccaggagcagagccaccccggcgaggagtgggtgaaggagagcatgggcaagaccagcggcaagctgttcgacagcagcgacgacgacgagagcgacagcgaggacgacagcaacagattcaagatcaagccccagttcgagggcagagccggccagaagctgatggacctgcagagccacttcggcaccgacgacagattcagaatggacagcagattcctggagaccgacagcgaggaggagcaggaggaggtgaacgagaagaagaccgccgaggaggaggagctggccgaggagaagaagaaggccctgaacgtggtgcagagcgtgctgcagatcaacctgagcaacagcaccaacagaggcagcgtggccgccaagaagttcaaggacatcatccactacgaccccaccaagcaggaccacgccacctacgagagaaagagagacgacaagcccaaggagagcaaggccaagagaaagaagaagagagaggaggccgagaagctgcccgaggtgagcaaggagatgtactacaacatcgccatggacctgaaggagatcttccagaccaccaagtacaccagcgagaaggaggagggcaccccctggaacgaggactgcggcaaggagaagcccgaggagatccaggaccccgccgccctgaccagcgacgccgagcagcccagcggcttcaccttcagcttcttcgacagcgacaccaaggacatcaaggaggagacctacagagtggagaccgtgaagcccggcaagatcgtgtggcaggaggaccccagactgcaggacagcagcagcgaggaggaggacgtgaccgaggagaccgaccacagaaacagcagccccggcgaggccagcctgctggagaaggagaccaccagattcttcttcttcagcaagaacgacgagagactgcagggcagcgacctgttctggagaggcgtgggcagcaacatgagcagaaacagctgggaggccagaaccaccaacctgagaatggactgcagaaagaagcacaaggacgccaagagaaagatgaagcccaagtag

SEQ ID NO: 195883 - protein, 478 aa, Artificial Sequence
  derived and/or modified sequence
MAEPGGAAGRSHPEDGSASEGEKEGNNESHMVSPPEKDDGQKGEEAVGSTEHPEEVTTQAEAAIEEGEVETEGEAAVEGEEEAVSYGDAESEEEYYYTETSSPEGQISAADTTYPYFSPPQELPGEEAYDSVSGEAGLQGFQQEATGPPESRERRVTSPEPSHGVLGPSEQMGQVTSGPAVGRLTGSTEEPQGQVLPMGVQHRFRLSHGSDIESSDLEEFVSQEPVIPPGVPDAHPREGDLPVFQDQIQQPSTEEGAMAERVESEGSDEEAEDEGSQLVVLDPDHPLMVRFQAALKNYLNRQIEKLKLDLQELVVATKQSRAQRQELGVNLYEVQQHLVHLQKLLEKSHDRHAMASSERRQKEEELQAARALYTKTCAAANEERKKLAALQTEMENLALHLFYMQNIDQDMRDDIRVMTQVVKKAETERIRAEIEKKKQGVGDTGAAFIPKTTQGDQVSGRGKKKPGTVVARVSPAEL

SEQ ID NO: 195884 - protein, 1142 aa, Artificial Sequence
  derived and/or modified sequence
MAEPGGAAGRSHPEDGSASEGEKEGNNESHMVSPPEKDDGQKGEEAVGSTEHPEEVTTQAEAAIEEGEVETEGEAAVEGEEEAVSYGDAESEEEYYYTETSSPEGQISAADTTYPYFSPPQELPGEEAYDSVSGEAGLQGFQQEATGPPESRERRVTSPEPSHGVLGPSEQMGQVTSGPAVGRLTGSTEEPQGQVLPMGVQHRFRLSHGSDIESSDLEEFVSQEPVIPPGVPDAHPREGDLPVFQDQIQQPSTEEGAMAERVESEGSDEEAEDEGSQLVVLDPDHPLMVRFQAALKNYLNRQIEKLKLDLQELVVATKQSRAQRQELGVNLYEVQQHLVHLQKLLEKSHDRHAMASSERRQKEEELQAARALYTKTCAAANEERKKLAALQTEMENLALHLFYMQNIDQDMRDDIRVMTQVVKKAETERIRAEIEKKKQDLYVDQLTTRAQQLEEDIALFEAQYLAQAEDTRILRKAVSEACTEIDAISVEKRRIMQQWASSLVGMKHRDEAHRAVLEALRGCQHQAKSTDGEIEAYKKSIMKEEEKNEKLASILNRTETEATLLQKLTTQCLTKQVALQSQFNTYRLTLQDTEDALSQDQLEQMILTEELQAIRQAIQGELELRRKTDAAIREKLQEHMTSNKTTKYFNQLILRLQKEKTNMMTHLSKINGDIAQTTLDITHTSSRLDAHQKTLVELDQDVKKVNELITNSQSEISRRTILIERKQGLINFLNKQLERMVSELGGEEVGPLELEIKRLSKLIDEHDGKAVQAQVTWLRLQQEMVKVTQEQEEQLASLDASKKELHIMEQKKLRVESKIEQEKKEQKEIEHHMKDLDNDLKKLNMLMNKNRCSSEELEQNNRVTENEFVRSLKASERETIKMQDKLNQLSEEKATLLNQLVEAEHQIMLWEKKIQLAKEMRSSVDSEIGQTEIRAMKGEIHRMKVRLGQLLKQQEKMIRAMELAVARRETVTTQAEGQRKMDRKALTRTDFHHKQLELRRKIRDVRKATDECTKTVLELEETQRNVSSSLLEKQEKLSVIQADFDTLEADLTRLGALKRQNLSEIVALQTRLKHLQAVKEGRYVFLFRSKQSLVLERQRLDKRLALIATILDRVRDEYPQFQEALHKVSQMIANKLESPGPS

SEQ ID NO: 195885 - DNA, 3429 bp, Artificial Sequence
  derived and/or modified sequence
atggccgaacctggaggcgccgccggacgctctcacccagaggacggcagtgccagcgaaggcgaaaaggaaggcaacaatgagagtcatatggtgtccccacccgagaaagatgacggccaaaagggtgaggaggcggttggttccacggagcaccccgaggaggttacaacacaggcagaggctgctatcgaagaaggagaggtggagacagaaggtgaagcagctgtcgagggggaggaagaagctgtcagctatggcgatgccgagagcgaggaggaatactattacacggaaacatcaagtcctgaaggccagatttcagccgcagacactacctatccttacttttctccgccacaggagctgcctggagaggaagcctatgacagtgttagcggtgaggctggtctccagggtttccagcaggaggcaacaggtccacccgagagccgggaacgccgggtcacctcaccagagccttcacatggcgttctggggcccagcgagcagatgggccaggtcaccagtggacctgctgttggaagactgaccggctctactgaagaaccccagggtcaagtcctgccaatgggagtccagcaccggttccgcctgtcacacggctcggacattgaatcttctgatctagaggagttcgtgagtcaagaacctgtcatcccaccgggggtgcccgacgcccacccacgggagggggacctgccagtctttcaggaccagatccagcagccatcgacagaagaaggggctatggccgaaagggtggagtcagaaggttcggacgaagaagccgaagatgaggggagccaactcgttgtgctggaccccgaccatccactgatggttcggttccaggccgcactgaagaattacctgaaccgacagattgagaaactaaaactcgatctgcaggaactcgtcgtcgctacaaaacagtccagagcccagagacaggagctgggcgtgaacctttatgaagttcagcaacatctggtacatcttcagaaactccttgaaaagagccacgacaggcacgcaatggcgtccagcgaacggcgccaaaaagaggaggagctgcaggcagctcgggctctatacaccaaaacgtgtgctgcagcgaatgaggagcgtaagaaactggcagctttgcagacagaaatggaaaacctggccttgcatctgttttacatgcaaaacatcgatcaggacatgagggatgacatccgggtgatgactcaagtggtcaagaaggcggaaacggagagaatccgagctgaaatcgagaagaaaaagcaggacttatacgtagatcagctgaccacacgggcacagcagctcgaggaggacatcgctttgttcgaggcccaatatcttgcccaggccgaagatactcgtattcttcggaaggctgtctcagaagcttgtaccgaaatcgacgcgatatccgtcgagaaaaggaggatcatgcagcagtgggcctcatctctagtgggtatgaagcaccgggatgaggctcaccgcgctgttcttgaagctctgagaggatgtcagcaccaggcgaaaagtaccgacggggaaatcgaagcctacaaaaaatccattatgaaggaggaggagaaaaatgaaaagctcgcaagcattctgaacagaactgaaacagaggctaccctgctgcagaaactaacaacccagtgtctgacaaaacaggtggctctgcaatcccagtttaacacttaccgcttgacattgcaggatacagaagatgccctgtcccaggaccagctagaacagatgattcttaccgaggagttacaggctataagacaggcaatccaaggagagctagagctgagacgcaaaacagacgccgcaatccgtgagaaactgcaggaacatatgacttccaataagacgaccaagtattttaatcagcttattctgagacttcagaaagaaaaaaccaatatgatgacccatctgagcaagattaatggcgacatagcacagaccaccttggacataacccataccagtagtcgcctcgacgcgcatcagaagaccttggtcgaacttgaccaggatgttaagaaggtgaatgaactcatcactaattcccagtctgagatcagcagaagaactatactgatagaaaggaaacaggggctgattaactttctgaataaacaattagaacgcatggtctctgagctggggggagaagaagtggggcctctggagcttgagattaaacgtctctccaaacttattgatgaacatgatggaaaggccgtgcaagctcaggtcacctggctaaggttacagcaggaaatggtaaaagtaacccaggaacaggaggagcaactggccagtttggacgcatccaaaaaagaattgcacatcatggagcagaagaagttgagggtggagtcaaaaattgagcaggagaaaaaggaacagaaggaaatcgaacaccatatgaaagatctggacaatgaccttaagaaactcaacatgctgatgaacaaaaaccgctgtagctccgaagagttggagcagaacaaccgagtgactgagaatgagtttgtacgcagcctcaaggctagcgaacgcgagacaatcaagatgcaagataagctgaatcagctgtctgaggaaaaggctacattacttaatcagttggtcgaagctgagcatcaaatcatgctgtgggaaaagaaaattcagctcgcaaaggagatgcgaagtagcgtcgattctgaaatcggtcagacagaaatccgcgccatgaaaggcgagatccatcggatgaaggtgcgtctcggtcaactactgaaacaacaagagaaaatgatccgggccatggaactggccgttgcccgccgcgagaccgtgacaactcaggcggagggccaacgaaaaatggaccgcaaagcactcacacgcaccgactttcatcataagcagctcgaactgcgaaggaagattcgagatgtgaggaaagccacagatgagtgtactaagacggtgctggagctcgaagagacacagaggaacgtctcatcctcattgctggaaaaacaggaaaagctctctgtcatccaggccgacttcgatacccttgaagccgacctgactcgtctcggggccctgaagcggcagaacctgagcgaaatagtcgctcttcagacccgactgaagcacttgcaggccgttaaggaaggccgttacgtgtttctgttccgatccaagcaatctctggtcctggagcgacagcgtctggataaacgtcttgccctcattgctaccatcttggatcgcgttagagacgaatatcctcagttccaggaggccctgcataaagtgtcacagatgatcgccaacaagctggaatctcccggcccgtcttag

SEQ ID NO: 195886 - DNA, 3429 bp, Artificial Sequence
  derived and/or modified sequence
atggccgagcccggcggggccgccggccgcagccacccagaagatggcagcgccagcgagggggagaaggagggcaacaatgaaagccacatggtgagccccccagagaaggatgatggccagaagggggaggaggccgtgggcagcacagagcaccctgaggaggtgaccacccaggccgaggccgccatcgaggagggggaggtggagacagaaggagaggccgctgtggagggggaggaggaggccgtgtcctatggagatgctgagagcgaggaggagtactactacacagagaccagcagccctgagggccagatctctgctgctgacaccacctacccctacttcagccccccccaggagctgcccggggaggaggcctatgattctgtgtctggagaggccggcctgcagggcttccagcaggaggccaccggccccccagagagccgggagcggcgggtgaccagccctgagcccagccatggagtgctgggccccagcgagcagatgggccaggtgaccagcggccctgctgtgggccgcctgaccggcagcacagaggagccccagggccaggtgctgcccatgggcgtgcagcaccgcttccggctgagccacggcagtgacatcgagagcagtgacctggaggagtttgtgtcccaggagcctgtgatccccccaggagtgcctgatgcccacccccgggagggggacctgcccgtcttccaggaccagatccagcagcccagcacagaggagggcgccatggccgagcgggtggagagcgagggcagtgatgaggaggccgaggatgagggcagccagctggtggtgctggaccctgaccaccccctgatggtgcgcttccaggccgccctgaagaactacctgaaccggcagatcgagaagctgaagctggacctgcaggagctggtggtggccaccaagcagagccgggcccagaggcaggagctgggcgtgaacctgtatgaggtgcagcagcacctggtgcacctgcagaagctgctggagaagagccatgacagacatgccatggccagcagcgagcggcggcagaaggaggaggagctgcaggccgcccgggccctgtacaccaagacctgtgccgccgccaatgaggagaggaagaagctggccgccctgcagacagagatggagaacctggccctgcacctgttctacatgcagaacatcgaccaggacatgagagatgacatccgggtgatgacccaggtggtgaagaaggccgagacagagcgcatccgggcagaaattgagaagaagaagcaggacctgtatgtggaccagctgaccacccgggcccagcagctggaggaggacatcgccctgtttgaggcccagtacctggcccaggccgaggacacccgcatcctgaggaaggctgtgtctgaggcctgcacagaaattgatgccatctctgtggagaagaggcgcatcatgcagcagtgggccagcagcctggtgggcatgaagcacagagatgaggcccacagagctgtgctggaggccctgcggggctgccagcaccaggccaagagcacagatggagaaattgaggcctacaagaagagcatcatgaaggaggaggagaagaatgagaagctggccagcatcctgaacagaacagaaacagaggccaccctgctgcagaagctgaccacccagtgcctgaccaagcaggtggccctgcagagccagttcaacacctaccgcctgaccctgcaggacacagaagatgccctgagccaggaccagctggagcagatgatcctgacagaggagctgcaggccatccggcaggccatccagggcgagctggagctgcggaggaagacagatgctgccatccgggagaagctgcaggagcacatgaccagcaacaagaccaccaagtacttcaaccagctgatcctgcggctgcagaaggagaagaccaacatgatgacccacctgagcaagatcaatggagacatcgcccagaccaccctggacatcacccacaccagcagccggctggatgcccaccagaagaccctggtggagctggaccaggatgtgaagaaggtgaatgagctgatcaccaacagccagagcgagatcagcaggaggaccatcctgattgaaaggaagcagggcctcatcaacttcctgaacaagcagctggagaggatggtgtctgagctgggcggggaggaggtgggccccctggagctggagatcaagaggctgagcaagctgattgatgaacatgatggcaaggctgtgcaggcccaggtgacctggctgcggctgcagcaggagatggtgaaggtgacccaggagcaggaggagcagctggccagcctggatgccagcaagaaggagctgcacatcatggagcagaagaagctgcgggtggagagcaagattgagcaggagaagaaggagcagaaggagattgagcaccacatgaaggacctggacaatgacctgaagaagctgaacatgctgatgaacaagaaccgctgcagcagcgaggagctggagcagaacaacagagtgacagaaaatgaatttgtgcgcagcctgaaggccagcgagcgggagaccatcaagatgcaggacaagctgaaccagctgtctgaggagaaggccaccctgctgaaccagctggtggaggccgagcaccagatcatgctgtgggagaagaagatccagctggccaaggagatgaggagctctgtggacagcgagatcggccagacagagatccgggccatgaagggggagatccacaggatgaaggtgcggctgggccagctgctgaagcagcaggagaagatgatccgggccatggagctggccgtggcccggcgggagaccgtgaccacccaggccgagggccagaggaagatggacaggaaggccctgaccaggacagacttccaccacaagcagctggagctgcggaggaagatcagagatgtgaggaaggccacagatgaatgtaccaagacagtgctggagctggaggagacccagagaaatgtgagcagcagcctgctggagaagcaggagaagctgagcgtcatccaggccgactttgacaccctggaggccgacctgacccggctgggcgccctgaagaggcagaacctgtctgaaattgtggccctgcagacccggctgaagcacctgcaggccgtgaaggagggccgctacgtgttcctgttccgcagcaagcagagcctggtgctggagcggcagaggctggacaagaggctggccctgattgccaccatcctggacagagtgagagatgagtacccccagttccaggaggccctgcacaaggtgtcccagatgattgccaacaagctggagagccctggccccagctag

SEQ ID NO: 195887 - DNA, 3429 bp, Artificial Sequence
  derived and/or modified sequence
atggccgagcccggcggcgccgccggccggagccaccccgaggacggcagcgccagcgagggggagaaggaaggaaacaatgaaagtcatatggtaagtcctcccgagaaggacgacggccagaagggggaggaggcagtgggctctaccgagcacccagaggaggtcactacgcaggccgaagccgccattgaagaaggcgaagtggagactgagggcgaggcagcggtggagggcgaagaagaagccgtgagttatggcgacgctgagagcgaagaagagtactactatactgaaacatcctctcctgagggccagatcagcgcagccgacacaacttacccttatttctctccacctcaggagctccccggtgaagaggcttatgattcagtgagcggtgaggccggattgcagggttttcagcaagaggccaccggtccgcccgagtctagggaaagaagagttacaagtccagagccatcccatggtgtgctgggacccagcgaacaaatgggacaggtgacaagcggacccgcggtgggccggctcactggctcaaccgaagaacctcaggggcaggtcttgccaatgggagttcagcatagatttaggctctcgcacggttctgatatcgagagtagtgaccttgaagagttcgtatcgcaggaacctgtgatcccccctggcgtgccagacgcacacccccgcgaaggggacctccccgtctttcaggatcagatccagcagcccagtaccgaagaaggcgcgatggccgagcgagttgagtcagagggcagtgatgaagaagccgaagacgaggggtcgcaactggtcgtactggatccagaccacccactcatggtgcgtttccaggccgcattgaagaattacctcaatcgacagatcgagaaactgaagttggacctgcaagaactcgtcgtggccacaaaacagtcacgggctcaacggcaggagttgggcgtaaatctttacgaagtacagcagcatctagtccatctacagaagctccttgaaaaaagccacgaccgtcacgccatggccagcagtgaaaggcgtcagaaggaagaggaattacaagccgctagggcactgtacaccaagacatgtgctgcagccaacgaggagcgcaaaaagctggctgccctgcaaaccgagatggagaacttggcactgcatcttttctatatgcaaaacatcgaccaagacatgcgggacgacatacgcgtgatgacccaggtcgtcaaaaaggctgaaacggaacgaatccgcgcggaaatcgagaagaaaaaacaggacctgtacgttgaccaactcaccacccgtgcccagcagctggaggaagatattgcattattcgaagctcagtatctcgcacaagccgaggatacgagaatattaaggaaagcagtcagcgaggcatgcacagagatagacgcaatctctgtcgaaaaaagacgaattatgcagcagtgggctagctcactcgtcggtatgaagcaccgtgacgaggcacaccgggctgtcctcgaggcccttcgtggctgccagcatcaggccaagagtaccgacggtgagattgaagcctataaaaaatctattatgaaagaagaggaaaagaacgagaagctcgccagtattctgaacagaacagagaccgaagccacccttctgcaaaagttgacaacacagtgcctcactaagcaggtggccctgcagagtcagttcaacacctaccggttgactctgcaggatactgaggatgccctgtcacaggatcaactcgagcaaatgatactaactgaggaactgcaggctatacgccaggctattcaaggcgagcttgagctgagaagaaaaacagacgctgccatcagagagaaattgcaggagcacatgacctctaacaagacaaccaaatacttcaaccagcttattctgcgcctgcagaaggagaagaccaacatgatgactcaccttagtaagatcaatggtgatatcgcccaaacgactctggacataacacatacctcgtcacgtcttgacgcccaccaaaagacactggtagagctggaccaagacgtcaaaaaagtgaatgaactcattaccaattcgcagtccgagatttctagacgcacaatcctgattgagagaaagcagggactgattaactttctgaacaagcagctggaacgtatggtgtccgagctgggcggagaggaagttggtccactcgaactggaaatcaaaagattgagcaaactgatcgacgaacacgacggtaaagctgtacaagctcaggtaacttggctgaggctgcagcaggagatggttaaagtgacgcaggaacaagaagagcagctcgctagtctggatgcatctaagaaggagctccatattatggagcagaaaaaactgcgcgtggagagcaagattgagcaggagaaaaaggaacagaaggaaattgaacaccatatgaaagatcttgacaatgacctgaaaaaattaaatatgctcatgaataagaaccgatgctcttccgaagagctcgagcagaacaaccgtgtgacggaaaatgagttcgtcaggagtcttaaggcgtccgaaagagagactataaaaatgcaggacaaattaaaccaactttcagaggaaaaagcaaccctgttgaatcagctggtcgaagcggaacaccaaatcatgctctgggaaaaaaagatccaactagcaaaggaaatgagatcctcggtcgatagcgaaatcggacagactgagattagagccatgaaaggagaaatacaccgcatgaaggttcgcctggggcaactgctaaagcagcaggagaagatgatccgagccatggagctagctgtcgccagacgggaaaccgtgactacccaggccgaagggcagagaaaaatggatagaaaggctctgacacgcaccgatttccaccacaagcagctagagctgcggcggaaaattcgcgatgtacggaaggcgaccgatgaatgcaccaagaccgtactcgagttggaggaaacacagagaaacgtgagctcttcgctgttagaaaagcaggagaaactctccgtgatccaagcagatttcgacactctggaagccgatctgacacgcctgggggccctgaaacgacagaacctctctgagatcgttgccctccagacacgattgaaacacttacaggcagtgaaggaggggagatacgtatttcttttcagaagcaagcaatcccttgtgctcgaaaggcagcgccttgataagagactagccctgatcgctacaatcctggatagagttagagatgaatatccgcaattccaggaagcacttcataaagtgtcccagatgattgcgaacaagctggaatcgcctggtccatcatag

SEQ ID NO: 195888 - DNA, 3429 bp, Artificial Sequence
  derived and/or modified sequence
atggccgagcccggaggtgccgctggcaggagtcatccagaggacggatctgcatctgagggcgaaaaagaaggaaataatgagagtcatatggtcagccctccagaaaaagatgatggacagaaaggcgaggaggccgtgggctccacagagcaccccgaggaggtcaccactcaggccgaagcagcaattgaggaaggagaagtggaaaccgaaggcgaagctgccgtcgagggagaagaggaggcggtgagttatggcgatgctgagagcgaggaagagtattattatactgagaccagcagccctgagggccaaatctctgcagcagacacgacgtatccctacttctctccaccgcaggaattgcccggtgaggaagcatacgacagtgtgtcaggcgaggcaggcttgcagggttttcagcaggaggcaaccggccctcccgagagcagagaaagaagagttacatcgcccgagcccagtcacggagtcttaggacccagcgagcagatggggcaggtaaccagtggaccagccgtgggcaggctgacaggctctacggaagaacctcagggacaggttctgccaatgggggtgcaacacagattcaggttaagtcacggctcagatatcgaatcaagcgacctggaagaattcgttagccaagaacctgtcatccccccaggtgtgcccgacgcccatccaagggaaggcgatctgcctgtgtttcaggaccagatccagcagccatccacggaagaaggcgctatggcagagcgtgtggagtccgagggctccgatgaggaagcagaggatgaggggtcccagctggtcgttcttgaccccgaccatccacttatggttcggttccaggccgcattgaagaattacctcaaccgacagatagagaaacttaaactggaccttcaagaactcgttgttgccacaaagcagtccagagcgcagcgtcaggaactgggggtgaatctgtatgaggtacagcagcatttagtgcaccttcaaaagctgctcgagaaaagccacgaccggcacgctatggctagttcggaacgacgccagaaggaggaggagctgcaggcggcaagagccctctacactaagacctgcgcggctgccaacgaagaacgcaagaaactagcagcactgcaaaccgaaatggagaaccttgcccttcatctgttctatatgcagaacattgaccaagatatgcgggatgatatacgcgtgatgacgcaggttgtcaagaaggccgaaaccgagagaatcagagcagaaatcgagaagaaaaagcaggacctatacgttgaccagctgaccacacgggctcaacaactggaagaggatatcgcccttttcgaggctcagtatttagcacaggctgaggacacacgcattctgcgaaaggccgttagtgaggcctgcacggaaatcgatgctatctcggtcgaaaaaagaagaatcatgcagcagtgggcttcttcactggtcggcatgaagcaccgggacgaagctcacagagctgtcctggaagccctgaggggctgtcagcatcaggccaagagtactgatggcgaaatagaagcttacaaaaagtctattatgaaagaggaagaaaaaaatgaaaaattggcatcaattctgaaccgcaccgaaaccgaggcaacactcctccaaaaactgaccacccaatgcctgaccaagcaggtcgcattgcagtcacaattcaacacttaccgtctgactctgcaggacactgaagatgctctttcccaggatcagctggaacagatgatcctgaccgaagagctacaggctattagacaggccatccagggggaactcgagctgcgtcgcaaaaccgacgccgcaatccgcgagaaactgcaggagcacatgaccagcaacaaaactaccaagtatttcaatcagctgattcttagactacagaaagagaagacaaatatgatgacccacttatccaaaatcaatggagacatcgcgcaaactaccctagacatcacccatactagctcccgcctcgatgcgcaccagaagaccttggtggaactcgatcaggacgttaaaaaggtgaacgaactgattaccaatagccagtccgaaattagcaggcggacaattctgatcgagaggaaacagggattgattaatttcctcaataaacaactcgagcgtatggttagcgagctgggcggagaggaggtgggccctctggagctcgagattaagcggctctccaaattgatcgatgagcatgatggcaaagcagtgcaggcccaggtgacctggcttagactgcagcaagagatggtaaaggtcacccaggagcaagaagagcagttagcaagccttgatgccagcaagaaagagctgcatatcatggagcaaaagaaactacgggtggaaagtaagatagagcaagagaagaaggaacagaaggaaattgagcaccacatgaaagacttagacaatgacctcaagaagctcaatatgctgatgaacaaaaatcgctgctctagcgaggagttggaacagaacaatcgcgtgaccgagaacgagttcgtacggtcactgaaagcctcagagcgggaaaccataaagatgcaggacaaactcaatcagctgtctgaagaaaaagcgaccttgctgaaccagctggttgaggctgaacaccagattatgctgtgggagaagaaaatccaactcgccaaagaaatgagaagctcagtggattcagaaattggacagacagagatccgcgcaatgaagggcgaaatacaccggatgaaggtgcggctgggccagttactaaaacagcaggaaaagatgatcagggctatggaacttgctgtggcccgacgcgaaactgtgactacacaagcagaaggccagcggaaaatggatagaaaggcccttactcgaactgactttcatcacaaacagctggagctgcgcaggaagattcgagatgtacggaaggctacagatgaatgtacaaagacggttttggaactggaagagacacagcgcaacgtgagttctagtctgttggaaaagcaggaaaagttatccgtgattcaagctgacttcgacactcttgaggcagacctgacacgattaggggctctgaaacgccagaatctatctgaaatcgtggcactccaaacccggctgaaacacctgcaggccgtgaaagaaggtcgatacgtgttcttatttaggtcaaagcaatcgttagtgctcgaacgacagaggctcgataaacggctcgccctgattgccactatactggaccgcgtgcgagatgaatacccccaattccaggaggcattgcataaggtaagtcaaatgattgcaaataagcttgagtcccccggtcctagctag

SEQ ID NO: 195889 - DNA, 4287 bp, Artificial Sequence
  derived and/or modified sequence
gcgtcgcctagcaacgggaaatggcggaaccgggcggcgcggcgggccggtcccatccggaagatggatcggcttctgagggagagaaggaagggaataatgaaagccacatggtgtcaccaccagagaaggatgatggccagaaaggtgaagaagctgtcggtagcacagagcatcctgaggaagtcacaacccaagcggaagctgcaattgaagagggggaggtggagacagaaggggaagcagcagtggaaggggaagaggaggctgtgtcctatggagatgctgaaagcgaagaggaatattactatacagaaacttcatccccggaagggcaaatcagtgctgcagatacgacttacccgtatttcagtcctcctcaggaactgcctggagaggaggcatacgatagtgttagcggggaggctggtctccaaggcttccagcaagaggccaccggtccaccagaatccagagaaaggagggtcacctccccagagccatcccacggagtcttaggcccgtcggagcaaatgggccaggtcacctctgggccagcagtgggcagattgacaggatccacagaggagccccaggggcaggtgctcccaatgggcgtccagcaccgcttccggctgagccacgggagcgacatcgagtcctcagacctggaggagttcgtctcgcaggagccagtgatccccccaggggtgcccgatgcccaccccagggaaggagacctgccagtgttccaggaccagatccagcagcccagcaccgaggagggggccatggcagagagagtggagtccgaggggagtgacgaggaagcagaagacgaagggtcccagctggtggttttggacccagaccaccccctgatggtaagattccaggctgccctgaagaactacctgaaccgacagatcgaaaagttgaagctggacctccaagagctggttgtggctaccaagcagagccgagcccagcggcaggagctgggggtgaatctctatgaggtgcagcagcacctggtacacctgcagaagctgctggagaagagtcacgaccgccacgcaatggcctcgagcgagcgcaggcagaaggaggaggagctgcaggccgcccgcgctctctacaccaagacctgcgcagccgccaacgaggagcgcaaaaagttggcggctctgcagactgagatggagaacttggccctgcatctcttctacatgcagaacatcgaccaggacatgcgtgacgacatccgcgtgatgacacaagtggtaaagaaggccgagacggagaggatccgggcagaaatcgagaagaaaaagcaggacctgtatgtggaccagctcaccactcgagcccagcaactggaagaagacattgccctgtttgaggctcagtacttggcccaagctgaggacacccggattttaaggaaagcagtgagtgaggcctgcaccgagatcgacgccatcagcgtggagaagaggcgcatcatgcagcaatgggccagcagcctggtgggcatgaagcaccgcgacgaggcgcacagggcggtgctggaggcgctcagaggatgccagcatcaagccaaatccaccgacggcgagattgaggcctataagaaatccatcatgaaggaggaagaaaagaacgagaagctggcgagcatcctgaaccggacagagacggaagccacactgctgcagaagctcaccacccagtgcctgaccaagcaggtggccctgcagagccagttcaatacctacaggctcaccctgcaggacacagaggatgccctcagccaggaccagctggaacaaatgatactcacggaggagttgcaggccatccgccaagccatccagggcgagctggagctcaggaggaagacggatgctgccatccgggagaagctgcaggagcacatgacctccaacaagaccaccaaatacttcaaccagctcatcctgaggctgcagaaggagaagaccaacatgatgacacatctttccaaaatcaacggtgacattgcccagaccaccctggacatcacacacaccagcagcaggctggacgcacaccagaagaccctggtggagctggaccaggacgtgaagaaagtcaacgagctcatcaccaacagccagagcgagatctcccggcgcacgatcctgatcgagaggaagcaagggctcatcaacttcctcaacaagcagctggagcggatggtctccgagctggggggggaagaagtggggcccctggagcttgaaatcaaaaggctgagcaagctgatcgacgagcacgatggcaaggcggtccaggcccaggtgacctggctgcgcctgcagcaggagatggtcaaggtgacacaggagcaggaggagcagctggcctccctggacgcatccaagaaggagctccacatcatggagcagaagaaactacgagtagaaagcaagattgagcaggagaagaaggagcagaaggagatcgagcaccacatgaaggacctggacaacgacctgaagaagctcaacatgttgatgaataaaaaccggtgcagctcggaggagctggagcagaacaaccgggtgacagagaatgagttcgtgcgctcgctgaaggcctctgagagggagaccatcaagatgcaggacaagctgaaccagctcagcgaggagaaggcgaccctcctgaatcaactggtggaagcagaacaccagattatgctttgggagaaaaaaatccaactggcaaaagagatgcgttcctcagtggattccgagatcggccagacggagatccgggccatgaagggcgagatccacaggatgaaggtcaggctcgggcagctgctgaagcagcaggagaagatgatccgtgccatggagttggcggttgcccgcagagagaccgtcaccacccaggccgaggggcagcgcaagatggacaggaaggcgctcacccgcaccgacttccaccacaagcagcttgagctgcgccggaaaatcagggacgttcgcaaggccaccgatgagtgcaccaaaaccgtcctggaactggaagaaacacaaagaaatgtgagcagctccctcctagagaagcaggaaaagctgtcggtgattcaggcagacttcgacacactcgaggccgacctcacccggcttggggccctcaaacgacagaacctttcagagatcgtggccctgcagacacgccttaagcacctgcaggctgtgaaggaggggcgctacgtgttcctgttccgctccaagcagtccctagtgctggagcgccagcgcctggacaagcgactggctctcatcgccaccatcctggaccgcgtgcgggacgagtacccccagttccaggaggccctgcacaaggtcagccagatgatcgccaacaagctcgagtcaccagggccctcctagggagcagcctggactccgccttgcaaggcctccaggaagagatccggaattgtgtttgtcatgagggacttggaatcttttgtgttcctaaaaaccacatgtaccctcagaagggcatcgtttaagagaaataagccagccccacccataggaatctttttagccactcagcaatttaataaaccaggtaaaatcctagcgtttcccatggcatcccatcgcaaagacagagcctgtgactgcagacccacacacccacactcccacactgggcttactcgtccaggtaacactttggtttgcagcactcccaaatctgcacgtgcctctcacaacacaacgctgccacaggtccacaagctggtgggctgagcagaggtgggaaagttaaggcagctccagccagcctggcccgggaggctggtccccccagcacttccctctactaggtgcatctgaaaacccacaaaccaccttctttaccagttttcccatccccaccccttagaactctcaggtcccttttcctgcccccatgtccccatttgagttaaattcagatccacagcttgcaggagaaagtcagtggccccagacacacgtaacagggtgagcactgaaataagagcacgctggggcgtccacaccaagggactacgccccagtctgcccacctatcttttctccatcattaacccagcgctctttctccctggacttccaagtaccaatgaccttggggcttctttgcagtttaaagggaaaatgctctacaaaataatttcactttcaaacatttcagcagaagaataaaatcttttttctgaatatctagtaa

SEQ ID NO: 195890 - DNA, 3429 bp, Artificial Sequence
  derived and/or modified sequence
atggccgagcccggcggcgccgccggcagaagccaccccgaggacggcagcgccagcgagggcgagaaggagggcaacaacgagagccacatggtgagcccccccgagaaggacgacggccagaagggcgaggaggccgtgggcagcaccgagcaccccgaggaggtgaccacccaggccgaggccgccatcgaggagggcgaggtggagaccgagggcgaggccgccgtggagggcgaggaggaggccgtgagctacggcgacgccgagagcgaggaggagtactactacaccgagaccagcagccccgagggccagatcagcgccgccgacaccacctacccctacttcagccccccccaggagctgcccggcgaggaggcctacgacagcgtgagcggcgaggccggcctgcagggcttccagcaggaggccaccggcccccccgagagcagagagagaagagtgaccagccccgagcccagccacggcgtgctgggccccagcgagcagatgggccaggtgaccagcggccccgccgtgggcagactgaccggcagcaccgaggagccccagggccaggtgctgcccatgggcgtgcagcacagattcagactgagccacggcagcgacatcgagagcagcgacctggaggagttcgtgagccaggagcccgtgatcccccccggcgtgcccgacgcccaccccagagagggcgacctgcccgtgttccaggaccagatccagcagcccagcaccgaggagggcgccatggccgagagagtggagagcgagggcagcgacgaggaggccgaggacgagggcagccagctggtggtgctggaccccgaccaccccctgatggtgagattccaggccgccctgaagaactacctgaacagacagatcgagaagctgaagctggacctgcaggagctggtggtggccaccaagcagagcagagcccagagacaggagctgggcgtgaacctgtacgaggtgcagcagcacctggtgcacctgcagaagctgctggagaagagccacgacagacacgccatggccagcagcgagagaagacagaaggaggaggagctgcaggccgccagagccctgtacaccaagacctgcgccgccgccaacgaggagagaaagaagctggccgccctgcagaccgagatggagaacctggccctgcacctgttctacatgcagaacatcgaccaggacatgagagacgacatcagagtgatgacccaggtggtgaagaaggccgagaccgagagaatcagagccgagatcgagaagaagaagcaggacctgtacgtggaccagctgaccaccagagcccagcagctggaggaggacatcgccctgttcgaggcccagtacctggcccaggccgaggacaccagaatcctgagaaaggccgtgagcgaggcctgcaccgagatcgacgccatcagcgtggagaagagaagaatcatgcagcagtgggccagcagcctggtgggcatgaagcacagagacgaggcccacagagccgtgctggaggccctgagaggctgccagcaccaggccaagagcaccgacggcgagatcgaggcctacaagaagagcatcatgaaggaggaggagaagaacgagaagctggccagcatcctgaacagaaccgagaccgaggccaccctgctgcagaagctgaccacccagtgcctgaccaagcaggtggccctgcagagccagttcaacacctacagactgaccctgcaggacaccgaggacgccctgagccaggaccagctggagcagatgatcctgaccgaggagctgcaggccatcagacaggccatccagggcgagctggagctgagaagaaagaccgacgccgccatcagagagaagctgcaggagcacatgaccagcaacaagaccaccaagtacttcaaccagctgatcctgagactgcagaaggagaagaccaacatgatgacccacctgagcaagatcaacggcgacatcgcccagaccaccctggacatcacccacaccagcagcagactggacgcccaccagaagaccctggtggagctggaccaggacgtgaagaaggtgaacgagctgatcaccaacagccagagcgagatcagcagaagaaccatcctgatcgagagaaagcagggcctgatcaacttcctgaacaagcagctggagagaatggtgagcgagctgggcggcgaggaggtgggccccctggagctggagatcaagagactgagcaagctgatcgacgagcacgacggcaaggccgtgcaggcccaggtgacctggctgagactgcagcaggagatggtgaaggtgacccaggagcaggaggagcagctggccagcctggacgccagcaagaaggagctgcacatcatggagcagaagaagctgagagtggagagcaagatcgagcaggagaagaaggagcagaaggagatcgagcaccacatgaaggacctggacaacgacctgaagaagctgaacatgctgatgaacaagaacagatgcagcagcgaggagctggagcagaacaacagagtgaccgagaacgagttcgtgagaagcctgaaggccagcgagagagagaccatcaagatgcaggacaagctgaaccagctgagcgaggagaaggccaccctgctgaaccagctggtggaggccgagcaccagatcatgctgtgggagaagaagatccagctggccaaggagatgagaagcagcgtggacagcgagatcggccagaccgagatcagagccatgaagggcgagatccacagaatgaaggtgagactgggccagctgctgaagcagcaggagaagatgatcagagccatggagctggccgtggccagaagagagaccgtgaccacccaggccgagggccagagaaagatggacagaaaggccctgaccagaaccgacttccaccacaagcagctggagctgagaagaaagatcagagacgtgagaaaggccaccgacgagtgcaccaagaccgtgctggagctggaggagacccagagaaacgtgagcagcagcctgctggagaagcaggagaagctgagcgtgatccaggccgacttcgacaccctggaggccgacctgaccagactgggcgccctgaagagacagaacctgagcgagatcgtggccctgcagaccagactgaagcacctgcaggccgtgaaggagggcagatacgtgttcctgttcagaagcaagcagagcctggtgctggagagacagagactggacaagagactggccctgatcgccaccatcctggacagagtgagagacgagtacccccagttccaggaggccctgcacaaggtgagccagatgatcgccaacaagctggagagccccggccccagctag

SEQ ID NO: 195891 - protein, 1294 aa, Artificial Sequence [sequence omitted]

SEQ ID NO: 195892 - protein, 1296 aa, Artificial Sequence
  derived and/or modified sequence
MLDPSSSEEESDEGLEEESRDVLVAAGSSQRAPPAPTREGRRDAPGRAGGGGAARSVSPSPSVLSEGRDEPQRQLDDEQERRIRLQLYVFVVRCIAYPFNAKQPTDMARRQQKLNKQQLQLLKERFQAFLNGETQIVADEAFCNAVRSYYEVFLKSDRVARMVQSGGCSANDFREVFKKNIEKRVRSLPEIDGLSKETVLSSWIAKYDAIYRGEEDLCKQPNRMALSAVSELILSKEQLYEMFQQILGIKKLEHQLLYNACQLDNADEQAAQIRRELDGRLQLADKMAKERKFPKFIAKDMENMYIEELRSSVNLLMANLESLPVSKGGPEFKLQKLKRSQNSAFLDIGDENEIQLSKSDVVLSFTLEIVIMEVQGLKSVAPNRIVYCTMEVEGEKLQTDQAEASRPQWGTQGDFTTTHPRPVVKVKLFTESTGVLALEDKELGRVILYPTSNSSKSAELHRMVVPKNSQDSDLKIKLAVRMDKPAHMKHSGYLYALGQKVWKRWKKRYFVLVQVSQYTFAMCSYREKKSEPQELMQLEGYTVDYTDPHPGLQGGCMFFNAVKEGDTVIFASDDEQDRILWVQAMYRATGQSYKPVPAIQTQKLNPKGGTLHADAQLSGKDADRFQKHGMDEFISANPCKLDHAFLFRILQRQTLDHRLNDSYSCLGWFSPGQVFVLDEYCARYGVRGCHRHLCYLAELMEHSENGAVIDPTLLHYSFAFCASHVHGNRPDGIGTVSVEEKERFEEIKERLSSLLENQISHFRYCFPFGRPEGALKATLSLLERVLMKDIATPIPAEEVKKVVRKCLEKAALINYTRLTEYAKIEETMNQASPARKLEEILHLAELCIEVLQQNEEHHAEGREAFAWWPDLLAEHAEKFWALFTVDMDTALEAQPQDSWDSFPLFQLLNNFLRNDTLLCNGKFHKHLQEIFVPLVVRYVDLMESSIAQSIHRGFEQETWQPVKNIANSLPNVALPKVPSLPLNLPQIPNISTASWMPSLYESTNGSATSEDLFWKLDALQMFVFDLHWPEQEFAHHLEQRLKLMASDMLEACVKRTRTAFELKLQKASKTTDLRIPASVCTMFNVLVDAKKQSTKLCALDGGQEQQYHSKIDDLIDNSVKEIISLLVSKFVSVLEGVLSKLSRYDEGTFFSSILSFTVKAAAKYVDVPKPGMDLADTYIMFVRQNQDILREKVNEEMYIEKLFDQWYSSSMKVICVWLTDRLDLQLHIYQLKTLIKIVKKTYRDFRLQGVLEGTLNSKTYDTVHRRLTVEEATASVSEGGGLQGITMKDSDEEEEG

SEQ ID NO: 195893 - DNA, 3885 bp, Artificial Sequence
  derived and/or modified sequence
atgcttgatccatcaagttcagaggaagaatctgatgagggcctggaggaggaaagccgcgacgtattagttgcggcagggagctctcaacgggcgcctcccgccccgacccgcgagggaaggagggacgcaccgggccgagcgggcggtggcggcgctgcgaggagtgtatccccgtcaccgagcgtactcagtgaaggaagggacgaaccccagcggcagcttgatgacgagcaggaaaggcgcatccggttacagctatatgtgtttgtggttaggtgtatcgcataccccttcaacgccaagcagccaaccgatatggcaaggagacagcagaaactcaataagcagcagttgcaactcctgaaagagagattccaggcctttctgaatggggaaacacaaatcgttgcagacgaggccttctgtaatgccgtgcgatcttattatgaggtgttcctgaaatccgatagagtggcaaggatggtgcagtctggaggatgctcagcgaacgatttccgtgaggttttcaaaaagaacattgaaaaaagagtgcggtccctgcctgaaatagatggcctgtccaaagagactgtcctgagcagctggatcgctaaatacgacgctatctatcgaggggaagaagatctgtgcaagcagcctaatcgcatggctcttagtgccgtaagtgagctgattctctcaaaagaacaactgtacgagatgttccaacagatactgggcataaagaaattggaacaccagcttctgtataatgcgtgccagcttgataacgccgacgagcaggcagcccaaattcgaagggaattagatggtagactacagctggccgataaaatggcaaaagagagaaagttcccaaaatttattgcgaaggacatggagaatatgtatattgaggaactgcgtagctctgttaatttacttatggccaatttagagtccctccctgtcagtaaagggggcccagaatttaagctgcagaagctgaaacggtcccagaactccgcttttttggacatcggagacgagaatgagatacagcttagtaagtcagatgttgtgcttagtttcaccctcgagatcgtcattatggaggtgcaggggttgaaatccgtggcacccaaccggattgtctactgtacaatggaggtggagggcgagaagctccagacagaccaggccgaagcatcccgaccacagtgggggacgcagggcgattttacaacaacccaccctagaccagtggtcaaagtgaagctgtttaccgaaagtacaggagttttggcccttgaggataaggaattgggtagagtaatcctgtatccaacatctaactctagtaaatcagccgagttgcataggatggtggtgcctaaaaattcacaggattccgacttgaagatcaaactggccgtgaggatggacaaacccgcccacatgaagcacagcggctacctctacgctctgggacagaaagtgtggaagcgttggaagaagaggtactttgtgttagtgcaagtaagccagtacacctttgctatgtgttcataccgcgagaagaaaagtgagccacaggagctgatgcagctggagggctacacagtggactatacagatccccaccctggccttcagggcggatgcatgttctttaatgctgtgaaagaaggcgatacagtgattttcgccagcgatgacgaacaggatcgcatattatgggttcaggccatgtaccgcgcgacagggcagagctacaagcctgttcctgctatccagactcagaagttgaaccccaagggaggcaccctccacgcagatgcacagctgtctgagttcaccgacgcggaccgtttccagaagcatggaatggatgagttcatctctgctaacccctgcaaactcgaccatgcctttctgtttaggatcctccagcgacagactttagatcatagactcaacgattcttattcttgtctcggttggttcagccccggccaggtgttcgtcctggacgagtactgtgcacgctatggagtgcgagggtgtcaccggcacctgtgctatttggccgaactgatggaacatagtgagaacggcgcagtgatcgatcccactcttctccattattcattcgcattctgcgcttctcatgtacacggcaataggcccgatggcattgggacagtgtcagtggaagagaaagagcgatttgaggagatcaaggaacggctgtcatctctactggaaaatcagatctcacacttcagatattgctttccctttggccgcccagagggggcccttaaggccaccctgtctctcctggagagagtcttaatgaaagatatagccacccctatccctgctgaggaggtgaaaaaggtggtgagaaagtgcctggagaaagccgccctcattaattacactcgcctgactgagtacgccaaaatagaagagactatgaaccaggcgtctccggcacgaaagctggaggaaatactgcatctagctgaattatgtatagaggtcctgcagcagaatgaggagcaccacgctgaagcttttgcttggtggccagacctgctcgcggaacacgctgaaaaattctgggctctcttcactgtcgatatggacaccgccctcgaagcacagccccaggattcctgggactcctttcctctgttccagctcctgaacaattttctgcgaaacgatacactgctttgcaacggcaaattccataagcacctgcaggagatttttgtgccactcgtggtgcgctacgtcgatctgatggagtcaagcatcgcacagagcatccatcgcggcttcgagcaagagacctggcagcccgtgaagaacattgcgaacagccttcccaatgttgctctccctaaggtgccgtctctacctctcaatctacctcagatccccaatataagcacggcatcttggatgccctcactgtatgaaagcactaacggctctgctactagtgaggatctattttggaagctcgacgcactccagatgtttgtgtttgacttgcactggcctgagcaggagtttgcccaccacctggaacagagactcaaattgatggcctcagatatgctggaggcatgcgtcaagcgaactcggacagcattcgagttgaaactacagaaggccagtaagaccacagacctgcgcatacccgcgtctgtttgtacaatgtttaatgtgttggtcgacgcgaaaaagcaatccaccaaactgtgcgcactcgatggtggacaggagcaacaatatcattctaaaatcgacgatttgattgacaacagcgtgaaggagattatcagcttgcttgtgtcaaaattcgtgagtgttctggagggcgtactctccaaactgtctcggtacgacgagggtacattcttttcttcaatattgtcttttaccgttaaggctgccgcgaaatacgttgacgtgcccaagccaggcatggatcttgcagacacttatatcatgtttgttagacaaaatcaagatatattaagggagaaggtcaacgaggagatgtatatcgagaaactctttgatcagtggtactcgtcaagtatgaaagtcatctgcgtgtggctgacagatcgacttgaccttcaactccatatatatcagctcaaaaccttgattaagatagtcaagaaaacatacagggatttcagactccagggggtgctggaaggcacccttaactcaaaaacctacgacacagttcatcgccgtttgacagtcgaagaagcaacggcttctgtgagcgagggaggtggactgcagggcattacaatgaaagactcggatgaggaggaagaaggctag

SEQ ID NO: 195894 - DNA, 1410 bp, Artificial Sequence
  derived and/or modified sequence
atgaatcaggcttctccagcacgcaaattggaagagattctacacttggccgaattgtgcatcgaggtcctgcagcagaacgaagagcatcacgctgaactcagacacgcctttgcttggtggccagacctgttggccgaacacgctgagaagttttgggcactgtttaccgtggacatggacacagccctggaggctcagccccaggattcatgggacagcttccccctctttcaacttctcaacaacttcctcagaaacgataccctgttgtgtaacggaaaatttcataagcacctgcaagaaatcttcgtccctctggtggttaggtatgtggatctaatggagtcgtccatagctcagtccatccaccgaggttttgaacaggagacctggcagcccgtgaagaatattgcgaactctctaccaaatgtcgctcttccgaaagtgccctccctgcccctaaatttaccgcagatcccaaacatatctacagcttcctggatgccttcactatatgagtcaaccaacggctctgctactagcgaggacttgttctggaagcttgacgccctccaaatgttcgttttcgatcttcattggccggagcaagaatttgcccatcatctggaacagaggctgaagctgatggcaagcgatatgctggaagcctgcgtgaaaagaaccaggacagccttcgagctcaagctccaaaaagctagtaaaaccacggacctgagaataccggcatcggtgtgcactatgttcaacgtgttagttgacgctaagaagcagtcaacaaagctgtgtgctctggacggcggacaggaacagcaataccattcaaagattgatgaccttattgacaacagcgttaaggagatcatctccctgctggtctcgaaatttgtgagtgtacttgaaggtgtgctcagtaagctgagccgctacgacgagggcacctttttttcttcgatactgagcttcaccgttaaggctgcagcaaaatatgtggatgtgccaaagcccggcatggacctggctgatacttacatcatgttcgtacggcagaaccaggatattcttagggagaaggttaacgaggaaatgtacatcgagaaattatttgaccaatggtactcctcctctatgaaggttatttgcgtctggctaactgaccgtctggacctacagcttcatatctatcagctcaaaacccttatcaaaattgtaaaaaagacatacagggacttccgtcttcagggagtgttagagggcacactgaacagcaagacttacgacactgtgcaccggcggctcactgtggaagaagccaccgcttcggtaagcgaggggggtggacttcagggtataacaatgaaggatagcgacgaagaggaagagggatag

SEQ ID NO: 195895 - DNA, 3891 bp, Artificial Sequence
  derived and/or modified sequence
atgctagatcctagcagcagcgaggaggagagcgatgagggcttggaggaggaaagcagagatgtactagtcgccgcagggtcaagccagcgagcgccccccgcccccacaagagaaggcaggagagatgctccgggaagagcaggaggtggaggagctgcacgaagcgtttccccatcccctagtgttctgagtgaggggcgcgatgaaccacagcgacaactcgacgatgaacaagagaggcggattagactgcagctgtacgtgtttgtagtcagatgtatcgcatacccattcaacgccaaacagcccaccgatatggctaggagacaacagaaacttaataagcaacagctgcagctcctgaaggagaggttccaagcattcctgaatggcgagactcaaatagtggctgacgaggcattctgtaatgcagtgagaagttactatgaagtgttcctaaagtccgacagagttgctcgaatggtgcagagtggtgggtgctccgcaaatgatttcagagaggtgtttaagaagaacatcgaaaaacgggtgcgcagcctccctgagattgatggcctgagtaaggaaaccgtgctttccagttggatagccaagtatgatgctatatatagaggtgaggaggatctgtgcaagcagccgaaccgcatggctctgtcagcagtctcagagcttatcctgagcaaagagcaactgtatgaaatgttccagcagatactgggaatcaaaaagcttgagcatcagctgctgtacaatgcctgccagcttgacaatgctgatgagcaggccgcacagatcaggcgggaacttgacggacggctgcaactggcagataagatggccaaggagaggaagttccccaaatttatcgccaaggacatggaaaatatgtacattgaggagctccggagctctgtcaatttgttaatggctaatctggaatctctccctgttagcaaaggcggtccagagtttaagctgcagaagctgaaacgtagccaaaatagcgcattcttggacatcggagatgaaaacgagatccagctgtctaaatcagacgtggtcctttccttcactctcgaaatagttatcatggaggttcaaggtcttaaaagcgtggcaccaaaccggatcgtgtactgtacaatggaagtagaaggagagaaactgcagactgatcaggcagaagcctctaggccccagtggggcactcaaggtgactttacgacaacccatccccgtccagttgttaaagtcaaactgttcaccgagtcaacaggcgttctggcactggaagacaaagaactgggtagagtcatcctctacccaacttctaattcctccaaatcagccgaactccacaggatggtggtgcccaaaaattcccaagactctgacctaaagattaaactggccgtccgcatggataagcctgcccatatgaagcactcaggatacctctatgcactggggcaaaaggtgtggaagagatggaagaagaggtatttcgtactcgtgcaggtgtctcagtatacattcgcaatgtgcagttatcgggaaaaaaaatctgagccgcaagagctaatgcagttagagggatatacagtggactatacagacccacaccctggactgcaggggggctgcatgttttttaatgccgtcaaagaaggcgacaccgttatctttgccagcgacgacgagcaggaccgcatcctgtgggttcaagccatgtaccgagccactgggcagtcttacaaacctgtgcccgcaattcagacccagaagctgaatcccaaagggggaaccttacacgccgatgcgcagttgtcgggcaaagatgcggatagatttcagaagcatggaatggacgaattcatcagtgcaaatccatgtaaacttgaccacgcttttctctttcggattctgcagaggcagaccttggatcaccgcttgaacgatagctacagttgcctgggatggttctcccccgggcaagtattcgtgctggatgaatattgcgcacggtacggagtccgagggtgccacagacatctctgctacctggcagaattgatggaacactcagagaatggcgcggtcatcgatcctacactactacactatagcttcgccttttgcgcaagccatgtccatgggaatcggcccgacgggatcggcaccgtcagtgttgaggaaaaagagaggttcgaagaaataaaggaacggcttagcagtctgcttgagaaccaaattagccacttcaggtactgtttccccttcggaagacccgagggagcgctgaaagcgaccctttccctgctggagcgtgtgctcatgaaggatattgctacgcccatccccgctgaggaggtcaaaaaggtcgtgcgcaaatgtctggagaaagctgctttaattaactacaccagactgacggagtatgcgaaaattgaggagactatgaatcaagctagcccagccaggaagcttgaagagatcctgcacctggccgagctttgcatcgaggtgctccagcaaaacgaagaacatcatgctgaaggaagggaggcctttgcctggtggcctgacttactcgcagaacacgcggagaagttctgggctctattcactgttgacatggatactgccctcgaagcccagccccaggatagctgggacagtttcccactcttccaattgctcaacaacttcttacgtaacgatactcttttgtgcaatggcaagtttcacaagcatctgcaggagatcttcgtcccactcgtggtgcggtacgtggaccttatggagtccagcattgcacagtccatccaccggggtttcgagcaggagacctggcagcccgtgaagaatatcgccaactctttgcccaatgtggccctgcctaaggtaccgtccttacccttgaacttaccgcagatccccaacatttccacagcctcatggatgcctagcctgtatgagtcgaccaatggaagtgcaacatccgaggacctgttttggaaactggatgcactgcagatgtttgtgtttgacctacactggccagagcaggagtttgcgcatcacctggagcagcgtctaaaactcatggctagcgatatgctggaagcctgcgttaaacgcacgcggactgcgttcgagctcaaattgcagaaagccagcaagacaacggatctaaggatccccgcaagcgtgtgtacaatgttcaatgtgctggtcgatgccaagaagcagagcactaagctgtgcgctcttgacggcggccaggagcagcagtatcattctaaaatagatgatctgattgataatagcgtgaaagagatcattagcctcctggtctctaagtttgtcagtgtccttgagggtgtgctgtccaaattgagccgctatgacgagggcacattttttagctcaatactgtcattcaccgtcaaagcggccgctaaatacgtggatgtccccaaacctggaatggacctcgcggatacttatatcatgttcgtgcggcagaaccaggacatcctgcgggaaaaggtaaatgaagagatgtatatcgagaagttattcgatcaatggtacagttcaagtatgaaggttatctgtgtctggttaaccgaccgccttgacctccagctccacatataccagttaaaaaccctcatcaaaatcgtaaaaaaaacctacagggatttccggctacagggcgtgcttgagggcaccctcaactctaaaacttacgatacagtgcacaggcggctcacagttgaagaggccaccgccagcgtcagtgagggtggggggctccagggtatcactatgaaggactccgatgaggaggaagaggggtag

SEQ ID NO: 195896 - DNA, 3885 bp, Artificial Sequence
  derived and/or modified sequence
atgctggaccccagcagcagcgaggaggagagtgatgagggcctggaggaggagagcagagatgtgctggtggccgccggcagcagccagagggcccccccagcccccacccgggagggcagaagagatgcccctggccgggccggcggcggcggggccgcccggtctgtgagccccagccccagcgtgctgtctgagggcagagatgagccccagaggcagctggatgatgagcaggagcggcgcatccggctgcagctgtatgtgtttgtggtgcgctgcatcgcctaccccttcaatgccaagcagcccacagacatggcccggcggcagcagaagctgaacaagcagcagctgcagctgctgaaggagcgcttccaggccttcctgaatggagagacccagatcgtggctgatgaggccttctgcaatgctgtgcgcagctactatgaggtgttcctgaagagtgacagagtggccaggatggtgcagagcggcggctgcagcgccaatgacttccgggaggtgttcaagaagaacatcgagaagagggtgcgcagcctgcctgagattgatggcctgagcaaggagaccgtgctgagctcctggatcgccaagtatgatgccatctacagaggagaggaggacctgtgcaagcagcccaacaggatggccctgtctgctgtgtctgagctgatcctgagcaaggagcagctgtatgagatgttccagcagatcctgggcatcaagaagctggagcaccagctgctgtacaatgcctgccagctggacaatgctgatgagcaggccgcccagatccggcgggagctggatggccgcctgcagctggccgacaagatggccaaggagaggaagttccccaagttcatcgccaaggacatggagaacatgtacatcgaggagctgcggagctctgtgaacctgctgatggccaacctggagagcctgcctgtgtccaaaggaggccctgagttcaagctgcagaagctgaagaggagccagaacagcgccttcctggacattggagatgaaaatgagatccagctgagcaagagtgatgtggtgctgtccttcaccctggagatcgtcatcatggaggtgcagggcctgaagtctgtggcccccaacagaattgtgtactgcaccatggaggtggagggggagaagctgcagacagaccaggccgaggccagccggccccagtggggcacccagggcgacttcaccaccacccaccccaggcctgtggtgaaggtgaagctgttcacagagagcactggagtgctggccctggaggacaaggagctgggccgggtcatcctgtaccccaccagcaacagcagcaagtctgctgagctgcacaggatggtggtgcccaagaacagccaggacagcgacctgaagatcaagctggccgtgaggatggacaagccagcccacatgaagcacagcggctacctgtatgccctgggccagaaggtgtggaagcgctggaagaagcgctactttgtgctggtgcaggtgtcccagtacacctttgccatgtgcagctaccgggagaagaagtctgagccccaggagctgatgcagctggagggctacacagtggactacacagacccccaccctggcctgcagggcggctgcatgttcttcaatgctgtgaaggagggggacaccgtcatctttgccagtgatgatgagcaggaccgcatcctgtgggtgcaggccatgtaccgggccaccggccagagctacaagcctgtgcctgccatccagacccagaagctgaaccccaagggcggcaccctgcatgctgatgcccagctgtctgagttcacagatgctgaccgcttccagaagcacggcatggatgagttcatcagcgccaacccctgcaagctggaccacgccttcctgttccgcatcctgcagaggcagaccctggaccaccggctgaatgacagctacagctgcctgggctggttcagccctggccaggtgtttgtgctggatgagtactgtgcccgctatggagtgcggggctgccaccgccacctgtgctacctggccgagctgatggagcacagtgaaaatggagctgtgattgaccccaccctgctgcactacagctttgccttctgtgccagccacgtgcacggcaacagaccagatggcatcggcaccgtgtctgtggaggagaaggagagatttgaggagatcaaggagcggctgagcagcctgctggagaaccagatcagccacttccgctactgcttccccttcggccggcctgagggcgccctgaaggccaccctgagcctgctggagcgggtgctgatgaaggacatcgccacccccatcccagctgaggaggtgaagaaggtggtgaggaagtgcctggagaaggccgccctgatcaactacacccggctgacagaatatgccaagattgaggagaccatgaaccaggccagccctgccaggaagctggaggagatcctgcacctggccgagctgtgcatcgaggtgctgcagcagaatgaggagcaccacgccgaggcctttgcctggtggccagacctgctggccgagcacgccgagaagttctgggccctcttcaccgtggacatggacacagccctggaggcccagccccaggacagctgggacagcttccccctcttccagctgctgaacaacttcctgagaaatgacaccctgctgtgcaatggcaagttccacaagcacctgcaggagatctttgtgcccctggtggtgcgctacgtggacctgatggagagcagcatcgcccagagcatccaccggggctttgagcaggagacctggcagcctgtgaagaacatcgccaacagcctgcccaacgtggccctgcccaaggtgcccagcctgcccctgaacctgccccagatccccaacatcagcacagcctcctggatgcccagcctgtatgagagcaccaacggcagcgccaccagcgaggacctcttctggaagctggatgccctgcagatgtttgtgtttgacctgcactggccagagcaggagtttgcccaccacctggagcagaggctgaagctgatggccagtgacatgctggaggcctgtgtgaagaggaccaggacagcctttgagctgaagctgcagaaggccagcaagaccacagacctgcgcatcccagcctctgtgtgcaccatgttcaacgtgctggtggatgccaagaagcagagcaccaagctgtgtgccctggatggcggccaggagcagcagtaccacagcaagattgatgacctgattgacaacagcgtgaaggagatcatcagcctgctggtgtccaagtttgtgtctgtgctggagggcgtgctgagcaagctgagccgctatgatgagggcaccttcttcagcagcatcctgtccttcaccgtgaaggctgctgccaagtatgtggatgtgcccaagccaggcatggacctggccgacacctacatcatgtttgtgcggcagaaccaggacatcctgcgggagaaggtgaatgaggagatgtacatcgagaagctgtttgaccagtggtacagcagctccatgaaggtgatctgtgtgtggctgacagaccggctggacctgcagctgcacatctaccagctgaagaccctcatcaagatcgtgaagaagacctacagagacttccggctgcagggcgtgctggagggcaccctgaacagcaagacctatgacacagtgcaccggcggctgactgtggaggaggccacagcctctgtgtctgagggcggcggcctgcagggcatcaccatgaaggacagtgatgaggaggaggagggctag

SEQ ID NO: 195897 - DNA, 1410 bp, Artificial Sequence
  derived and/or modified sequence
atgaaccaggccagccctgccaggaagctggaggagatcctgcacctggccgagctgtgcatcgaggtgctgcagcagaatgaggagcaccacgccgagctgcggcatgcctttgcctggtggccagacctgctggccgagcacgccgagaagttctgggccctcttcaccgtggacatggacacagccctggaggcccagccccaggacagctgggacagcttccccctcttccagctgctgaacaacttcctgagaaatgacaccctgctgtgcaatggcaagttccacaagcacctgcaggagatctttgtgcccctggtggtgcgctacgtggacctgatggagagcagcatcgcccagagcatccaccggggctttgagcaggagacctggcagcctgtgaagaacatcgccaacagcctgcccaacgtggccctgcccaaggtgcccagcctgcccctgaacctgccccagatccccaacatcagcacagcctcctggatgcccagcctgtatgagagcaccaatggaagtgccaccagtgaagatctcttctggaagctggatgccctgcagatgtttgtgtttgacctgcactggccagagcaggagtttgcccaccacctggagcagaggctgaagctgatggccagtgacatgctggaggcctgtgtgaagaggaccaggacagcctttgagctgaagctgcagaaggccagcaagaccacagacctgcgcatcccagcctctgtgtgcaccatgtttaatgtgctggtggatgccaagaagcagagcaccaagctgtgtgccctggatggcggccaggagcagcagtaccacagcaagattgatgacctgattgacaacagcgtgaaggagatcatcagcctgctggtgtccaagtttgtgtctgtgctggagggcgtgctgagcaagctgagccgctatgatgagggcaccttcttcagcagcatcctgtccttcaccgtgaaggccgccgccaagtatgtggatgtgcccaagccaggcatggacctggccgacacctacatcatgtttgtgcggcagaaccaggacatcctgcgggagaaggtgaatgaggagatgtacatcgagaagctgtttgaccagtggtacagcagctccatgaaggtgatctgtgtgtggctgacagaccggctggacctgcagctgcacatctaccagctgaagaccctcatcaagatcgtgaagaagacctacagagacttccggctgcagggcgtgctggagggcaccctgaacagcaagacctatgacacagtgcaccggcggctgactgtggaggaggccacagcctctgtgtctgagggcggcggcctgcagggcatcaccatgaaggacagtgatgaggaggaggagggctag

SEQ ID NO: 195898 - DNA, 3891 bp, Artificial Sequence
  derived and/or modified sequence
atgctggaccccagcagcagcgaggaggagagtgatgagggcctggaggaggagagcagagatgtgctggtggccgccggcagcagccagagggcccccccagcccccacccgggagggcagaagagatgcccctggccgggccggcggcggcggggccgcccggtctgtgagccccagccccagcgtgctgtctgagggcagagatgagccccagaggcagctggatgatgagcaggagcggcgcatccggctgcagctgtatgtgtttgtggtgcgctgcatcgcctaccccttcaatgccaagcagcccacagacatggcccggcggcagcagaagctgaacaagcagcagctgcagctgctgaaggagcgcttccaggccttcctgaatggagagacccagatcgtggctgatgaggccttctgcaatgctgtgcgcagctactatgaggtgttcctgaagagtgacagagtggccaggatggtgcagagcggcggctgcagcgccaatgacttccgggaggtgttcaagaagaacatcgagaagagggtgcgcagcctgcctgagattgatggcctgagcaaggagaccgtgctgagctcctggatcgccaagtatgatgccatctacagaggagaggaggacctgtgcaagcagcccaacaggatggccctgtctgctgtgtctgagctgatcctgagcaaggagcagctgtatgagatgttccagcagatcctgggcatcaagaagctggagcaccagctgctgtacaatgcctgccagctggacaatgctgatgagcaggccgcccagatccggcgggagctggatggccgcctgcagctggccgacaagatggccaaggagaggaagttccccaagttcatcgccaaggacatggagaacatgtacatcgaggagctgcggagctctgtgaacctgctgatggccaacctggagagcctgcctgtgtccaaaggaggccctgagttcaagctgcagaagctgaagaggagccagaacagcgccttcctggacattggagatgaaaatgagatccagctgagcaagagtgatgtggtgctgtccttcaccctggagatcgtcatcatggaggtgcagggcctgaagtctgtggcccccaacagaattgtgtactgcaccatggaggtggagggggagaagctgcagacagaccaggccgaggccagccggccccagtggggcacccagggcgacttcaccaccacccaccccaggcctgtggtgaaggtgaagctgttcacagagagcactggagtgctggccctggaggacaaggagctgggccgggtcatcctgtaccccaccagcaacagcagcaagtctgctgagctgcacaggatggtggtgcccaagaacagccaggacagcgacctgaagatcaagctggccgtgaggatggacaagccagcccacatgaagcacagcggctacctgtatgccctgggccagaaggtgtggaagcgctggaagaagcgctactttgtgctggtgcaggtgtcccagtacacctttgccatgtgcagctaccgggagaagaagtctgagccccaggagctgatgcagctggagggctacacagtggactacacagacccccaccctggcctgcagggcggctgcatgttcttcaatgctgtgaaggagggggacaccgtcatctttgccagtgatgatgagcaggaccgcatcctgtgggtgcaggccatgtaccgggccaccggccagagctacaagcctgtgcctgccatccagacccagaagctgaaccccaagggcggcaccctgcatgctgatgcccagctgagcggcaaggatgctgaccgcttccagaagcacggcatggatgagttcatcagcgccaacccctgcaagctggaccacgccttcctgttccgcatcctgcagaggcagaccctggaccaccggctgaatgacagctacagctgcctgggctggttcagccctggccaggtgtttgtgctggatgagtactgtgcccgctatggagtgcggggctgccaccgccacctgtgctacctggccgagctgatggagcacagtgaaaatggagctgtgattgaccccaccctgctgcactacagctttgccttctgtgccagccacgtgcacggcaacagaccagatggcattggaacagtgtctgtggaggagaaggagagatttgaggagatcaaggagcggctgagcagcctgctggagaaccagatcagccacttccgctactgcttccccttcggccggcctgagggcgccctgaaggccaccctgagcctgctggagcgggtgctgatgaaggacatcgccacccccatcccagctgaggaggtgaagaaggtggtgaggaagtgcctggagaaggccgccctgatcaactacacccggctgacagaatatgccaagattgaggagaccatgaaccaggccagccctgccaggaagctggaggagatcctgcacctggccgagctgtgcatcgaggtgctgcagcagaatgaggagcaccacgccgagggccgggaggcctttgcctggtggccagacctgctggccgagcacgccgagaagttctgggccctcttcaccgtggacatggacacagccctggaggcccagccccaggacagctgggacagcttccccctcttccagctgctgaacaacttcctgagaaatgacaccctgctgtgcaatggcaagttccacaagcacctgcaggagatctttgtgcccctggtggtgcgctacgtggacctgatggagagcagcatcgcccagagcatccaccggggctttgagcaggagacctggcagcctgtgaagaacatcgccaacagcctgcccaacgtggccctgcccaaggtgcccagcctgcccctgaacctgccccagatccccaacatcagcacagcctcctggatgcccagcctgtatgagagcaccaacggcagcgccaccagcgaggacctcttctggaagctggatgccctgcagatgtttgtgtttgacctgcactggccagagcaggagtttgcccaccacctggagcagaggctgaagctgatggccagtgacatgctggaggcctgtgtgaagaggaccaggacagcctttgagctgaagctgcagaaggccagcaagaccacagacctgcgcatcccagcctctgtgtgcaccatgttcaacgtgctggtggatgccaagaagcagagcaccaagctgtgtgccctggatggcggccaggagcagcagtaccacagcaagattgatgacctgattgacaacagcgtgaaggagatcatcagcctgctggtgtccaagtttgtgtctgtgctggagggcgtgctgagcaagctgagccgctatgatgagggcaccttcttcagcagcatcctgtccttcaccgtgaaggctgctgccaagtatgtggatgtgcccaagccaggcatggacctggccgacacctacatcatgtttgtgcggcagaaccaggacatcctgcgggagaaggtgaatgaggagatgtacatcgagaagctgtttgaccagtggtacagcagctccatgaaggtgatctgtgtgtggctgacagaccggctggacctgcagctgcacatctaccagctgaagaccctcatcaagatcgtgaagaagacctacagagacttccggctgcagggcgtgctggagggcaccctgaacagcaagacctatgacacagtgcaccggcggctgactgtggaggaggccacagcctctgtgtctgagggcggcggcctgcagggcatcaccatgaaggacagtgatgaggaggaggagggctag

SEQ ID NO: 195899 - DNA, 3885 bp, Artificial Sequence
  derived and/or modified sequence
atgctggaccccagcagcagcgaggaggagagcgacgagggcctggaagaggagagccgggatgtgttagtggccgcgggatcctctcagcgggcacctccagctccgaccagggagggaaggcgggacgctccaggccgggcaggtggcggcggtgcagcacggtcagtgagtccctctccatccgtattgagcgaggggagagacgagcctcagcggcagctcgacgacgaacaagaacgccgaattcgtctccaactttatgtgtttgtggtccgctgcatcgcttacccttttaacgctaaacagccgacagatatggccagacgtcagcagaagcttaacaagcagcagttgcaactgcttaaggagagatttcaggcctttttgaatggggagacccagatcgtggcagacgaagcattctgtaacgccgtacgctcctactatgaggtcttcctcaagtcagacagggttgccagaatggtgcagagcggtggttgcagcgccaacgactttcgggaggtgtttaagaaaaatattgagaaacgcgtgaggtctctaccagagatcgacgggctaagtaaggaaacagtgctcagcagttggattgcaaaatacgacgcaatatatcggggggaggaggacctctgcaagcagccgaatcgaatggcgcttagtgctgttagcgaactgatcctgtcaaaggagcaactgtacgaaatgtttcagcagatcctgggtattaaaaaacttgagcaccagttgttgtataacgcctgccagctggacaacgccgatgagcaggcagcacaaatccggcgtgagctagacggacggctacagctcgccgacaaaatggccaaggaaagaaagttccccaagttcatagccaaggatatggaaaacatgtatatcgaggagctaagaagctcagtgaacttgctgatggcaaacttagaaagtctgcctgtgagcaaaggaggcccagagttcaaactgcagaaactgaaaaggtcacagaactctgcttttctggacataggggatgagaacgaaatacaactctccaaaagcgacgtggtccttagttttaccctggagattgtcataatggaggtacagggcctgaaatccgtggcccctaatcgcattgtgtactgtacaatggaggtagaaggcgaaaagctgcagaccgatcaagccgaagccagtaggccccagtgggggacccaaggggactttacaaccactcaccctcgacccgtggtaaaggttaagctgtttacggaaagcaccggggtgctggcgttagaggataaagaactcggacgtgttattctctatcctacgagcaatagcagcaagtctgctgagttacacaggatggtcgtccctaagaactcccaggatagcgatctgaaaattaagctggccgtgagaatggacaagccagcgcacatgaaacattctgggtacctatatgccttgggccagaaggtgtggaagcggtggaaaaagagatattttgtgctggttcaagtgagccagtatactttcgccatgtgttcatacagggagaagaaatccgagccacaagaactgatgcagttagagggctatactgtagattataccgatcctcaccctgggcttcaaggcggatgcatgttcttcaacgccgtgaaagagggggataccgtgatcttcgcctctgacgatgagcaagaccggattctttgggttcaggctatgtaccgggccacagggcagagctacaagccggtccccgccatacagacccagaagctgaaccccaaaggcgggactttgcacgcagacgctcagctttcagaatttactgacgcagatcgcttccaaaagcatggcatggacgagttcatctccgctaacccttgtaaacttgatcatgcttttttattcaggatcctccagcgacagacgctcgatcatagattgaacgacagttactcctgtttgggctggttcagtcccgggcaagtgttcgttttggacgagtactgtgctcgctacggcgtaagagggtgccacagacacctgtgctacctggcggaattgatggagcactctgagaatggcgctgtcattgacccgacgctgctgcattactcattcgctttttgcgcctcccacgtgcacggtaaccggcccgatggaatcggtactgtgtccgtggaggagaaggagcgctttgaggagattaaagagcgactctcttccctcctagagaaccagatcagtcatttccgatattgctttcctttcggcagacccgagggcgccctgaaagccaccctaagccttctggaacgggtactgatgaaagatatcgccacacccattcccgcggaggaggtgaaaaaggtcgtacgcaagtgcttggaaaaggctgccctcatcaactatacccgtttaaccgaatacgcaaagatcgaggagactatgaaccaggcgagtcctgccaggaaattggaggagatcctccatctcgcagagctgtgtatcgaggtgttacagcagaatgaggagcaccatgcagaggctttcgcatggtggcctgatttgttagccgaacacgcagagaaattctgggcattgttcaccgtggacatggataccgccctggaggcacagccccaagatagctgggacagttttcccctatttcaattactgaataattttctgagaaatgatactctgctatgcaacgggaagttccataaacacctccaggaaatctttgtgccactggtggtacgctacgttgatcttatggagtcatctatcgcgcagtcaatccatagagggttcgagcaggagacatggcagcctgttaaaaacatcgcaaatagtctgccaaacgtcgctttacccaaggtcccctctttgcccctgaacttacctcaaattcccaatattagcaccgcttcttggatgccttctctctacgaaagtactaacggatccgcaacgtctgaggatttgttttggaagttggatgctctacagatgttcgtatttgatctccactggccagaacaagagttcgcacatcacctcgagcagcggctaaaacttatggcctcggacatgctcgaggcctgcgtgaagaggacccggactgccttcgaactgaagctccagaaagcgagcaagacgactgacctgagaataccagcaagcgtctgcacgatgtttaatgtgcttgtcgatgcaaagaagcagtcaactaagctatgcgccttggatggcggacaggagcagcagtaccatagcaaaatcgacgatctcatagacaatagtgtgaaggaaattatttccctcctagtgtcaaaattcgtgtcagtcttggagggcgtactgtctaaactaagccgctacgatgagggaacatttttctctagcatcttaagcttcacagtaaaggccgccgccaagtatgtggacgtgcccaagccaggaatggatcttgccgatacctacattatgtttgtgcgtcagaaccaggatatcttgcgcgagaaggtaaacgaagagatgtatattgaaaaactattcgaccaatggtacagcagtagtatgaaagtgatctgtgtatggctgaccgaccggctggatctccagctacatatctatcagctgaaaaccttgatcaaaatcgttaaaaagacctatagggacttcagactccaaggggttctcgaaggcactcttaatagcaaaacttacgatacagtgcaccggaggctcactgtggaagaggcaaccgcgtcagtctcagagggcggcgggctgcagggaattacgatgaaggattccgacgaagaagaggagggctag

SEQ ID NO: 195900 - DNA, 1410 bp, Artificial Sequence
  derived and/or modified sequence
atgaaccaggccagccccgcccggaagctggaggagatcctgcaccttgctgagctctgtattgaggtgctccaacagaatgaggagcaccacgcggaactgaggcacgccttcgcctggtggcctgacctcctggcagagcatgcagagaagttttgggcgctgttcacagttgacatggatactgccttggaggctcagcctcaggattcatgggactcttttcccctcttccaactgctgaataatttcctgaggaacgatacactactgtgcaacggaaagttccacaaacacttgcaggagatcttcgttccactcgtggtacggtatgtcgatctgatggaaagctccattgctcagtctatccacaggggatttgaacaggaaacctggcagccggtcaagaatattgccaactccttaccgaacgtagctctgcccaaagttcctagtctgcctctgaatctgcctcagattcccaatatcagcacagcttcatggatgccatctttgtatgaaagcactaatggtagtgccacttcagaggatctgttttggaagctggatgcccttcagatgttcgtatttgatcttcattggccggagcaggagttcgcccaccacctggaacagagactgaaactcatggccagtgatatgctcgaagcctgcgtcaaaagaacccggaccgcttttgaactgaagttgcagaaagcctccaagactacagatttgaggatccctgctagcgtgtgcactatgtttaatgtactcgttgatgctaaaaaacagtctacaaagctgtgcgcactggacggcggacaggagcagcagtaccacagcaagatcgacgacctgatagacaactctgtgaaggaaataatcagcttgcttgtgtccaaattcgtttccgtgctggaaggcgtgcttagcaagttgagcaggtatgatgagggtaccttcttctctagcatactctcttttaccgtaaaagcagcagccaaatacgttgatgtgcccaaaccaggcatggatcttgcagatacttatattatgttcgttcgacagaaccaagatattttacgtgaaaaagtgaacgaagagatgtatattgaaaaactctttgaccaatggtacagttcttcgatgaaggttatctgtgtgtggttaactgacaggctggatctgcagctgcatatctaccagctcaaaacgttgataaagatcgtgaagaaaacttacagagactttcgcctgcaaggcgtcttagaaggcacactgaactcaaaaacctacgacacggttcaccgcaggttgacagttgaggaagcaacagcatctgtgtcagagggcggaggcctgcagggtatcaccatgaaagactcagacgaagaggaggaaggctag

SEQ ID NO: 195901 - DNA, 3891 bp, Artificial Sequence
  derived and/or modified sequence
atgctggaccccagcagcagcgaggaggagagcgacgagggcctggaggaagagtcccgggacgtgttggtggcggccgggagcagccagagagcaccaccggctcctacacgcgaggggcggcgcgacgcccctggacgggccggtggcggtggggctgcacgatcggttagcccgtctccatcagtgttaagcgagggcagggatgagcctcagcggcagcttgatgacgaacaggaaaggagaattcggctgcaactatacgtgttcgtggtcagatgtatagcctaccccttcaacgccaagcagcccacggacatggctcgaagacagcagaaactgaataagcagcagctgcaactgctgaaagagagatttcaggcattcctgaatggagaaactcagattgtcgccgacgaggcattttgcaacgctgttcggtcctattacgaggtgttccttaaaagtgaccgggtagcccgtatggtccagagcggcgggtgcagtgccaacgactttagggaagtgtttaagaagaacatcgagaaaagagttagatccttgcctgagatcgatggcctgagtaaagagactgtactgtccagttggatcgccaagtatgacgccatttaccgcggagaggaggatttatgcaaacagcctaacaggatggccctgagcgctgtttccgaactcatcctatctaaagagcaactgtatgaaatgttccagcagatcctgggaataaagaagcttgaacaccagctcctctataatgcgtgtcagttggacaacgccgacgagcaggccgcccagatccggagggaactcgatggacggcttcagctagccgataaaatggcaaaggagcgaaagtttcctaaattcatagctaaagatatggaaaacatgtacatcgaagaacttcgctcctctgtaaacttattaatggcaaacctggagagcctccccgtatcaaagggtgggcccgaattcaaactgcagaagctgaaacgatcccaaaattccgctttcctggatattggtgacgaaaacgaaattcagctgagcaagtccgatgtcgtgctcagcttcaccctggagatagtcattatggaggtccaaggccttaagtccgtagcgcccaaccggatcgtgtattgcacgatggaggtggagggtgagaaactgcagacggaccaggccgaggcaagccggccacagtgggggactcagggtgatttcacaaccactcatcctcgacctgtcgtgaaggtgaaactcttcactgagtcaacaggtgttcttgccctggaggataaagagttagggcgtgtcatactgtaccccacctctaatagcagtaagtccgcagaactgcacaggatggtcgtgccaaagaattctcaggattcagatctcaagatcaagcttgcagtgcgcatggataaaccagcgcatatgaaacactctggttacctgtatgccctcgggcagaaagtgtggaaacggtggaagaaacgatatttcgtactagtgcaggtaagtcaatacacctttgctatgtgctcgtaccgggagaagaagagcgagcctcaagagctgatgcagctggaaggctacacagttgactacaccgatcctcacccagggctgcagggaggctgtatgttttttaatgccgtgaaggaaggcgacaccgttattttcgcctctgatgacgaacaggacagaatcctgtgggtacaggcgatgtatagagccacaggtcagagctacaaacctgtgcctgccatacagactcagaaacttaatcccaaggggggtacccttcatgcggacgcacagctaagtggaaaggatgcagacagattccaaaagcacggcatggacgagttcatctcagccaatccctgcaagctggatcacgcctttctgtttaggatcctccagaggcaaacgctggatcatcgcctgaacgactcatacagttgtttgggatggttttccccaggacaggtgtttgtgcttgatgaatattgcgccaggtatggtgtgcggggttgccacagacacctgtgctacctggcagagcttatggagcacagcgagaacggcgcagtgatcgatcccacactactgcactacagctttgccttttgcgcctcgcatgtgcacgggaaccgccccgacgggatcggtacggtctccgtcgaggagaaggagcgcttcgaagagattaaagaaagacttagttccctgctagaaaaccagatctctcactttaggtactgcttccctttcgggcgtccggaaggagccctgaaagctacactgtccctgttggagagagtcctgatgaaggatattgctacacccatccctgcagaagaagtgaaaaaggtggtgcgcaaatgtctggagaaagcagctctgattaattacacccggctaactgagtacgccaagattgaggaaacaatgaatcaagcctcacctgccaggaagctggaagagattttgcacctggccgaactgtgtattgaagtgttgcaacaaaacgaggaacaccatgcagaaggaagggaggcatttgcatggtggccggacctcctggcggagcatgctgaaaaattctgggctctgttcaccgtggatatggacacagccctggaggcgcagccccaggatagttgggactcttttcctttgttccagctgttgaacaactttctccgcaatgacacgctgttgtgcaacggtaaattccataaacatttgcaagaaatctttgttccactggttgtgcgctatgttgacttgatggagtcctctatcgctcaatccatccaccgtggcttcgaacaggaaacctggcagcctgtcaaaaacattgcgaattctctaccgaatgtggcccttcccaaggtgccttccttgcccctcaacttgccccagattccaaacatctccactgcaagctggatgcccagcctgtacgaatcgaccaacggaagtgctacttccgaagacctcttctggaaacttgacgctctccaaatgttcgtgtttgaccttcactggcccgaacaggagttcgcccatcatctggaacagaggttgaagctgatggcgtctgacatgctcgaggcttgcgtcaagcgcacacgcactgcattcgaacttaaactgcaaaaagcatcaaagactacggacttgcgcatcccggcttcagtgtgtacaatgtttaatgtcttggtcgacgccaagaagcagagcactaaattgtgcgctctcgatgggggtcaagaacagcagtaccatagcaagatcgatgatctcattgacaacagtgtcaaagagataatttctctactagtcagcaaattcgtgtcagtgcttgagggagtgttgagcaagctctcccggtacgacgaaggaacatttttctcatcgattttgtcctttacagtcaaagctgctgccaaatatgtggacgtacccaagcctgggatggatctggcggatacttatattatgtttgtcagacagaaccaggatattctgagggagaaggtcaacgaggaaatgtacatagagaagctgtttgatcagtggtactcatcatccatgaaggtaatctgcgtgtggctgactgaccgcctggacttgcagctgcacatctatcagctgaagactctaatcaagatcgtaaagaaaacttaccgcgatttcaggttgcagggggtccttgagggaaccttgaactctaagacctacgatacagtccataggagactgacggtcgaggaagctaccgccagtgtttcagagggaggagggctccaagggattaccatgaaggactccgatgaggaggaagagggctag

SEQ ID NO: 195902 - DNA, 3885 bp, Artificial Sequence
  derived and/or modified sequence
atgttagatccctcctctagtgaggaggagtctgacgaaggcttggaggaggaaagtagagacgtgctcgttgctgcaggctcttcccagagagccccacctgctcccacccgagaggggcgtcgcgatgctccaggacgcgctggaggaggtggcgctgcgcgatcggtatctcctagtccttccgtgctatcagaaggacgcgacgaacctcagaggcagctggatgacgaacaggagcgaagaattagacttcagctctacgtgttcgtagtacggtgtattgcctatccttttaacgccaagcagccaactgacatggcaagaaggcagcagaagcttaataagcaacagctgcagctcctcaaagagcgctttcaagccttcttgaacggagagacgcagattgtagcagacgaggccttttgtaatgctgtgcgctcttattatgaggttttcctcaagagtgaccgcgtggcaaggatggtccagagtggtggttgttccgccaatgactttcgagaagtgttcaagaaaaatattgaaaaacgcgtaaggtccctgccagagatagacggtctgagcaaagagacagtgttgtcttcatggatagcaaaatacgatgctatataccgtggtgaggaagatctgtgcaagcagcccaatagaatggctctatcggccgttagcgagctcattctgagcaaagaacagttatatgagatgtttcagcagatcctgggaatcaagaaattggagcatcagttgctgtacaacgcttgccagctggacaacgcggacgagcaagccgcacagatccgtcgggagctcgatggacgtctgcagctcgccgataagatggccaaagaacgaaaatttccgaagtttattgcaaaggatatggagaacatgtacatcgaggagctgcgatcttcagtgaatctgctcatggccaacctggaatctctgcctgtgtctaaagggggacctgaatttaagctgcaaaagctgaagcgatctcaaaattcggcttttttggatatcggtgatgagaatgagatccagcttagcaagtccgacgtggtgttgagttttaccttagagattgtgatcatggaagtgcagggcctgaagtctgttgccccaaaccgaattgtatactgtaccatggaggtcgagggcgagaaactgcaaacagaccaagcggaagctagcagaccccagtggggtacccagggtgatttcacaaccacccatcctcggccagtcgttaaggtcaagttgttcaccgaatctacaggcgtgctggcattggaggacaaggagttgggaagggtgatcctttatcctactagtaacagctctaaatctgctgaattgcaccgaatggtggtgcccaaaaatagtcaggattctgacttaaagataaaattggctgtgaggatggataagcccgctcacatgaagcattccggctatttatatgccctcggtcaaaaggtatggaagcgctggaaaaagcgctacttcgtgctggttcaggtcagccagtacacatttgctatgtgctcatatcgagaaaagaaatccgagccccaggagctgatgcaactagagggctacacagtcgattacactgaccctcacccaggccttcaggggggatgcatgttttttaacgctgtgaaagaaggagacacagttatctttgctagcgacgatgaacaggatcgcattctttgggtgcaggccatgtatcgtgccacggggcagagttataagccagtccccgcaattcagactcaaaaactgaatccaaagggtggcacacttcatgcagacgctcagctttctgagttcactgacgccgacagattccaaaagcatggcatggacgagttcatctcagccaacccatgcaagctggaccacgcgtttctatttaggatcctgcagcggcagaccttggaccacagactgaatgactcatattcttgccttggatggttctcaccaggacaggtctttgtgcttgacgagtactgtgcacgatacggagtaaggggttgccaccggcacctctgctatcttgcggagctaatggagcacagcgagaatggcgctgttattgatcccacacttctccactatagctttgctttctgtgccagtcacgttcacggcaaccgccctgatggtattggaactgtgtcagttgaggagaaagaacggtttgaagagatcaaagagaggctgtcttcactgctggagaaccagatcagccactttcggtattgcttccccttcgggcgaccagaaggagccttaaaggctacactctctctgctggagcgggtgctgatgaaggatatcgccactcccatccccgctgaagaggtcaagaaggttgtccggaagtgcctggaaaaggctgctctaatcaactacactcgcctgaccgaatacgccaagattgaagagacaatgaaccaggctagccccgctcggaagctggaagagatactgcacctggctgagctgtgcatcgaagtgctgcagcagaatgaagaacatcatgctgaagcatttgcgtggtggccagaccttctcgccgaacacgcagagaaattctgggctctgttcacagtggacatggacacagccctagaggctcagccgcaggatagctgggactcctttccactcttccagctgctgaataatttcttgcgaaatgatactcttttgtgcaatggcaaattccataagcatctgcaggaaatctttgtgccgttagtagtgagatatgtggacttaatggagtcttctatcgcgcaatctatccataggggcttcgagcaggagacctggcagccagttaagaatattgccaacagcctgccaaacgtggcattgcccaaggtcccatctctgcccctcaatctgccccagatccccaatatttcaaccgcttcttggatgcccagcctttacgaatccacaaacggatcagctacaagcgaggacctcttttggaagctcgacgcattgcagatgttcgtgttcgacctgcactggcctgagcaggaattcgcccaccaccttgagcagcggctaaagttgatggcctctgacatgctggaggcttgtgtgaagaggactcgtacagcatttgagctgaagttgcaaaaggcgagcaagaccactgatctgagaatccctgcttccgtgtgtacaatgttcaacgtgctcgtagatgctaagaagcagtctactaagctttgtgctctcgatggtggccaggagcaacagtaccactccaagattgacgacctgattgacaatagcgtgaaggagatcattagcctcctggtcagcaagttcgttagtgtcctcgagggcgtacttagcaaactctctaggtacgacgagggcaccttcttcagctctattctgagcttcaccgtgaaggccgcagctaagtatgtggatgtgcctaagcccggaatggacttggcagacacctacattatgttcgttagacagaaccaggatattctacgcgaaaaagtcaacgaggaaatgtacatcgaaaagctgtttgaccagtggtatagctcctccatgaaggtaatttgtgtctggctaaccgacaggctcgacttgcaattgcatatttatcaactgaaaactctgattaagatcgtaaaaaagacttaccgcgatttccgcctgcagggggtgctggaaggcaccctaaactctaaaacatacgacactgtgcataggaggctcaccgtcgaggaggccacagccagcgtcagcgaaggcggaggcctccagggcattaccatgaaagactcggatgaggaggaggagggctag

SEQ ID NO: 195903 - DNA, 1410 bp, Artificial Sequence
  derived and/or modified sequence
atgaatcaggcatcacccgcaaggaaattggaagaaatcttacatctcgcagaactctgtatagaagtgctgcagcaaaatgaggaacaccacgcagagcttaggcatgctttcgcatggtggccagatctactggcggaacatgcagaaaagttctgggccctattcacagttgatatggacacggcgttagaagcccagccacaggactcctgggactcattccctttgtttcaactcttaaacaatttccttagaaatgacaccctactttgcaatggcaagtttcacaaacacctgcaggagatatttgtgccactagtggtgcgctacgtggacttgatggaatcaagcatagcacaatccatccaccgtgggtttgaacaagaaacctggcagcccgttaaaaacattgctaacagtctccctaatgttgccttgccgaaggttcctagtttaccgcttaacctcccgcagattccaaacatatcaacggctagttggatgccctccctgtatgaaagtaccaatggtagcgcaacgagcgaggatttattttggaaactcgacgctctgcagatgtttgttttcgacctgcactggcctgagcaggagttcgcgcatcacctggaacagaggctgaagttgatggcctcagacatgttagaagcttgcgttaagagaaccaggactgcattcgaacttaagttgcagaaggcttctaagaccactgacctgcgtattccagcctcagtatgtacaatgtttaacgtgctcgtggatgccaagaagcaaagcactaagttatgcgcgctcgacggaggtcaggaacagcagtaccattccaagatcgatgacctgatagacaactccgtgaaagaaattatctccctgttggtgtctaaatttgtctcagtgctggaaggagtcctctctaagctctccagatacgacgagggcactttcttctcttcaattctgtcatttacagtgaaggcggctgcaaagtacgtggatgtgccaaaaccgggtatggaccttgccgacacctatattatgttcgttcgccagaatcaggacatcctgcgcgagaaagtcaacgaggagatgtacatagagaagctcttcgaccagtggtactcaagcagcatgaaggtgatttgtgtttggctcactgatagactcgacctccaattgcacatctaccaactcaagacacttataaagatagtaaaaaaaacctatagagactttcgcctccagggggttttagaagggaccctgaacagtaagacctatgacaccgtacatcgcagattgactgtggaggaggctactgccagtgtctccgaaggagggggtctgcagggcatcactatgaaagattccgatgaggaggaagagggatag

SEQ ID NO: 195904 - DNA, 3891 bp, Artificial Sequence
  derived and/or modified sequence
atgctcgacccctcttcctctgaggaggaatcggacgagggtctcgaggaggaaagccgggatgtgttggtggccgctggcagcagccaacgtgccccaccggctccgaccagagagggccgaagggacgcccctggccgagcaggtggaggcggagccgctagaagtgtttccccatccccatcagtgctgtcagagggcagagatgagcctcagagacaactggacgacgaacaggagcgtaggatccggctgcagctgtacgtatttgtggtccgatgcattgcgtatccctttaacgcgaaacagccaactgatatggcacggcgtcaacagaagttgaataagcagcaactgcagctacttaaagaacgctttcaggcgtttttgaacggcgagactcagattgtggctgatgaggccttttgcaatgccgtgcgctcctattacgaagtgttcttgaagagcgatagggttgccagaatggtccagtctggaggatgtagtgctaatgactttagagaggtgttcaaaaagaacatcgagaagcgggtccgcagtctgccggaaatcgatgggctctcgaaggagactgtgctgagttcttggattgctaaatatgacgctatctatcgtggagaagaggacttatgcaaacaacctaatcggatggctctgtccgcggtgtcagaattgatcctcagtaaagaacagctatatgaaatgtttcagcagatactgggtattaaaaaactagaacaccagctgctgtacaatgcctgccagctggataacgctgatgagcaggctgcccaaatcagacgggagcttgacgggaggctccagctcgcggataagatggctaaggagcggaaatttccgaagtttatagctaaggatatggagaatatgtacatcgaagaattaaggagctctgtcaatctcttgatggctaacctcgagtcactccccgtgtcgaagggagggccagaatttaaactgcaaaagctgaagcgcagtcaaaacagcgcatttttagacataggagacgagaacgagattcagctcagcaaatcagacgttgtgctttccttcactcttgaaatcgttatcatggaagttcagggcctgaagtctgtggcccctaacaggattgtatactgcaccatggaagttgagggagaaaagctgcagaccgaccaagccgaggctagccggccacaatggggcacccagggtgatttcaccactacccaccctcgcccagtggtgaaagttaaactgttcaccgagtctacgggcgtcctagccttagaggacaaggagctggggagggtgatcctttatcccacttccaacagctccaaaagcgcggaattgcaccggatggtggtccccaagaattcccaagatagcgacttgaaaataaagctggctgtgagaatggataagcctgctcacatgaagcattccgggtatttgtatgccctaggccagaaggtgtggaaacggtggaagaaaagatatttcgtgctggttcaagtctcccagtacaccttcgcgatgtgttcttatcgcgagaagaagtctgagccacaagaactgatgcagctcgaaggttacaccgtagactacactgatccacaccccggtctgcagggaggttgcatgttcttcaacgctgtgaaagagggggacactgtgatttttgcctccgatgacgagcaggatagaatcctttgggtacaggccatgtacagagctactgggcagtcctataagccagtgcccgcaatccaaacacagaagctcaatcctaaaggcggtaccctgcacgctgacgcgcagctcagtggcaaagatgcagatcggtttcagaaacatggcatggacgaattcatttccgctaatccttgtaagctggaccatgccttccttttccgaatactgcagcgccagaccttagatcacaggctcaatgacagctactcatgtttggggtggttttctccgggtcaagtcttcgtgctggatgaatattgcgcacggtacggcgtgcgcggttgccaccgacacctttgctatcttgcagaactcatggaacacagtgaaaatggcgcagtcatcgacccaaccctgctccactattcgtttgccttttgcgcgagccatgtccacggaaataggccagatggtataggtactgtgagcgtcgaggagaaggaaagatttgaagagataaaggagcggttgtcttctctgctagaaaaccagattagtcatttccggtactgttttccattcggcaggcccgagggagccttgaaggccactctcagcctcctggaacgcgtgttgatgaaggacatagctacacccattcccgcagaagaggtcaaaaaggttgtaaggaagtgtctggaaaaggctgcactgatcaattatactagactcacagaatatgctaaaattgaggagacaatgaatcaagcttcccctgcaagaaagctggaagaaattctgcaccttgctgaattgtgtatcgaagttctacagcaaaacgaggagcatcacgccgaagggagggaggcctttgcatggtggcctgacctgttggccgaacatgccgaaaagttttgggcgttgtttaccgtggacatggacaccgctttggaggctcaaccccaagattcttgggacagtttcccgctgttccagctgctcaacaatttcctgcgcaatgatactttactgtgtaatggcaagtttcacaagcatctccaagagatctttgtgcctctggtcgtgagatacgttgatttgatggagagctccatcgcacagagtattcacaggggtttcgaacaggagacatggcaacccgtgaagaatatcgccaactccttacctaacgtagcccttcccaaggttccttcattgcctctcaacttacctcagataccaaacatttccaccgcatcctggatgccaagcctatacgagtccacaaatggctcagcgacctccgaggacctgttctggaagctggacgcactgcagatgtttgttttcgacctgcattggcccgagcaggaatttgcgcaccacctcgaacagaggttgaagctcatggcctcagacatgctcgaggcttgcgtgaagcgaaccagaacagcttttgaactgaagttgcaaaaagccagcaaaacgaccgacttgagaatcccagcatctgtttgtactatgtttaacgtcctggtcgacgccaagaaacagtctactaaactgtgtgccttagatggcggtcaagagcagcagtatcacagcaagatcgacgaccttatcgacaattccgtcaaagagattatctcactgctcgtctccaaattcgtcagcgtgctggaaggagtgctcagtaagctgtccaggtacgatgagggtacattcttttcttccatcctcagcttcacggtcaaggcggcagcaaagtacgtggatgtgcccaaacccggaatggatctggcagacacttacatcatgtttgtgcgccagaatcaggacatactgcgagagaaggttaacgaggaaatgtatatcgagaagttgttcgatcagtggtattcaagttccatgaaagtaatttgtgtatggttgactgacaggttggatctgcagctgcacatctatcagcttaagaccctgattaagatcgtgaaaaagacataccgagattttagacttcagggtgttctggagggtacactcaactctaaaacctacgacaccgtgcatcggagacttaccgtcgaagaagccacggcaagcgtaagtgaggggggtggactgcaggggatcacaatgaaggacagcgatgaagaagaggaggggtag

SEQ ID NO: 195905 - DNA, 6045 bp, Artificial Sequence
  derived and/or modified sequence
attcaattccacgtgttgcttgttgtaggcgccacaggttccccacctgcgtccgggcgctcgggcggctccgcctctgccggcgggctctggggaaccgctgggtcggcgcgcccggggctggcggagcaattcctgaggcgcccaagctcacccccaacgctaactccgcctattcagtcccggcggctccccctctcccccctcccaatcctcctcccggctcctgcccgcccctttcgccctggtggtaggaaacactcctgaatctaactcgacgtgtccggaaagccctggccagttttcctttcgttctgcggccgctgcagccagccccgcggctccctcagacccgcgggcgcagccgccgggggtgaggcgcttggggaccgcgggccgagcggcggggatccccgagcaccatgctggacccgtcttccagcgaagaggagtcggacgaggggctggaagaggaaagccgcgatgtgctggtggcagccggcagctcgcagcgagctcctccagccccgactcgggaagggcggcgggacgcgccggggcgcgcgggcggcggcggcgcggccagatctgtgagcccgagcccctctgtgctcagcgaggggcgagacgagccccagcggcagctggacgatgagcaggagcggaggatccgcctgcagctctacgtcttcgtcgtgaggtgcatcgcgtaccccttcaacgccaagcagcccaccgacatggcccggaggcagcagaagcttaacaaacaacagttgcagttactgaaagaacggttccaggccttcctcaatggggaaacccaaattgtagctgacgaagcattttgcaacgcagttcggagttattatgaggtttttctaaagagtgaccgagtggccagaatggtacagagtggagggtgttctgctaatgacttcagagaagtatttaagaaaaacatagaaaaacgtgtgcggagtttgccagaaatagatggcttgagcaaagagacagtgttgagctcatggatagccaaatatgatgccatttacagaggtgaagaggacttgtgcaaacagccaaatagaatggccctaagtgcagtgtctgaacttattctgagcaaggaacaactctatgaaatgtttcagcagattctgggtattaaaaaactggaacaccagctcctttataatgcatgtcagctggataacgcagatgaacaagcagcccagatcagaagggaacttgatggccggctgcaattggcagataaaatggcaaaggaaagaaaattccccaaatttatagcaaaagatatggagaatatgtatatagaagagttgcggtcttcagtgaatttgctaatggccaatttggaaagtcttccagtttcgaaaggtggtccggaatttaaattacaaaaattaaaacgttcacagaactctgcatttttggacataggagatgagaatgagattcagctgtcaaagtccgacgtggtactgtcattcaccttagagattgtcataatggaagtgcaaggcctgaagtcagttgctcccaatcgaattgtttactgtacaatggaagtggaaggagaaaaacttcagacagaccaggccgaagcctcaaggccacaatgggggactcaaggagatttcaccaccacccatcctcggcctgtggtcaaagtgaaactcttcacagaaagcactggagttctggccctggaagataaagaactgggaagggtgatattatacccaacttctaatagctccaaatcagctgaattacaccgaatggtagttccaaaaaatagccaggattctgacttaaaaatcaaactggcagtgcgaatggataaaccagcacatatgaagcatagtggatatctgtatgcccttggacagaaggtttggaaaagatggaaaaaacgttactttgttctagttcaggttagccaatatacctttgctatgtgcagttatagagaaaagaagtctgaaccacaagaattaatgcagcttgaaggctatactgtggattataccgatccccacccaggccttcagggtggttgtatgttctttaatgctgttaaagaaggagatactgtaatctttgccagtgatgatgaacaggacagaatattatgggttcaagccatgtatagggccacaggtcaatcatataaaccagttcctgcaattcaaacccagaaactgaatcctaaaggaggaactctccatgcagatgctcagctttctgaatttacagatgcagatcgttttcagaaacatggtatggatgagtttatttctgcaaacccctgcaagcttgatcatgccttcctttttagaatactccagaggcagactttggatcacagactgaatgattcctattcttgcttgggatggtttagccctggccaagtctttgtgttagatgagtactgtgcccgttatggtgtgagaggctgtcacagacatctctgctaccttgcagaactgatggaacattcagaaaatggtgctgtcattgaccctaccctgctccattacagctttgcattctgtgcctctcatgtgcacggcaacaggcctgatggaattgggactgtttcagtggaagaaaaagaaagatttgaggagataaaagagagactctcttcccttttagaaaatcagataagccatttcagatactgttttccctttggacgacctgaaggtgctctaaaagctacactttcattacttgaaagggttttaatgaaagatattgccactcccataccagcagaagaggtgaagaaagtggtcagaaaatgtctcgagaaagctgccttgatcaattacactagactcacagaatatgccaaaatagaagagaccatgaaccaggcatctcctgctagaaagctggaagagattcttcatctggcagagctctgcatagaagtcttacagcagaatgaagagcatcatgcagaggcatttgcctggtggcctgatttattggctgaacatgcagagaaattttgggctttatttacagtggatatggacactgcactagaggctcaaccgcaagactcctgggatagttttcctcttttccaactgcttaataatttcctccgaaatgacacacttttgtgtaatggaaaatttcacaaacacttgcaagaaatctttgtacccttggttgtccgctatgtggatctcatggagtcttccatcgcccagtcaattcacagaggttttgagcaggagacatggcagcctgtcaagaatatcgccaacagtcttcccaatgtagctcttccaaaagttccaagtctgcctcttaatcttccacagattcctaacatttctactgcttcgtggatgccttctttatatgagtccaccaatggctcagcaacatcagaagaccttttttggaagcttgatgcactgcaaatgtttgtctttgatctgcactggccagaacaggaatttgcccaccacttagagcaaagacttaaactaatggccagtgatatgctagaggcctgtgtcaaaagaacaagaactgcatttgaactcaagctacaaaaggcaagcaaaacaactgacttgcgcattccagcttccgtttgcactatgtttaatgtattagtcgatgccaaaaagcaaagcaccaaactctgtgccctggatggaggacaagagcaacagtaccattcaaaaatagatgatctgatcgacaacagtgtaaaagaaatcatttcactgttagtttcaaagtttgtttcagtgttggaaggcgtgttgtctaagctgtcaaggtatgatgaaggcactttcttttcatccattctgtcattcactgtgaaagcagctgcaaaatatgttgatgttccaaaaccaggaatggatctggcagacacctatattatgtttgttcggcaaaaccaagatattcttcgagaaaaggtcaatgaggaaatgtatatagaaaagttatttgatcaatggtacagcagttccatgaaagtcatttgcgtgtggttgactgatagattagacctccaactccatatttaccagctgaagacgctcatcaagattgtgaagaaaacctacagggactttcgattgcagggtgtgttggaaggaacactgaacagtaagacttatgatactgtgcacagacgtttaacagtagaggaggccacagcctctgtttcagaaggaggaggacttcagggcattactatgaaagacagtgacgaagaagaagaaggctgatatcacacagctttgcagaaggaaggaagaccttgatcgacattgttttttatttttttaaccttgtccttgtaattacattcattgtttgttttggccaaataaaaatgcttgtatttctttaaaaagtaagcctgaatgtagagtaaaaggggaaatgccaagattttggggtttttttgtttcctttttttgtttgtttgtttgtttgtttttttggagaagagcatcctcttttgtgtagtttgacctaaaaatgaaccttggctctgcttgtgatcagaacatgaacttttttttttaaagaagatttgagcatttttctgtaatcacatcaaaatgatgttttctgtgtaaagcgagatacatatttctcataatgcagcattgtgagaagtcagttcggaccactgcaccaacactgtcgtatccttgttaaaatggtgtgtaccttacaaattataatttatgtgccaggttcgttttgtacttaatttgctattattgtgatgtgtataaaatctttaatcttggttcttagtactttgaattggtctacaggtatattcctgggatgaaaggattgccaaacccaaatatagactagattatccaatgggtttgtgtctttgttccattctcaacatttcttctttcaactataagtaatccccaggtgtggggtagcaagtgtgcttccgtcaagataccatattctcctgctccagtataacagcttgcaggcaataaaaatctatttgctcataactacttctgtatttattagacttatatagagcaaatgcagtaaaagaggtttgcagtgtttcaaacatcccaactatctgactctgtgtttttgtttcttgagttttttgtttgttttgtttgtaatattttgtttttaatcaaatgagtaaaagatagtaacactgactgttctttgtacctaataggcacatacattgttaaaagaattactatgacagcatatttccatagcagaggaaatatatatttcatatattattagttaatattagtaatcaatgttaactaataattagtaatgttagtaatattaactagtaattcacattattagtggttctctcaaaatattttcttgctagggtttgagagataattgtattatgttgcgtaagttctctatgaattatttttgtgatatttcccaaaacatattggcagattgtgctactgcatttattaataagtaatttttaaatgaaggcagttaatgcagaataagtggaggtatccctgcatttatgaaaacgtttattctgaaactttagaaatgaaacaacttggacctccagattcgttctcccatggtgtaataagtggtcgttaggtacctagactagccttaaaaatctatttaatctacagttactatttagcattgttttggctcattttctgggccctagggctaagataacaaacaaggaaatttcttccttcttccgggattaaagactaactctaccaactcactatctttgaaaggcagtttgggaatgttctccctccttttcttctctattcacacaccaaatactattttctccaaaccctcaaatgtccagtcatgctatcccaaactctccaatggcaccatccccaagcttgctgttccacgacacattgctctgtacttagtaattacccacccttcttttcctttcaataaaatgtccatttccttgat

SEQ ID NO: 195906 - DNA, 4073 bp, Artificial Sequence
  derived and/or modified sequence
ggcggggatccccgagcaccatgctggacccgtcttccagcgaagaggagtcggacgaggggctggaagaggaaagccgcgatgtgctggtggcagccggcagctcgcagcgagctcctccagccccgactcgggaagggcggcgggacgcgccggggcgcgcgggcggcggcggcgcggccagatctgtgagcccgagcccctctgtgctcagcgaggggcgagacgagccccagcggcagctggacgatgagcaggagcggaggatccgcctgcagctctacgtcttcgtcgtgaggtgcatcgcgtaccccttcaacgccaagcagcccaccgacatggcccggaggcagcagaagcttaacaaacaacagttgcagttactgaaagaacggttccaggccttcctcaatggggaaacccaaattgtagctgacgaagcattttgcaacgcagttcggagttattatgaggtttttctaaagagtgaccgagtggccagaatggtacagagtggagggtgttctgctaatgacttcagagaagtatttaagaaaaacatagaaaaacgtgtgcggagtttgccagaaatagatggcttgagcaaagagacagtgttgagctcatggatagccaaatatgatgccatttacagaggtgaagaggacttgtgcaaacagccaaatagaatggccctaagtgcagtgtctgaacttattctgagcaaggaacaactctatgaaatgtttcagcagattctgggtattaaaaaactggaacaccagctcctttataatgcatgtcagctggataacgcagatgaacaagcagcccagatcagaagggaacttgatggccggctgcaattggcagataaaatggcaaaggaaagaaaattccccaaatttatagcaaaagatatggagaatatgtatatagaagagttgcggtcttcagtgaatttgctaatggccaatttggaaagtcttccagtttcgaaaggtggtccggaatttaaattacaaaaattaaaacgttcacagaactctgcatttttggacataggagatgagaatgagattcagctgtcaaagtccgacgtggtactgtcattcaccttagagattgtcataatggaagtgcaaggcctgaagtcagttgctcccaatcgaattgtttactgtacaatggaagtggaaggagaaaaacttcagacagaccaggccgaagcctcaaggccacaatgggggactcaaggagatttcaccaccacccatcctcggcctgtggtcaaagtgaaactcttcacagaaagcactggagttctggccctggaagataaagaactgggaagggtgatattatacccaacttctaatagctccaaatcagctgaattacaccgaatggtagttccaaaaaatagccaggattctgacttaaaaatcaaactggcagtgcgaatggataaaccagcacatatgaagcatagtggatatctgtatgcccttggacagaaggtttggaaaagatggaaaaaacgttactttgttctagttcaggttagccaatatacctttgctatgtgcagttatagagaaaagaagtctgaaccacaagaattaatgcagcttgaaggctatactgtggattataccgatccccacccaggccttcagggtggttgtatgttctttaatgctgttaaagaaggagatactgtaatctttgccagtgatgatgaacaggacagaatattatgggttcaagccatgtatagggccacaggtcaatcatataaaccagttcctgcaattcaaacccagaaactgaatcctaaaggaggaactctccatgcagatgctcagctttctggtaaagatgcagatcgttttcagaaacatggtatggatgagtttatttctgcaaacccctgcaagcttgatcatgccttcctttttagaatactccagaggcagactttggatcacagactgaatgattcctattcttgcttgggatggtttagccctggccaagtctttgtgttagatgagtactgtgcccgttatggtgtgagaggctgtcacagacatctctgctaccttgcagaactgatggaacattcagaaaatggtgctgtcattgaccctaccctgctccattacagctttgcattctgtgcctctcatgtgcacggcaacaggcctgatggaattgggactgtttcagtggaagaaaaagaaagatttgaggagataaaagagagactctcttcccttttagaaaatcagataagccatttcagatactgttttccctttggacgacctgaaggtgctctaaaagctacactttcattacttgaaagggttttaatgaaagatattgccactcccataccagcagaagaggtgaagaaagtggtcagaaaatgtctcgagaaagctgccttgatcaattacactagactcacagaatatgccaaaatagaagagaccatgaaccaggcatctcctgctagaaagctggaagagattcttcatctggcagagctctgcatagaagtcttacagcagaatgaagagcatcatgcagagggaagagaggcatttgcctggtggcctgatttattggctgaacatgcagagaaattttgggctttatttacagtggatatggacactgcactagaggctcaaccgcaagactcctgggatagttttcctcttttccaactgcttaataatttcctccgaaatgacacacttttgtgtaatggaaaatttcacaaacacttgcaagaaatctttgtacccttggttgtccgctatgtggatctcatggagtcttccatcgcccagtcaattcacagaggttttgagcaggagacatggcagcctgtcaagaatatcgccaacagtcttcccaatgtagctcttccaaaagttccaagtctgcctcttaatcttccacagattcctaacatttctactgcttcgtggatgccttctttatatgagtccaccaatggctcagcaacatcagaagaccttttttggaagcttgatgcactgcaaatgtttgtctttgatctgcactggccagaacaggaatttgcccaccacttagagcaaagacttaaactaatggccagtgatatgctagaggcctgtgtcaaaagaacaagaactgcatttgaactcaagctacaaaaggcaagcaaaacaactgacttgcgcattccagcttccgtttgcactatgtttaatgtattagtcgatgccaaaaagcaaagcaccaaactctgtgccctggatggaggacaagagcaacagtaccattcaaaaatagatgatctgatcgacaacagtgtaaaagaaatcatttcactgttagtttcaaagtttgtttcagtgttggaaggcgtgttgtctaagctgtcaaggtatgatgaaggcactttcttttcatccattctgtcattcactgtgaaagcagctgcaaaatatgttgatgttccaaaaccaggaatggatctggcagacacctatattatgtttgttcggcaaaaccaagatattcttcgagaaaaggtcaatgaggaaatgtatatagaaaagttatttgatcaatggtacagcagttccatgaaagtcatttgcgtgtggttgactgatagattagacctccaactccatatttaccagctgaagacgctcatcaagattgtgaagaaaacctacagggactttcgattgcagggtgtgttggaaggaacactgaacagtaagacttatgatactgtgcacagacgtttaacagtagaggaggccacagcctctgtttcagaaggaggaggacttcagggcattactatgaaagacagtgacgaagaagaagaaggctgatatcacacagctttgcagaaggaaggaagaccttgatcgacattgttttttatttttttaaccttgtccttgtaattacattcattgtttgttttggccaaataaaaatgcttgtatttctttaaaaagtaagcctgaatgtagagtaaaaggggaaatgcc

SEQ ID NO: 195907 - DNA, 3885 bp, Artificial Sequence
  derived and/or modified sequence
atgctggaccccagcagcagcgaggaggagagcgacgagggcctggaggaggagagcagagacgtgctggtggccgccggcagcagccagagagccccccccgcccccaccagagagggcagaagagacgcccccggcagagccggcggcggcggcgccgccagaagcgtgagccccagccccagcgtgctgagcgagggcagagacgagccccagagacagctggacgacgagcaggagagaagaatcagactgcagctgtacgtgttcgtggtgagatgcatcgcctaccccttcaacgccaagcagcccaccgacatggccagaagacagcagaagctgaacaagcagcagctgcagctgctgaaggagagattccaggccttcctgaacggcgagacccagatcgtggccgacgaggccttctgcaacgccgtgagaagctactacgaggtgttcctgaagagcgacagagtggccagaatggtgcagagcggcggctgcagcgccaacgacttcagagaggtgttcaagaagaacatcgagaagagagtgagaagcctgcccgagatcgacggcctgagcaaggagaccgtgctgagcagctggatcgccaagtacgacgccatctacagaggcgaggaggacctgtgcaagcagcccaacagaatggccctgagcgccgtgagcgagctgatcctgagcaaggagcagctgtacgagatgttccagcagatcctgggcatcaagaagctggagcaccagctgctgtacaacgcctgccagctggacaacgccgacgagcaggccgcccagatcagaagagagctggacggcagactgcagctggccgacaagatggccaaggagagaaagttccccaagttcatcgccaaggacatggagaacatgtacatcgaggagctgagaagcagcgtgaacctgctgatggccaacctggagagcctgcccgtgagcaagggcggccccgagttcaagctgcagaagctgaagagaagccagaacagcgccttcctggacatcggcgacgagaacgagatccagctgagcaagagcgacgtggtgctgagcttcaccctggagatcgtgatcatggaggtgcagggcctgaagagcgtggcccccaacagaatcgtgtactgcaccatggaggtggagggcgagaagctgcagaccgaccaggccgaggccagcagaccccagtggggcacccagggcgacttcaccaccacccaccccagacccgtggtgaaggtgaagctgttcaccgagagcaccggcgtgctggccctggaggacaaggagctgggcagagtgatcctgtaccccaccagcaacagcagcaagagcgccgagctgcacagaatggtggtgcccaagaacagccaggacagcgacctgaagatcaagctggccgtgagaatggacaagcccgcccacatgaagcacagcggctacctgtacgccctgggccagaaggtgtggaagagatggaagaagagatacttcgtgctggtgcaggtgagccagtacaccttcgccatgtgcagctacagagagaagaagagcgagccccaggagctgatgcagctggagggctacaccgtggactacaccgacccccaccccggcctgcagggcggctgcatgttcttcaacgccgtgaaggagggcgacaccgtgatcttcgccagcgacgacgagcaggacagaatcctgtgggtgcaggccatgtacagagccaccggccagagctacaagcccgtgcccgccatccagacccagaagctgaaccccaagggcggcaccctgcacgccgacgcccagctgagcgagttcaccgacgccgacagattccagaagcacggcatggacgagttcatcagcgccaacccctgcaagctggaccacgccttcctgttcagaatcctgcagagacagaccctggaccacagactgaacgacagctacagctgcctgggctggttcagccccggccaggtgttcgtgctggacgagtactgcgccagatacggcgtgagaggctgccacagacacctgtgctacctggccgagctgatggagcacagcgagaacggcgccgtgatcgaccccaccctgctgcactacagcttcgccttctgcgccagccacgtgcacggcaacagacccgacggcatcggcaccgtgagcgtggaggagaaggagagattcgaggagatcaaggagagactgagcagcctgctggagaaccagatcagccacttcagatactgcttccccttcggcagacccgagggcgccctgaaggccaccctgagcctgctggagagagtgctgatgaaggacatcgccacccccatccccgccgaggaggtgaagaaggtggtgagaaagtgcctggagaaggccgccctgatcaactacaccagactgaccgagtacgccaagatcgaggagaccatgaaccaggccagccccgccagaaagctggaggagatcctgcacctggccgagctgtgcatcgaggtgctgcagcagaacgaggagcaccacgccgaggccttcgcctggtggcccgacctgctggccgagcacgccgagaagttctgggccctgttcaccgtggacatggacaccgccctggaggcccagccccaggacagctgggacagcttccccctgttccagctgctgaacaacttcctgagaaacgacaccctgctgtgcaacggcaagttccacaagcacctgcaggagatcttcgtgcccctggtggtgagatacgtggacctgatggagagcagcatcgcccagagcatccacagaggcttcgagcaggagacctggcagcccgtgaagaacatcgccaacagcctgcccaacgtggccctgcccaaggtgcccagcctgcccctgaacctgccccagatccccaacatcagcaccgccagctggatgcccagcctgtacgagagcaccaacggcagcgccaccagcgaggacctgttctggaagctggacgccctgcagatgttcgtgttcgacctgcactggcccgagcaggagttcgcccaccacctggagcagagactgaagctgatggccagcgacatgctggaggcctgcgtgaagagaaccagaaccgccttcgagctgaagctgcagaaggccagcaagaccaccgacctgagaatccccgccagcgtgtgcaccatgttcaacgtgctggtggacgccaagaagcagagcaccaagctgtgcgccctggacggcggccaggagcagcagtaccacagcaagatcgacgacctgatcgacaacagcgtgaaggagatcatcagcctgctggtgagcaagttcgtgagcgtgctggagggcgtgctgagcaagctgagcagatacgacgagggcaccttcttcagcagcatcctgagcttcaccgtgaaggccgccgccaagtacgtggacgtgcccaagcccggcatggacctggccgacacctacatcatgttcgtgagacagaaccaggacatcctgagagagaaggtgaacgaggagatgtacatcgagaagctgttcgaccagtggtacagcagcagcatgaaggtgatctgcgtgtggctgaccgacagactggacctgcagctgcacatctaccagctgaagaccctgatcaagatcgtgaagaagacctacagagacttcagactgcagggcgtgctggagggcaccctgaacagcaagacctacgacaccgtgcacagaagactgaccgtggaggaggccaccgccagcgtgagcgagggcggcggcctgcagggcatcaccatgaaggacagcgacgaggaggaggagggctag

SEQ ID NO: 195908 - DNA, 1410 bp, Artificial Sequence
  derived and/or modified sequence
atgaaccaggccagccccgccagaaagctggaggagatcctgcacctggccgagctgtgcatcgaggtgctgcagcagaacgaggagcaccacgccgagctgagacacgccttcgcctggtggcccgacctgctggccgagcacgccgagaagttctgggccctgttcaccgtggacatggacaccgccctggaggcccagccccaggacagctgggacagcttccccctgttccagctgctgaacaacttcctgagaaacgacaccctgctgtgcaacggcaagttccacaagcacctgcaggagatcttcgtgcccctggtggtgagatacgtggacctgatggagagcagcatcgcccagagcatccacagaggcttcgagcaggagacctggcagcccgtgaagaacatcgccaacagcctgcccaacgtggccctgcccaaggtgcccagcctgcccctgaacctgccccagatccccaacatcagcaccgccagctggatgcccagcctgtacgagagcaccaacggcagcgccaccagcgaggacctgttctggaagctggacgccctgcagatgttcgtgttcgacctgcactggcccgagcaggagttcgcccaccacctggagcagagactgaagctgatggccagcgacatgctggaggcctgcgtgaagagaaccagaaccgccttcgagctgaagctgcagaaggccagcaagaccaccgacctgagaatccccgccagcgtgtgcaccatgttcaacgtgctggtggacgccaagaagcagagcaccaagctgtgcgccctggacggcggccaggagcagcagtaccacagcaagatcgacgacctgatcgacaacagcgtgaaggagatcatcagcctgctggtgagcaagttcgtgagcgtgctggagggcgtgctgagcaagctgagcagatacgacgagggcaccttcttcagcagcatcctgagcttcaccgtgaaggccgccgccaagtacgtggacgtgcccaagcccggcatggacctggccgacacctacatcatgttcgtgagacagaaccaggacatcctgagagagaaggtgaacgaggagatgtacatcgagaagctgttcgaccagtggtacagcagcagcatgaaggtgatctgcgtgtggctgaccgacagactggacctgcagctgcacatctaccagctgaagaccctgatcaagatcgtgaagaagacctacagagacttcagactgcagggcgtgctggagggcaccctgaacagcaagacctacgacaccgtgcacagaagactgaccgtggaggaggccaccgccagcgtgagcgagggcggcggcctgcagggcatcaccatgaaggacagcgacgaggaggaggagggctag

SEQ ID NO: 195909 - DNA, 3891 bp, Artificial Sequence
  derived and/or modified sequence
atgctggaccccagcagcagcgaggaggagagcgacgagggcctggaggaggagagcagagacgtgctggtggccgccggcagcagccagagagccccccccgcccccaccagagagggcagaagagacgcccccggcagagccggcggcggcggcgccgccagaagcgtgagccccagccccagcgtgctgagcgagggcagagacgagccccagagacagctggacgacgagcaggagagaagaatcagactgcagctgtacgtgttcgtggtgagatgcatcgcctaccccttcaacgccaagcagcccaccgacatggccagaagacagcagaagctgaacaagcagcagctgcagctgctgaaggagagattccaggccttcctgaacggcgagacccagatcgtggccgacgaggccttctgcaacgccgtgagaagctactacgaggtgttcctgaagagcgacagagtggccagaatggtgcagagcggcggctgcagcgccaacgacttcagagaggtgttcaagaagaacatcgagaagagagtgagaagcctgcccgagatcgacggcctgagcaaggagaccgtgctgagcagctggatcgccaagtacgacgccatctacagaggcgaggaggacctgtgcaagcagcccaacagaatggccctgagcgccgtgagcgagctgatcctgagcaaggagcagctgtacgagatgttccagcagatcctgggcatcaagaagctggagcaccagctgctgtacaacgcctgccagctggacaacgccgacgagcaggccgcccagatcagaagagagctggacggcagactgcagctggccgacaagatggccaaggagagaaagttccccaagttcatcgccaaggacatggagaacatgtacatcgaggagctgagaagcagcgtgaacctgctgatggccaacctggagagcctgcccgtgagcaagggcggccccgagttcaagctgcagaagctgaagagaagccagaacagcgccttcctggacatcggcgacgagaacgagatccagctgagcaagagcgacgtggtgctgagcttcaccctggagatcgtgatcatggaggtgcagggcctgaagagcgtggcccccaacagaatcgtgtactgcaccatggaggtggagggcgagaagctgcagaccgaccaggccgaggccagcagaccccagtggggcacccagggcgacttcaccaccacccaccccagacccgtggtgaaggtgaagctgttcaccgagagcaccggcgtgctggccctggaggacaaggagctgggcagagtgatcctgtaccccaccagcaacagcagcaagagcgccgagctgcacagaatggtggtgcccaagaacagccaggacagcgacctgaagatcaagctggccgtgagaatggacaagcccgcccacatgaagcacagcggctacctgtacgccctgggccagaaggtgtggaagagatggaagaagagatacttcgtgctggtgcaggtgagccagtacaccttcgccatgtgcagctacagagagaagaagagcgagccccaggagctgatgcagctggagggctacaccgtggactacaccgacccccaccccggcctgcagggcggctgcatgttcttcaacgccgtgaaggagggcgacaccgtgatcttcgccagcgacgacgagcaggacagaatcctgtgggtgcaggccatgtacagagccaccggccagagctacaagcccgtgcccgccatccagacccagaagctgaaccccaagggcggcaccctgcacgccgacgcccagctgagcggcaaggacgccgacagattccagaagcacggcatggacgagttcatcagcgccaacccctgcaagctggaccacgccttcctgttcagaatcctgcagagacagaccctggaccacagactgaacgacagctacagctgcctgggctggttcagccccggccaggtgttcgtgctggacgagtactgcgccagatacggcgtgagaggctgccacagacacctgtgctacctggccgagctgatggagcacagcgagaacggcgccgtgatcgaccccaccctgctgcactacagcttcgccttctgcgccagccacgtgcacggcaacagacccgacggcatcggcaccgtgagcgtggaggagaaggagagattcgaggagatcaaggagagactgagcagcctgctggagaaccagatcagccacttcagatactgcttccccttcggcagacccgagggcgccctgaaggccaccctgagcctgctggagagagtgctgatgaaggacatcgccacccccatccccgccgaggaggtgaagaaggtggtgagaaagtgcctggagaaggccgccctgatcaactacaccagactgaccgagtacgccaagatcgaggagaccatgaaccaggccagccccgccagaaagctggaggagatcctgcacctggccgagctgtgcatcgaggtgctgcagcagaacgaggagcaccacgccgagggcagagaggccttcgcctggtggcccgacctgctggccgagcacgccgagaagttctgggccctgttcaccgtggacatggacaccgccctggaggcccagccccaggacagctgggacagcttccccctgttccagctgctgaacaacttcctgagaaacgacaccctgctgtgcaacggcaagttccacaagcacctgcaggagatcttcgtgcccctggtggtgagatacgtggacctgatggagagcagcatcgcccagagcatccacagaggcttcgagcaggagacctggcagcccgtgaagaacatcgccaacagcctgcccaacgtggccctgcccaaggtgcccagcctgcccctgaacctgccccagatccccaacatcagcaccgccagctggatgcccagcctgtacgagagcaccaacggcagcgccaccagcgaggacctgttctggaagctggacgccctgcagatgttcgtgttcgacctgcactggcccgagcaggagttcgcccaccacctggagcagagactgaagctgatggccagcgacatgctggaggcctgcgtgaagagaaccagaaccgccttcgagctgaagctgcagaaggccagcaagaccaccgacctgagaatccccgccagcgtgtgcaccatgttcaacgtgctggtggacgccaagaagcagagcaccaagctgtgcgccctggacggcggccaggagcagcagtaccacagcaagatcgacgacctgatcgacaacagcgtgaaggagatcatcagcctgctggtgagcaagttcgtgagcgtgctggagggcgtgctgagcaagctgagcagatacgacgagggcaccttcttcagcagcatcctgagcttcaccgtgaaggccgccgccaagtacgtggacgtgcccaagcccggcatggacctggccgacacctacatcatgttcgtgagacagaaccaggacatcctgagagagaaggtgaacgaggagatgtacatcgagaagctgttcgaccagtggtacagcagcagcatgaaggtgatctgcgtgtggctgaccgacagactggacctgcagctgcacatctaccagctgaagaccctgatcaagatcgtgaagaagacctacagagacttcagactgcagggcgtgctggagggcaccctgaacagcaagacctacgacaccgtgcacagaagactgaccgtggaggaggccaccgccagcgtgagcgagggcggcggcctgcagggcatcaccatgaaggacagcgacgaggaggaggagggctag

SEQ ID NO: 195910 - protein, 448 aa, Artificial Sequence
  derived and/or modified sequence
MRENVVVSNMERESGKPVAVVAVVTEPWFTQRYREYLQRQKLFDTQHRVEKMPDGSVALPVLGETLPEQHLQELRNRVAPGSPCMLTQLPDPVPSKRAQGCSPAQKLCLEVSRWVEGRGVKWSAELEADLPRSWQRHGNLLLLSEDCFQAKQWKNLGPELWETVALALGVQRLAKRGRVSPDGTRTPAVTLLLGDHGWVEHVDNGIRYKFDVTQCMFSFGNITEKLRVASLSCAGEVLVDLYAGIGYFTLPFLVHAGAAFVHACEWNPHAVVALRNNLEINGVADRCQIHFGDNRKLKLSNIADRVILGLIPSSEEGWPIACQVLRQDAGGILHIHQNVESFPGKNLQALGVSKVEKEHWLYPQQITTNQWKNGATRDSRGKMLSPATKPEWQRWAESAETRIATLLQQVHGKPWKTQILHIQPVKSYAPHVDHIVLDLECCPCPSVG

SEQ ID NO: 195911 - DNA, 1347 bp, Artificial Sequence
  derived and/or modified sequence
atgagagagaacgtggtggtgagcaacatggagagagagagcggcaagcccgtggccgtggtggccgtggtgaccgagccctggttcacccagagatacagagagtacctgcagagacagaagctgttcgacacccagcacagagtggagaagatgcccgacggcagcgtggccctgcccgtgctgggcgagaccctgcccgagcagcacctgcaggagctgagaaacagagtggcccccggcagcccctgcatgctgacccagctgcccgaccccgtgcccagcaagagagcccagggctgcagccccgcccagaagctgtgcctggaggtgagcagatgggtggagggcagaggcgtgaagtggagcgccgagctggaggccgacctgcccagaagctggcagagacacggcaacctgctgctgctgagcgaggactgcttccaggccaagcagtggaagaacctgggccccgagctgtgggagaccgtggccctggccctgggcgtgcagagactggccaagagaggcagagtgagccccgacggcaccagaacccccgccgtgaccctgctgctgggcgaccacggctgggtggagcacgtggacaacggcatcagatacaagttcgacgtgacccagtgcatgttcagcttcggcaacatcaccgagaagctgagagtggccagcctgagctgcgccggcgaggtgctggtggacctgtacgccggcatcggctacttcaccctgcccttcctggtgcacgccggcgccgccttcgtgcacgcctgcgagtggaacccccacgccgtggtggccctgagaaacaacctggagatcaacggcgtggccgacagatgccagatccacttcggcgacaacagaaagctgaagctgagcaacatcgccgacagagtgatcctgggcctgatccccagcagcgaggagggctggcccatcgcctgccaggtgctgagacaggacgccggcggcatcctgcacatccaccagaacgtggagagcttccccggcaagaacctgcaggccctgggcgtgagcaaggtggagaaggagcactggctgtacccccagcagatcaccaccaaccagtggaagaacggcgccaccagagacagcagaggcaagatgctgagccccgccaccaagcccgagtggcagagatgggccgagagcgccgagaccagaatcgccaccctgctgcagcaggtgcacggcaagccctggaagacccagatcctgcacatccagcccgtgaagagctacgccccccacgtggaccacatcgtgctggacctggagtgctgcccctgccccagcgtgggctag

SEQ ID NO: 195912 - DNA, 1347 bp, Artificial Sequence
  derived and/or modified sequence
atgagggaaaacgtggttgtgtcaaatatggagcgagaatccggcaagcctgttgctgttgtggctgtggtcacggaaccatggtttactcagaggtacagagagtatctccaaaggcaaaagctttttgacacccagcacagagtggagaagatgcctgatgggtctgtggccctcccggtattaggagagacgcttcctgaacaacacctgcaggaacttcgcaatcgtgttgcccccggcagcccttgcatgctgactcagcttccagaccccgttccatcaaaacgtgctcagggttgcagcccagcccagaaactctgtttagaggtttcccgatgggtcgagggacggggcgtcaagtggtccgcggaactcgaagctgatcttccccgcagttggcaaaggcacggaaatctactcctcctttccgaggattgtttccaagctaaacagtggaaaaacctcgggcccgaactctgggagaccgtggcactagcattgggagttcagagattggccaagagaggacgggtgtctcccgacggaactcggactccggccgtaactctgctgctcggcgaccacggttgggttgaacacgtcgacaatggcatcagatacaagtttgatgtcacccagtgtatgttttctttcgggaatatcaccgagaagcttagagtggctagtctgagttgtgccggcgaagttttagttgacctttatgccgggattggctattttactctcccgttcctagtgcatgcaggggccgcatttgtgcacgcttgtgaatggaacccgcacgccgtggtcgccctgcggaacaatctggagattaatggggtggccgaccgatgccagatacactttggggacaaccggaagctcaagctgagcaacatagcagaccgcgtcatcctgggcctgattccaagctccgaagaaggatggccgatcgcttgccaggtcctgcgccaggatgccgggggcattcttcatatccaccagaatgtggagagtttcccggggaaaaacttgcaagccctgggagtgagcaaggtcgagaaggagcactggctgtatccgcagcagatcacaaccaaccagtggaagaatggcgcgaccagagatagtagaggaaaaatgctatcccccgctacaaaacccgagtggcagcggtgggccgagagcgcggagacacgaatcgccaccctgctgcaacaagtgcacggcaagccctggaaaacgcagatcctgcacatacaaccagtgaaaagctatgctccccacgtagaccatattgttctcgatcttgagtgttgcccttgccctagcgtgggatag

SEQ ID NO: 195913 - DNA, 1347 bp, Artificial Sequence
  derived and/or modified sequence
atgagagaaaatgtggtggtgagcaacatggagcgggagagcggcaagcctgtggccgtggtggccgtggtgacagagccctggttcacccagcgctaccgggagtacctgcagaggcagaagctgtttgacacccagcaccgggtggagaagatgccagatggctctgtggccctgcctgtgctgggggagaccctgcctgagcagcacctgcaggagctgaggaacagagtggcccctggcagcccctgcatgctgacccagctgcctgaccctgtgcccagcaagagggcccagggctgcagccctgcccagaagctgtgcctggaggtgagccgctgggtggagggccggggcgtgaagtggagcgctgagctggaggccgacctgcccaggtcctggcagagacatggcaacctgctgctgctgtctgaggactgcttccaggccaagcagtggaagaacctgggccctgagctgtgggagaccgtggccctggccctgggcgtgcagaggctggccaagaggggccgggtgtccccagatggcaccaggaccccagctgtgaccctgctgctgggggaccacggctgggtggagcacgtggacaatggcatccgctacaagtttgatgtgacccagtgcatgttctcctttggaaacatcacagagaagctgcgggtggccagcctgagctgtgccggggaggtgctggtggacctgtatgccggcatcggctacttcaccctgcccttcctggtgcacgccggggccgcctttgtgcacgcctgtgagtggaacccccatgctgtggtggccctgaggaacaacctggagatcaatggagtggccgaccgctgccagatccactttggagacaacaggaagctgaagctgagcaacattgctgacagagtcatcctgggcctcatccccagcagcgaggagggctggcccatcgcctgccaggtgctgcggcaggatgctgggggcatcctgcacatccaccagaatgtggagagcttccctgggaagaacctgcaggccctgggcgtgtccaaggtggagaaggagcactggctgtacccccagcagatcaccaccaaccagtggaagaatggagccacccgggacagccggggcaagatgctgagccctgccaccaagccagagtggcagcgctgggccgagagcgctgagaccagaattgccaccctgctgcagcaggtgcacggcaagccctggaagacccagatcctgcacatccagcctgtgaagagctatgcccctcatgtggaccacatcgtgctggacctggagtgctgcccctgccccagcgtgggctag

SEQ ID NO: 195914 - DNA, 1347 bp, Artificial Sequence
  derived and/or modified sequence
atgcgggagaacgtggtggtgagcaacatggagcgggagagcggcaagcctgtcgccgtcgtggcagttgtcacggaaccatggttcacccagaggtatagggaatatcttcagagacagaagctgttcgatactcagcacagagttgagaaaatgccagacggcagcgtggccctgcccgtcctaggcgaaacattacccgaacagcacttgcaggaactgcggaaccgcgtggcaccgggaagcccatgcatgctgacacagctccctgatccagtgcccagcaaacgagcacagggttgtagccccgcccagaagttgtgtctcgaggtgagccggtgggttgaggggcgaggcgtgaagtggtccgctgaattggaagccgacttaccacgatcctggcagagacacggcaacttattgctactttctgaggactgtttccaggccaagcagtggaagaatttaggaccggaactctgggaaactgtggctctcgccctgggggtgcaacggctggcaaagagaggacgggtttcccctgacggcacgcgaacacctgcagtgactttgcttttgggcgaccacggttgggtcgaacacgttgataacgggatcaggtacaagtttgatgtgacccagtgtatgttctctttcgggaacatcaccgaaaaactcagagtggctagcctgagttgcgctggtgaagtgttggttgatctctacgcaggcatcggctattttacccttcccttcctggtccacgctggagctgccttcgttcacgcctgtgagtggaacccccacgccgtcgttgctctcaggaacaacctggagatcaatggggtagcagaccggtgccagatccactttggcgacaaccgtaagttgaaattatcaaacattgccgaccgagtcatccttggcctgatacctagcagcgaagaaggctggccgatagcctgccaagtcttacgccaggatgccggcggaattctgcacatacatcagaacgttgagagcttcccaggaaagaacctgcaggctcttggggtcagcaaagtggaaaaggaacactggctgtatcctcagcagatcaccactaatcagtggaagaacggagcaacccgggactcgcggggcaagatgttgtctcccgccaccaagcctgaatggcaacggtgggccgagagtgcagagaccaggatagccacactgttacagcaggtgcacggaaagccgtggaagacccaaatcctccacatccagccagtaaagtcttatgccccacacgtagaccacattgttctcgacctggaatgctgcccgtgcccgagcgtaggctag

SEQ ID NO: 195915 - DNA, 1347 bp, Artificial Sequence
  derived and/or modified sequence
atgcgagagaatgtcgtcgtctcaaatatggagcgggaaagtgggaagcctgtagcagtggtggcagtggtgacagaaccttggttcactcaacggtatagggagtatctccagagacagaaactctttgatacacaacaccgggtggagaaaatgcccgatggcagcgtggcactccctgtgctgggggaaacactgcctgagcagcacttgcaggagctccgtaatcgagtcgcccctggctccccttgcatgttgacacaactgccagaccccgttccatccaagcgagcacagggatgctctcctgcccagaaactgtgccttgaggtcagccgatgggtagagggcaggggggtgaaatggtctgccgagctcgaggccgacttacctcgaagctggcagaggcacggcaaccttctgctcttaagcgaggattgctttcaggcaaaacagtggaaaaatctgggtcctgagctgtgggagacagtggcccttgcactaggagttcagaggttggcgaaaagggggagagtgtccccagacgggacacgcacaccagcagttacgctgctgttgggggaccatggatgggttgagcacgtcgacaatggcattcgttataagttcgacgtgacccagtgcatgttctctttcggaaatataaccgaaaaactgcgcgtggcgagccttagttgcgccggagaagtgctggtggatttgtatgccggaatcggatattttacgttgccttttctcgtgcatgcgggagccgctttcgtgcacgcctgtgagtggaatcctcacgctgttgtggccttgaggaataacttagagattaatggcgtggcagataggtgccagatccattttggagacaataggaaacttaagctgagcaacatcgcagatcgcgtgattctgggcctcattccgtcctccgaggaaggttggcctatagcctgtcaggtgttgagacaggatgccggaggtatcctgcacatacaccagaatgtggagagcttccccggaaagaatctacaggctctcggcgtgtcaaaagtcgaaaaggaacactggctttatccccagcagatcaccaccaaccagtggaagaatggagccacgagagattcaagggggaagatgttgagtcccgctaccaagcctgaatggcagaggtgggcagagtcagcagaaacccgtatcgccaccttgctgcagcaagtgcacgggaagccttggaagacacagattctccacatccagcctgtcaagtcatacgctcctcacgtggaccacatcgtcctggacctggaatgctgtccctgcccatcagtgggttag

SEQ ID NO: 195916 - DNA, 2215 bp, Artificial Sequence
  derived and/or modified sequence
ctctttgcacgtcatttccggcaccggcatggccgggtgagctgcaggctaccttatttaagaccgggaatttagtcagcctggtgagccgactctgaggagatggagtatcgctgaggtgatgagagagaatgtggttgttagcaacatggagagagaaagtgggaagcccgtggctgttgtcgcagttgtgactgagccttggtttacccagcgatacagagaatatctccagaggcagaaactctttgatacacagcaccgtgtggaaaagatgccggatggctcggtggcgctaccggtgctgggagagacgcttccagagcagcacctgcaggagctgaggaatcgtgttgccccaggcagtccctgtatgctcacgcagctcccggatcctgttccttcgaagagggcccagggttgttcacctgcccaaaaattgtgtcttgaggtgagtcgctgggtggagggtcggggagtcaagtggtcagccgagttggaggctgatttgccccgatcatggcaacggcatggtaatctcttgttgctgagtgaagactgtttccaagccaagcagtggaaaaatctgggaccggaactctgggagaccgttgccttggcacttggcgtccagcgtttggcaaaacgagggcgggtatcaccggatggtactcgaactccagcagtgacactgctgctgggtgaccatggctgggtagagcatgtggataatggtatccgttataagtttgacgtgacccagtgtatgttctcctttggaaacatcactgagaagcttcgagtggcatcgttgtcctgtgctggagaagtgctggtggatctctatgcagggattggttattttacattgcctttcctagttcatgctggtgctgccttcgtccatgcttgtgagtggaatccccatgctgtagttgctctgagaaataaccttgagatcaatggagtagcagatcggtgccaaatacactttggagataacagaaaactgaagctctcaaatattgcagatagggtgatcctggggctgattcccagctctgaagaaggctggcccattgcctgccaagtgttaaggcaggatgctggaggcattttgcatatccaccaaaatgtggaatctttcccagggaagaatcttcaggctcttggagtcagcaaagtagagaaagagcattggctgtatcctcagcaaattaccaccaaccaatggaaaaatggagctaccagggattctaggggaaaaatgctgtcaccagccaccaagccagagtggcaaaggtgggcagaatctgcagaaactcgaatcgccactcttcttcagcaggtgcatgggaaaccatggaagacacaaattctgcacatccaaccagtgaaatcctatgctccccatgtggatcacatagtcctggatctggaatgctgcccctgtccttcagttggctagaggaggtagatcctgggacacatgggatccacgtgcgagtggcccttaaatgtatcagttcagtccaggttgtcatcccttttgtcccctggtgatcagtttttttcatattttatagccctgaaagcaggctctagatcaattcaaattatttcatttgtctttcattgataacagaaaatgaaatacctgtttgggagaagcagcatggcccattgaaatgaggctcatctgtgcaattatgaattccaaattctgacctcagttctggaattgaagtttcagtatgttttggcctcgggtttcgttatttgcaaaatgagagtttctttgaactgtctcacgtgactattaagcaactatacacaggacatcggttattttagagtgaaagacacagtgctttttccaaattgctctggctaccatatagaaaattgactgaaggagggccaagatggaaacagagagaccagtgaggaggcttctgtggttgtccaggtctgaggtgatggtaacttggactcggatggtggtaatgggaggtagattgatatgataaataaaattgacagaccaagcaatggaatcagaattaagtccttaacatgaagctgctttgttattatgactgactaaattagagagagaagggaacaaaaattattttagtgtatttccattcccttactgtggcattcctaaatgattgtgaggggttgtcttataaatttggtttgttgtggt

SEQ ID NO: 195917 - protein, 461 aa, Artificial Sequence
  derived and/or modified sequence
MGTIHLFRKPQRSFFGKLLREFRLVAADRRSWKILLFGVINLICTGFLLMWCSSTNSIALTAYTYLTIFDLFSLMTCLISYWVTLRKPSPVYSFGFERLEVLAVFASTVLAQLGALFILKESAERFLEQPEIHTGRLLVGTFVALCFNLFTMLSIRNKPFAYVSEAASTSWLQEHVADLSRSLCGIIPGLSSIFLPRMNPFVLIDLAGAFALCITYMLIEINNYFAVDTASAIAIALMTFGTMYPMSVYSGKVLLQTTPPHVIGQLDKLIREVSTLDGVLEVRNEHFWTLGFGSLAGSVHVRIRRDANEQMVLAHVTNRLYTLVSTLTVQIFKDDWIRPALLSGPVAANVLNFSDHHVIPMPLLKGTDDLNPVTSTPAKPSSPPPEFSFNTPGKNVNPVILLNTQTRPYGFGLNHGHTPYSSMLNQGLGVPGIGATQGLRTGFTNIPSRYGTNNRIGQPRP

SEQ ID NO: 195918 - DNA, 1386 bp, Artificial Sequence
  derived and/or modified sequence
atgggaacgattcacctctttaggaaaccacaaaggagcttttttggtaagttgttgcgcgaattccgcctggtagccgccgacaggcgctcatggaaaatcctgctgtttggagtgattaatctgatatgtacagggtttctgctcatgtggtgctccagcaccaattctatcgccttgacagcctacacttacttgactatttttgacctcttcagcttaatgacatgtctgattagctactgggtgaccctgcggaagcctagtccagtgtattcttttgggtttgagcgattggaggtcctggccgtgttcgcatcaacagtattggcgcagctcggcgctttatttatcttaaaggagagcgcagaacgctttctcgaacagcctgaaatccacacaggtagattactggtcggaacctttgtggctctgtgtttcaacctgtttaccatgctgagtatccggaataagccatttgcttatgtctcggaggccgcctccacctcttggctccaggaacatgtggcagatctgtcgcgcagcctatgtggtataataccaggcctgagcagcatcttcctgcctcgcatgaatccgttcgtattaattgacctcgcaggagctttcgccctttgtatcacttatatgctgattgagattaacaactattttgccgtggatacagccagtgctattgcgatcgccctaatgacatttggaacgatgtatccaatgagcgtctatagcggaaaagtccttttgcagaccacacctcctcacgtgatcggccaactggacaaattaattagggaagtgtccaccctggatggcgttttagaagtgcgtaacgaacacttttggacgctcggcttcggcagtttagctggctcggttcacgtgaggatccggagggacgccaatgagcagatggtcttggcgcatgtgactaatagactatacacgcttgtgtctacactcacagtgcagatattcaaggatgactggatccgcccagccctgctgtcagggcctgtggccgccaatgtccttaatttttccgaccaccatgtgatacccatgccactcttaaagggcaccgacgacctcaatccagtgacttccaccccagctaagccttctagtccccccccagagttctctttcaacactcccggaaaaaatgtcaatccagtcatcttactgaatactcagacaaggccctacggatttggcctcaaccatgggcacactccatatagctcaatgctcaatcaaggactaggcgttcccggcatcggagccacacagggcctgcgcaccggcttcaccaacattcctagtcgttacgggacgaataaccgaatcgggcagccccggccatag

SEQ ID NO: 195919 - DNA, 1386 bp, Artificial Sequence
  derived and/or modified sequence
atgggcaccatccacctgttcaggaagccccagaggagcttcttcggcaagctgctgcgggagttccggctggtggccgctgacagaagatcctggaagatcctgctgtttggagtcatcaacctgatctgcaccggcttcctgctgatgtggtgcagcagcaccaacagcatcgccctgacagcctacacctacctgaccatctttgacctcttcagcctgatgacctgcctgatctcctactgggtgaccctgaggaagcccagccctgtgtacagctttggatttgagcggctggaggtgctggccgtgtttgccagcacagtgctggcccagctgggcgccctcttcatcctgaaggagagcgctgagcgcttcctggagcagcctgagatccacacaggccgcctgctggtgggcacctttgtggccctgtgcttcaacctcttcaccatgctgagcatccggaacaagccctttgcctacgtgtctgaggccgccagcacctcctggctgcaggagcacgtggccgacctgagccgcagcctgtgtggcatcatccctggcctgagcagcatcttcctgcccaggatgaacccctttgtgctgattgacctggccggggcctttgccctgtgcatcacctacatgctgattgagatcaacaactactttgctgtggacacagccagcgccatcgccatcgccctgatgaccttcggcaccatgtaccccatgtctgtgtacagcggcaaggtgctgctgcagaccaccccacctcatgtgattggccagctggacaagctgatccgggaggtgtccaccctggatggagtgctggaggtgagaaatgagcacttctggaccctgggcttcggcagcctggccggctctgtgcacgtgcgcatcagaagagatgccaatgagcagatggtgctggcccacgtgaccaaccggctgtacaccctggtgtccaccctgactgtgcagatcttcaaggatgactggatccggcctgccctgctgagcggccctgtggccgccaacgtgctgaacttcagtgaccaccacgtgatccccatgcccctgctgaagggcacagatgacctgaaccctgtgaccagcaccccagccaagcccagcagccccccacctgagttctccttcaacacccctgggaagaatgtgaaccctgtgatcctgctgaacacccagacccggccctacggcttcggcctgaaccacggccacaccccctacagctccatgctgaaccagggcctgggcgtgcccggcattggagccacccagggcctgaggacaggcttcaccaacatccccagccgctatggcaccaacaaccgcatcggccagccccggccctag

SEQ ID NO: 195920 - DNA, 1386 bp, Artificial Sequence
  derived and/or modified sequence
atgggcaccatccacctgttccggaagccccagcggagcttcttcggaaaattgctgcgggagttccgcctggtggctgccgacagacgctcttggaagattctgctgtttggggtaattaaccttatttgcacgggttttttgttgatgtggtgctcctctacgaatagcatcgctctgactgcgtatacctacctgaccattttcgacctcttttctctgatgacttgcttgatctcatactgggtgactcttcgaaagcccagccccgtgtattcctttgggtttgagaggctcgaggtcctcgcagtattcgcctccactgttttagcacagctcggggccctgtttattctgaaggagtctgccgagcggtttttggagcagcccgagatccacacaggacgcctgttagtcgggacgtttgtcgcactgtgcttcaacctcttcaccatgctaagcataagaaacaaaccatttgcctacgtgtctgaagccgcgtcaactagctggctccaggagcacgtggcagatctgtcccgatccctctgcggaattatccctggattatcttccatttttctcccccgaatgaatcccttcgtgcttatcgatctggccggtgcattcgctctctgcatcacctacatgcttatcgagataaacaattacttcgcggtggatacagcaagcgccattgctatcgccctgatgacatttgggaccatgtatcccatgagtgtatatagtggcaaagtgctgttacagaccacaccccctcatgttatcggccagctggacaaactgatacgtgaggtcagcaccctcgacggagttctcgaggtaagaaatgaacacttttggactttgggattcgggagcttagcgggctcggtgcacgtccgcatcagaagagacgctaatgagcaaatggttcttgcacacgtgacaaaccgcctttacaccttagtgtcaacactcactgtccaaattttcaaagatgactggatccgccctgccctgttaagcgggccagtggctgctaatgtgcttaacttcagtgaccatcacgtgattccgatgcctctgctcaaaggcacagacgacttgaaccccgttacttctacgcctgcaaaaccgtccagtcctccaccagagttctcctttaatacgccaggcaaaaacgtaaatcccgttatcttgttgaatactcagacacgcccctacggattcgggctgaatcatgggcacaccccttattccagcatgcttaaccaggggctgggggtgcccggtattggagccacgcagggactcagaactggcttcactaatattccttctcgctatggaacaaataatcggattggacagcctagaccctag

SEQ ID NO: 195921 - DNA, 1386 bp, Artificial Sequence
  derived and/or modified sequence
atggggaccatccacctatttcgaaaaccacagcgctcattctttggcaagctccttcgagaattcagactggtggcagccgacaggcgaagctggaaaatcttgttgttcggggtgatcaaccttatctgcacagggtttctgctcatgtggtgttcaagcactaactccatagctctcaccgcatacacttatttgaccattttcgacttgttttcactgatgacctgcttgatctcatactgggtgacattgcgcaagccatccccagtttactctttcggatttgaacgccttgaggttttggccgtatttgcatccacagtgttggcacaactgggtgcgttgtttatcttgaaagaatctgctgagaggttcttggaacagcctgagattcacacagggagattgctggtgggcacatttgttgcactgtgcttcaatttgtttactatgctttcaattaggaataaaccattcgcctacgttagcgaagccgcaagtacatcgtggctccaggaacacgtggccgacttgtctaggtcactctgcggcataattcccggactgtcatccattttcctgccccgaatgaatccatttgtcctgattgatctcgctggggctttcgcactctgcatcacatatatgctcatcgagatcaacaactactttgcagtggacactgcgtcagcaatcgcaatcgccctgatgacttttgggaccatgtatcccatgtcggtttacagtgggaaagtcttgctacagaccaccccgccacacgtgatcggacagctggataaattgatcagagaagtctcaactttggatggcgtgctcgaggtgcggaacgagcacttctggacactcggctttgggagtctggctggttccgtccacgtgaggatacggagggacgctaacgaacagatggtgcttgcacacgtcacgaaccgcctgtataccctcgtctccacactcacggtccagatttttaaggatgactggatcaggcccgcactactgtccggtcctgtggcggctaacgtgctaaacttttccgaccatcacgtaataccgatgcccttattgaaaggaaccgatgatctcaacccagttacgtcgactccagccaaaccatcatccccccctcccgaatttagcttcaacacccctggcaaaaacgtcaatccagtgatcctgctcaacactcagacacgaccctatggcttcggtctgaatcatgggcacactccttattcaagcatgttgaaccagggtctaggagtccctggcattggcgcaacccagggtctgcgtactggttttaccaatatacccagccgctatggcaccaataaccgaattggccagcctcggccttag

SEQ ID NO: 195922 - DNA, 5089 bp, Artificial Sequence
  derived and/or modified sequence
agaacggcttccggcgggagctgtgcagctccttatcatggggacaattcatctctttcgaaaaccacaaagatccttttttggcaagttgttacgggaatttagacttgtagcagctgaccgaaggtcctggaagatactgctctttggtgtaataaacttgatatgtactggcttcctgcttatgtggtgcagttctactaatagtatagctttaactgcctatacttacctgaccatttttgatctttttagtttaatgacatgtttaataagttactgggtaacattgaggaaacctagccctgtctattcatttgggtttgaaagattagaagtcctggctgtatttgcctccacagtcttggcacagttgggagctctctttatattaaaagaaagtgcagaacgctttttggaacagcccgagatacacacgggaagattattagttggtacttttgtggctctttgtttcaacctgttcacgatgctttctattcggaataaaccttttgcttatgtctcagaagctgctagtacgagctggcttcaagagcatgttgcagatcttagtcgaagcttgtgtggaattattccgggacttagcagtatcttccttccccgaatgaatccatttgttttgattgatcttgctggagcatttgctctttgtattacatatatgctcattgaaattaataattattttgccgtagacactgcctctgctatagctattgccttgatgacatttggcactatgtatcccatgagtgtgtacagtgggaaagtcttactccagacaacaccaccccatgttattggtcagttggacaaactcatcagagaggtatctaccttagatggagttttagaagtccgaaatgaacatttttggaccctaggttttggctcattggctggatcagtgcatgtaagaattcgacgagatgccaatgaacaaatggttcttgctcatgtgaccaacaggctgtacactctagtgtctactctaactgttcaaattttcaaggatgactggattaggcctgccttattgtctgggcctgttgcagccaatgtcctaaacttttcagatcatcacgtaatcccaatgcctcttttaaagggtactgatgatttgaacccagttacatcaactccagctaaacctagtagtccacctccagaattttcatttaacactcctgggaaaaatgtgaacccagttattcttctaaacacacaaacaaggccttatggttttggtctcaatcatggacacacaccttacagcagcatgcttaatcaaggacttggagttccaggaattggagcaactcaaggattgaggactggttttacaaatataccaagtagatatggaactaataatagaattggacaaccaagaccatgatagactctaacttatttttataaggaatattgactccttggcttccaatttatttagtaatccaactttgcattgactgtttaatcatttactctaaatgttagataatagtagtcttgttcacatttcatgaaacctatgaaactatatttttgtaaaatgtatttgtgacagtgaaatcctcgtaaatgttaaaggctttaaataggcttcctttagaaaatgtgtttctttaaatttggattttggtatctttggttttgtagttgactgcagtgtgatgtgaccttacctttataagagccacttgatggagtagatctgtcacattactaagatacgatatttctttttttttccgagacggagtcttgctctgccactgtgcccggccaatacattattattaacttaaggctgtactttattaaggcttccttagtttttgttttgttttgttttttgagatggagtctcactctgtcgcccaggctggaatgcagtggcatgatctcagctcactgcaacctctgcctcctgagttcaaatgattctcctgcctcagcctcccgagtagctgggattacaggcacctgccaccacgcccagctaatttttgtatttttagtaaagacgggggatttcaccatgttggccaggctggtcttgaactcctgacctcatgatccacccaccttagcctcccaaagtgctgggattaggtgtgagccaccgcacctggccgatattttctttaatgaaatttataaatatgcttcttgaataatacacattttgggaaagggaaaaatgtctgttcaaaaagtaaaagtctcttttatagcttttccaaacttaattgctaaatttttctttgaggttctcctgaattatgtcttacaaactaaaagcaaaaatttttagcagaaattttggaatacattctatctagcacaatttgaatttttaattatcaagatttttgttaaagtttctctcctttaaaaattttagtacatttgtaaatagtccatggttctcagtgttttattttgattaagtgactacccaacttttggtgatatgcagtgaaagaatcccaattttctatgttacatttaatcaaatactgacataatgaatttatctttcctgacacattttcattcattggctttttaatttcttattttattaacaaaatatatcagatatattaccaaaacacatggagttccatacataatatggaatttgatgtcttttcaagttgcacaaagaatttgagcatatataattttaccaaagcataatggaccttagattatagaatacagcattgttaggtctgcagtgggcagtttctttttgttttgctttgtcaaaaatgggaaattgttaactgtgatgaaatgtgagaattacatagattatgttattttttagttgttttccaaatgcagagtttaaggactttctaacatggctagtattacttccaaaaagtataacaagcagcagtcacacatgacctaggagggttttttattgttttattttattatgcattccataacagttttaaaatgggattttgagaatggacttaactttcctggaatccaatgctcctggagatttatgactttcccagccatcagccagctatctagagaagatttttgtttttcttttgcaacagtttcttcagtcaactcattcactttcaaataggagcagcactttgaaatcctttttcttcactgtggattaaaaacatccaagaagccatctctgtcaagcagaattgtcatctgtggtaataagtgaccatgtcctaaatacctttttcttagtgaggagttggtcattgtctttggcatctgcaacccctgttcaggcatgtgacctgctaaagaaatacagcctacactaccttgactactggggaaaatgatacttcgtaaaatgtaataaggcaacctgttccttggcctttatcttatgttttccaactattactgtatctgttattggtctactattacaggatgattcttcttcctccattgatctcaactaaatatgaattagggtcatgcatgaaatctgaactgccgtgtcctgagttatggttaagaggtatgtgctgccaccccatgcatgtcttccccatccccataggattttaaagtgttcaggtaccaaacacagttctgtgtgaggttttatgcctacttcctcaacaccaattcagaggcaacacctgtgcatctgtcccaccaaaggtgctttaatacctaccttcactatttgagaaaggacactcacagttgcctgtgggttatgaaagaattggccctacgtcctgcatgtaagatgttacaggggacattgggccaggcattattatatagagaagtcttatttgccaagctctgactaacttctggatatgaaaataaggaacttgcccagcataggcctataggcagcagccttactagtaaatcttgccacagaatcacttgaagctagacagagaaagaagttcaatttaaatatttgtcccattgtttgtgattaggatgtaagctttgtggaatgtaattaaccctgctttacgaagtcaccatattataataggaaaaacactgcctaggaggcaagagatctgaattccagttctgatgctgccactgtgtaaggaagtagttttataacccatgggcaaatcatctgagctttctcatctgtaaagttagggagaggaattaattagttgatctgtaaaataatcagcttcaaaacgttatggctaaatctgtagaatgtatgcccaattgctaaacggatgttgtgcccagaattttatctagtgactacctcaacatacaggccaagcgttacctacaccaacacccaagccattaatttgaggtgccatgagaataggtgaaccacagcctaacaccatttaggtttttgtgtttttttcaggcttgcctctacttaaatatatttagatgagagagttctcttagacttctttctttgtaaggaagggttatttggggaagtgttggaaaaaagattagggcagggtacccttagtttatatagggtacaaaagaatgggaaacatcttccctttcttctttaatctctgaagtcatgtttggaattacatataatgtagcaggtactggagaggacctgaatttcaagcttctgatttagctgtttgtaaacttccaagttttgcttgactaaagaatgctgatcttttttgggagtctgatctccttctaatatcagaaagtgctttttatattccagattgcttgaattaaactgtttggattaaagaacatatatggagtttcctctctggttttaaataatctttctttattcagtagctattaataatttatctcatattcagcgaatatttattgagaatattgttgagaatctcttacatgccaggcactatactaagttaatatgcattcagtataccagttggtgtgacccagaccaaaggtaacacaaagatgaatgagaattccttcaaggcgccgataatcctagtaggagagctaagacacaaaactgttgcatgtttttaatcatcaaattaaacttctttccacgtcctta

SEQ ID NO: 195923 - DNA, 2359 bp, Artificial Sequence
  derived and/or modified sequence
agaacggcttccggcgggagctgtgcagctccttatcatggggacaattcatctctttcgaaaaccacaaagatccttttttggcaagttgttacgggaatttagacttgtagcagctgaccgaaggtcctggaagatactgctctttggtgtaataaacttgatatgtactggcttcctgcttatgtggtgcagttctactaatagtatagtttaatgacatgtttaataagttactgggtaacattgaggaaacctagccctgtctattcatttgggtttgaaagattagaagtcctggctgtatttgcctccacagtcttggcacagttgggagctctctttatattaaaagaaagtgcagaacgctttttggaacagcccgagatacacacgggaagattattagttggtacttttgtggctctttgtttcaacctgttcacgatgctttctattcggaataaaccttttgcttatgtctcagaagataatttaagtattttcttcttaaagctgctagtacgagctggcttcaagagcatgttgcagatcttagtcgaagcttgtgtggaattattccgggacttagcagtatcttccttccccgaatgaatccatttgttttgattgatcttgctggagcatttgctctttgtattacatatatgctcattgaaattaataattattttgccgtagacactgcctctgctatagctattgccttgatgacatttggcactatgtatcccatgagtgtgtacagtgggaaagtcttactccagacaacaccaccccatgttattggtcagttggacaaactcatcagagaggtatctaccttagatggagttttagaagtccgaaatgaacatttttggaccctaggttttggctcattggctggatcagtgcatgtaagaattcgacgagatgccaatgaacaaatggttcttgctcatgtgaccaacaggctgtacactctagtgtctactctaactgttcaaattttcaaggatgactggattaggcctgccttattgtctgggcctgttgcagccaatgtcctaaacttttcagatcatcacgtaatcccaatgcctcttttaaagggtactgatgatttgaacccagttacatcaactccagctaaacctagtagtccacctccagaattttcatttaacactcctgggaaaaatgtgaacccagttattcttctaaacacacaaacaaggccttatggttttggtctcaatcatggacacacaccttacagcagcatgcttaatcaaggacttggagttccaggaattggagcaactcaaggattgaggactggttttacaaatataccaagtagatatggaactaataatagaattggacaaccaagaccatgatagactctaacttatttttataaggaatattgactccttggcttccaatttatttagtaatccaactttgcattgactgtttaatcatttactctaaatgttagataatagtagtcttgttcacatttcatgaaacctatgaaactatatttttgtaaaatgtatttgtgacagtgaaatcctcgtaaatgttaaaggctttaaataggcttcctttagaaaatgtgtttctttaaatttggattttggtatctttggttttgtagttgactgcagtgtgatgtgaccttacctttataagagccacttgatggagtagatctgtcacattactaagatacgatatttctttttttttccgagacggagtcttgctctgccactgtgcccggccaatacattattattaacttaaggctgtactttattaaggcttccttagtttttgttttgttttgttttttgagatggagtctcactctgtcgcccaggctggaatgcagtggcatgatctcagctcactgcaacctctgcctcctgagttcaaatgattctcctgcctcagcctcccgagtagctgggattacaggcacctgccaccacgcccagctaatttttgtatttttagtaaagacgggggatttcaccatgttggccaggctggtcttgaactcctgacctcatgatccacccaccttagcctcccaaagtgctgggattaggtgtgagccaccgcacctggccgatattttctttaatgaaatttataaatatgcttcttgaataatacacattttgggaaagggaaaaatgtctgttcaaaaagtaaaagtctcttttatagcttttccaaacttaattgctaaatttttctttgaggttctcctgaattatgtcttacaaactaaaagcaaaaatttttagcagaaattttggaatacattctatctagc

SEQ ID NO: 195924 - DNA, 1386 bp, Artificial Sequence
  derived and/or modified sequence
atgggcaccatccacctgttcagaaagccccagagaagcttcttcggcaagctgctgagagagttcagactggtggccgccgacagaagaagctggaagatcctgctgttcggcgtgatcaacctgatctgcaccggcttcctgctgatgtggtgcagcagcaccaacagcatcgccctgaccgcctacacctacctgaccatcttcgacctgttcagcctgatgacctgcctgatcagctactgggtgaccctgagaaagcccagccccgtgtacagcttcggcttcgagagactggaggtgctggccgtgttcgccagcaccgtgctggcccagctgggcgccctgttcatcctgaaggagagcgccgagagattcctggagcagcccgagatccacaccggcagactgctggtgggcaccttcgtggccctgtgcttcaacctgttcaccatgctgagcatcagaaacaagcccttcgcctacgtgagcgaggccgccagcaccagctggctgcaggagcacgtggccgacctgagcagaagcctgtgcggcatcatccccggcctgagcagcatcttcctgcccagaatgaaccccttcgtgctgatcgacctggccggcgccttcgccctgtgcatcacctacatgctgatcgagatcaacaactacttcgccgtggacaccgccagcgccatcgccatcgccctgatgaccttcggcaccatgtaccccatgagcgtgtacagcggcaaggtgctgctgcagaccacccccccccacgtgatcggccagctggacaagctgatcagagaggtgagcaccctggacggcgtgctggaggtgagaaacgagcacttctggaccctgggcttcggcagcctggccggcagcgtgcacgtgagaatcagaagagacgccaacgagcagatggtgctggcccacgtgaccaacagactgtacaccctggtgagcaccctgaccgtgcagatcttcaaggacgactggatcagacccgccctgctgagcggccccgtggccgccaacgtgctgaacttcagcgaccaccacgtgatccccatgcccctgctgaagggcaccgacgacctgaaccccgtgaccagcacccccgccaagcccagcagccccccccccgagttcagcttcaacacccccggcaagaacgtgaaccccgtgatcctgctgaacacccagaccagaccctacggcttcggcctgaaccacggccacaccccctacagcagcatgctgaaccagggcctgggcgtgcccggcatcggcgccacccagggcctgagaaccggcttcaccaacatccccagcagatacggcaccaacaacagaatcggccagcccagaccctag

SEQ ID NO: 195925 - protein, 355 aa, Artificial Sequence
  derived and/or modified sequence
METLKDKTLQELEELQNDSEAIDQLALESPEVQDLQLEREMALATNRSLAERNLEFQGPLEISRSNLSDRYQELRKLVERCQEQKAKLEKFSSALQPGTLLDLLQVEGMKIEEESEAMAEKFLEGEVPLETFLENFSSMRMLSHLRRVRVEKLQEVVRKPRASQELAGDAPPPRPPPPVRPVPQGTPPVVEEQPQPPLAMPPYPLPYSPSPSLPVGPTAHGALPPAPFPVVSQPSFYSGPLGPTYPAAQLGPRGAAGYSWSPQRSMPPRPGYPGTPMGASGPGYPLRGGRAPSPGYPQQSPYPATGGKPPYPIQPQLPSFPGQPQPSVPLQPPYPPGPAPPYGFPPPPGPAWPGY

SEQ ID NO: 195926 - protein, 148 aa, Artificial Sequence
  derived and/or modified sequence
METLKDKTLQELEELQNDSEAIDQLALESPEVQDLQLEREMALATNRSLAERNLEFQGPLEISRSNLSDRYQELRKLVERCQEQKAKLEKFSSALQPGTLLDLLQVEGMKIEEESEAMAEKFLEGEVPLETFLENFSSMRMLSHLRRV

SEQ ID NO: 195927 - protein, 322 aa, Artificial Sequence
  derived and/or modified sequence
METLKDKTLQELEELQNDSEAIDQLALESPEVQDLQLEREMALATNRSLAERNLEFQGPLEISRSNLSDRYQELRKLVERCQEQKAKLEKFSSALQPGTLLDLLQVEGMKIEEESEAMAEKFLEGEVPLETFLENFSSMRMLSHLRRVRVEKLQEVVRKPRASQELAGDAPPPRPPPPVRPVPQGTPPVVEEQPQPPLAMPPYPLPYSPSPSLPVGPTAHGALPPAPFPVVSQPSFYSGPLGPTYPAAQLGPRGAAGYSWSPQRSMPPRPGYPGTPMGASGPGYPLRGGRAPSPGYPQQSPYPATGGKPPYPIQPQLPFSLC

SEQ ID NO: 195928 - DNA, 477 bp, Artificial Sequence
  derived and/or modified sequence
atgcctgagcctcccaccccctccgttggctcctgtgctgcccgagcctcccggatgagcgccgccccctgctccagggcgcccagtcccatcgaccacccaagggctgaggagtgcgggcgcgcggcgcgggactggcaggcagctccacctgcagccccggtgagggatccactgggtgaagccagctgggctcctgagtctggtgaggacatggagaacctttatgtccagctcaagttgcagtccgtaggcacttgctttaaccgtgaagaattaccttcagtacttcagggtgaggaattgggagccaccagtgtgacaaataaacctggactctcagcaatgaggaaagaaacagaccaacaagttggggaaagaaagctcacatactgcggtgaccaggtaactctgttcacagaccaagccctcagtcaaatactatcttctgaggagggaagaatcaaggttatgtag

SEQ ID NO: 195929 - DNA, 1068 bp, Artificial Sequence
  derived and/or modified sequence
atggagaccctgaaggacaagaccctgcaggagctggaggagctgcagaacgacagcgaggccatcgaccagctggccctggagagccccgaggtgcaggacctgcagctggagagagagatggccctggccaccaacagaagcctggccgagagaaacctggagttccagggccccctggagatcagcagaagcaacctgagcgacagataccaggagctgagaaagctggtggagagatgccaggagcagaaggccaagctggagaagttcagcagcgccctgcagcccggcaccctgctggacctgctgcaggtggagggcatgaagatcgaggaggagagcgaggccatggccgagaagttcctggagggcgaggtgcccctggagaccttcctggagaacttcagcagcatgagaatgctgagccacctgagaagagtgagagtggagaagctgcaggaggtggtgagaaagcccagagccagccaggagctggccggcgacgcccccccccccagaccccccccccccgtgagacccgtgccccagggcaccccccccgtggtggaggagcagccccagccccccctggccatgcccccctaccccctgccctacagccccagccccagcctgcccgtgggccccaccgcccacggcgccctgccccccgcccccttccccgtggtgagccagcccagcttctacagcggccccctgggccccacctaccccgccgcccagctgggccccagaggcgccgccggctacagctggagcccccagagaagcatgccccccagacccggctaccccggcacccccatgggcgccagcggccccggctaccccctgagaggcggcagagcccccagccccggctacccccagcagagcccctaccccgccaccggcggcaagcccccctaccccatccagccccagctgcccagcttccccggccagccccagcccagcgtgcccctgcagcccccctacccccccggccccgcccccccctacggcttcccccccccccccggccccgcctggcccggctactag

SEQ ID NO: 195930 - DNA, 447 bp, Artificial Sequence
  derived and/or modified sequence
atggagaccctgaaggacaagaccctgcaggagctggaggagctgcagaacgacagcgaggccatcgaccagctggccctggagagccccgaggtgcaggacctgcagctggagagagagatggccctggccaccaacagaagcctggccgagagaaacctggagttccagggccccctggagatcagcagaagcaacctgagcgacagataccaggagctgagaaagctggtggagagatgccaggagcagaaggccaagctggagaagttcagcagcgccctgcagcccggcaccctgctggacctgctgcaggtggagggcatgaagatcgaggaggagagcgaggccatggccgagaagttcctggagggcgaggtgcccctggagaccttcctggagaacttcagcagcatgagaatgctgagccacctgagaagagtgtag

SEQ ID NO: 195931 - DNA, 969 bp, Artificial Sequence
  derived and/or modified sequence
atggagaccctgaaggacaagaccctgcaggagctggaggagctgcagaacgacagcgaggccatcgaccagctggccctggagagccccgaggtgcaggacctgcagctggagagagagatggccctggccaccaacagaagcctggccgagagaaacctggagttccagggccccctggagatcagcagaagcaacctgagcgacagataccaggagctgagaaagctggtggagagatgccaggagcagaaggccaagctggagaagttcagcagcgccctgcagcccggcaccctgctggacctgctgcaggtggagggcatgaagatcgaggaggagagcgaggccatggccgagaagttcctggagggcgaggtgcccctggagaccttcctggagaacttcagcagcatgagaatgctgagccacctgagaagagtgagagtggagaagctgcaggaggtggtgagaaagcccagagccagccaggagctggccggcgacgcccccccccccagaccccccccccccgtgagacccgtgccccagggcaccccccccgtggtggaggagcagccccagccccccctggccatgcccccctaccccctgccctacagccccagccccagcctgcccgtgggccccaccgcccacggcgccctgccccccgcccccttccccgtggtgagccagcccagcttctacagcggccccctgggccccacctaccccgccgcccagctgggccccagaggcgccgccggctacagctggagcccccagagaagcatgccccccagacccggctaccccggcacccccatgggcgccagcggccccggctaccccctgagaggcggcagagcccccagccccggctacccccagcagagcccctaccccgccaccggcggcaagcccccctaccccatccagccccagctgcccttcagcctgtgctag

SEQ ID NO: 195932 - DNA, 1068 bp, Artificial Sequence
  derived and/or modified sequence
atggagactctgaaggacaaaacattgcaagagttagaggaactccagaacgattctgaagcaatcgatcagctggccctggagtcccctgaggttcaggacttacagctcgaacgcgaaatggcgctggccactaataggtctctggccgagcgcaatcttgagtttcaaggccctctggaaatctcccggtctaaccttagtgataggtatcaggaactgcggaagctggtcgagaggtgccaggaacagaaagccaagctggaaaagttctcaagcgcgttgcagcctggtacacttctagacctgctgcaagtggagggaatgaagatagaggaagaatcagaggcgatggccgagaagttccttgagggagaggtgcctctagagaccttcctcgagaatttctctagtatgagaatgttgagccacctgcggagagtgcgggtcgaaaagctgcaagaggtggtcagaaaacctcgagcatcccaggagttagccggagatgcaccaccaccacggcctccaccccctgtgagacctgtaccccaaggcacacctcctgttgtcgaagaacagcctcagccccccctagccatgcctccataccccttaccctatagcccatctccgtctctgcctgttggccctaccgctcacggagccctcccccctgcaccgttccctgtcgtgagccaaccctccttctactccggtccccttggccctacgtacccagctgcacaactcggcccaaggggagccgctggatattcctggagcccacagcgatcgatgccaccccggcctggttacccgggcacacccatgggggcttcaggccccgggtacccccttcgcggcgggcgggctccctcaccgggttacccccagcagagcccatatccagctaccggggggaagcccccatacccaattcagccccagctaccctcctttcccggacagccccagccctcagtgcccctgcagcctccatacccccccgggccagccccaccatacggcttccctcctccgccaggtcctgcatggcccggatactag

SEQ ID NO: 195933 - DNA, 447 bp, Artificial Sequence
  derived and/or modified sequence
atggaaacccttaaagataagactctgcaagaactggaagaactacaaaatgacagcgaggccatagatcagctggccctggagtcgccagaggtgcaggatctgcagttggaaagggaaatggccctggcaactaatagatcacttgctgagcggaacctggaatttcaaggccctctggaaatctctaggagtaatttaagcgacagataccaggagctgagaaaactggttgagcgctgccaggagcagaaggctaaactcgagaaattctcctctgccctgcaacccggtaccttactcgatttactccaggtggagggcatgaagattgaagaggaatctgaggccatggctgaaaagttcctggagggtgaagtccctctcgagacgtttcttgaaaatttttcatccatgcggatgctttcccaccttcggcgagtgtag

SEQ ID NO: 195934 - DNA, 969 bp, Artificial Sequence
  derived and/or modified sequence
atggaaactctgaaagataagacgctgcaggaattggaagaacttcagaacgacagcgaggctatcgaccagctcgctctcgaatctcctgaggttcaggacctgcagctggaacgggaaatggccttggctacaaacaggtcactcgccgaacgtaacctggaattccagggaccccttgagattagtcgaagcaatttgagtgaccggtatcaggaactccggaagctagtggagcgctgccaggaacagaaggccaaactggagaagttctcctccgcccttcagccaggcactctactggatctcctccaggtcgaggggatgaaaattgaagaagaatcggaggcaatggcggaaaagttccttgaaggcgaggttcccttagaaacatttttggaaaacttttcttcaatgcggatgctcagccatctgcgacgggtacgcgtggaaaaactacaggaagtcgtgagaaagccaagagcatcccaggaactcgctggagacgccccgccaccccgaccaccgccccccgtgagaccagtaccccaggggactcctccagtagtggaagaacagccccaaccacctttagccatgcctccttaccctttaccctactcccccagtccatctctgccagtcggccccacggctcacggagcgctgccaccggcaccctttcctgtagtctctcagccttccttttattcaggtccattggggcctacctatccagctgcccagctgggaccccgcggcgcggccggatacagctggtcaccacaaaggtctatgcctccaagaccagggtatcccgggacaccaatgggggcaagcgggccgggctacccactgcgtggcggaagggctccttcaccagggtatccccagcagtccccttaccccgcgaccggcggaaaacccccttatcctatacaaccccaactacccttttccctgtgctag

SEQ ID NO: 195935 - DNA, 1068 bp, Artificial Sequence
  derived and/or modified sequence
atggagaccctgaaggacaagaccctgcaggagctggaggagctgcagaatgattctgaggccatcgaccagctggccctggagagccctgaggtgcaggacctgcagctggagcgggagatggccctggccaccaacagaagcctggccgagaggaacctggagttccagggccccctggagatcagccgcagcaacctgagtgaccgctaccaggagctgaggaagctggtggagcgctgccaggagcagaaggccaagctggagaagttcagcagcgccctgcagcccggcaccctgctggacctgctgcaggtggagggcatgaagattgaggaggagagcgaggccatggccgagaagttcctggagggggaggtgcccctggagaccttcctggagaacttcagctccatgaggatgctgagccacctgcggcgggtgcgggtggagaagctgcaggaggtggtgaggaagccccgggccagccaggagctggccggagatgcccccccacccaggcctcctcctcctgtgcggcctgtgccccagggcaccccacctgtggtggaggagcagccccagccccccctggccatgccaccctaccccctgccctacagccccagccccagcctgcctgtgggccccacagcccacggggccctgcccccagcccccttccctgtggtgtcccagcccagcttctacagcggccccctgggccccacctacccagctgcccagctgggccccagaggagctgctggctacagctggagcccccagaggtccatgccaccccggcccggctacccaggcacccccatgggcgccagcggccctggctaccccctgcggggcggccgggcccccagccctggctacccccagcagagcccctacccagccactggaggcaagccaccctaccccatccagccccagctgcccagcttccctggccagccccagcccagcgtgcccctgcagcccccctacccacctggccctgccccaccctacggcttccccccacctcctggccctgcctggccaggctactag

SEQ ID NO: 195936 - DNA, 447 bp, Artificial Sequence
  derived and/or modified sequence
atggagaccctgaaggacaagaccctgcaggagctggaggagctgcagaatgattctgaggccatcgaccagctggccctggagagccctgaggtgcaggacctgcagctggagcgggagatggccctggccaccaacagaagcctggccgagaggaacctggagttccagggccccctggagatcagccgcagcaacctgagtgaccgctaccaggagctgaggaagctggtggagcgctgccaggagcagaaggccaagctggagaagttcagcagcgccctgcagcccggcaccctgctggacctgctgcaggtggagggcatgaagattgaggaggagagcgaggccatggccgagaagttcctggagggggaggtgcccctggagaccttcctggagaacttcagctccatgaggatgctgagccacctgcggcgggtgtag

SEQ ID NO: 195937 - DNA, 969 bp, Artificial Sequence
  derived and/or modified sequence
atggagaccctgaaggacaagaccctgcaggagctggaggagctgcagaatgattctgaggccatcgaccagctggccctggagagccctgaggtgcaggacctgcagctggagcgggagatggccctggccaccaacagaagcctggccgagaggaacctggagttccagggccccctggagatcagccgcagcaacctgagtgaccgctaccaggagctgaggaagctggtggagcgctgccaggagcagaaggccaagctggagaagttcagcagcgccctgcagcccggcaccctgctggacctgctgcaggtggagggcatgaagattgaggaggagagcgaggccatggccgagaagttcctggagggggaggtgcccctggagaccttcctggagaacttcagctccatgaggatgctgagccacctgcggcgggtgcgggtggagaagctgcaggaggtggtgaggaagccccgggccagccaggagctggccggagatgcccccccacccaggcctcctcctcctgtgcggcctgtgccccagggcaccccacctgtggtggaggagcagccccagccccccctggccatgccaccctaccccctgccctacagccccagccccagcctgcctgtgggccccacagcccacggggccctgcccccagcccccttccctgtggtgtcccagcccagcttctacagcggccccctgggccccacctacccagctgcccagctgggccccagaggagctgctggctacagctggagcccccagaggtccatgccaccccggcccggctacccaggcacccccatgggcgccagcggccctggctaccccctgcggggcggccgggcccccagccctggctacccccagcagagcccctacccagccactggaggcaagccaccctaccccatccagccccagctgcccttcagcctgtgctag

SEQ ID NO: 195938 - DNA, 1068 bp, Artificial Sequence
  derived and/or modified sequence
atggagaccctgaaggacaagaccctgcaggagctggaggagctgcaaaatgacagtgaggcaatagaccagctggccctcgaaagcccggaggtgcaggatttgcagctggaacgggagatggcccttgctacaaacaggagcctggcagaacgcaacctggaattccaaggccctttagaaatctcaaggagcaacctgagtgatagataccaggagctgagaaaattggtagagagatgccaggagcaaaaggccaagctggagaagttttcttcagctctgcagccaggaactcttctggatctgctacaggtcgagggcatgaagatagaagaagaatctgaggcgatggcggagaagtttctggagggggaagtgccattagagacatttctggagaatttcagctccatgaggatgctctctcatcttcggagggtgagagtggagaagctgcaggaggtggtgaggaagccgagagcatcacaagaactggccggggatgcacctcctcccaggccaccaccgcccgttagacccgtcccccagggaacacctccagttgtggaagagcagcctcagccccccctggctatgccaccttacccactcccatactctcccagtccttcccttcccgtaggaccaactgctcacggggcactacccccggcccctttcccagtagtttcccagcccagcttctactctggacctctgggcccaacttacccggcggctcaattaggaccgaggggtgcggccggatacagctggtcacctcagcggtcaatgcctccacgccccggctatccaggaacacccatgggagccagcgggcctggctatcctttgaggggcgggagagcgccctcaccaggctatcctcagcagtccccttaccctgctaccggtgggaaacccccttatccaatccagcctcagctcccaagctttccgggccagcctcagccttcagtgcccctgcagccaccatacccacccgggcctgcacccccttatggatttccaccaccaccgggccccgcctggccagggtattag

SEQ ID NO: 195939 - DNA, 447 bp, Artificial Sequence
  derived and/or modified sequence
atggagaccctgaaggacaagaccctgcaggagctggaggagctgcagaacgacagcgaggctatagaccagttggccctcgagtcgccagaggtgcaagatctgcagctagaaagggagatggctctcgccaccaatagaagcctggctgaacgcaatctggagttccaggggcccctggaaatcagtagatctaatctctccgatcgctaccaggagttgcgtaagctcgtcgaaaggtgtcaggagcagaaggcaaaactagagaagtttagctcggccctgcagcccgggacactcctggacctgctgcaggttgagggaatgaagatcgaggaagaaagcgaggccatggcggagaaattcttggaaggggaagtgccactagagacctttctagagaacttctccagtatgagaatgttaagccacctgagaagggtatag

SEQ ID NO: 195940 - DNA, 969 bp, Artificial Sequence
  derived and/or modified sequence
atggagaccctgaaggacaagaccctgcaggagctggaggagctgcagaacgattccgaagctatcgaccagctggcacttgaaagtccagaggttcaggatctccagctcgaacgggagatggcgctggcaacgaaccgttcccttgcggagaggaacctggagttccaggggcccctggaaatttcccggagcaaccttagtgaccgctaccaggagcttaggaagcttgttgagcgatgtcaggaacagaaggctaaattggaaaaattcagctctgccctgcaacctggtacgttgctggacttgcttcaggtagaaggcatgaagatagaagaggaatccgaagctatggctgaaaagttcctggagggagaggtgccactggaaactttcctggagaacttctcctccatgcggatgctttcacatctccgaagggtgcgcgtcgaaaaactgcaggaggtagtgcggaagcctcgtgcctctcaggaactagctggcgacgccccaccacccaggcctccgccccctgtgcggccagttcctcagggtacccccccagtagtcgaagagcagccccagccgcctctagcgatgccaccttaccccttgccatattcacccagtcccagcctgcccgtgggcccaactgcacacggggcccttccgccagccccattcccggtcgtgagccagccatccttctacagcgggccactgggcccgacctaccccgccgctcagttaggaccaaggggcgccgcaggctattcttggagtccacagcggtctatgcctccacggcccggatatcccgggacgccaatgggtgcttcaggtccaggttaccccctccgggggggccgagccccttctcccgggtatccccaacagagtccttatcccgcgaccggcggcaaacccccttaccccatacagccacaactgcccttctccctatgttag

SEQ ID NO: 195941 - DNA, 1068 bp, Artificial Sequence
  derived and/or modified sequence
atggagacgctgaaagataagaccctgcaggagctcgaggagctccaaaacgacagcgaagctatcgatcagctggcgctggaaagccccgaagtgcaggatttgcagctggagcgcgagatggctttggcaacaaaccgttctctcgccgagagaaacctagaattccaggggcctctggaaatttcccgatccaatctctcggatcgctaccaggagttgaggaagctcgtggagcgctgccaggagcagaaagctaaactggagaagtttagcagcgccctgcaaccaggcacgcttctcgatttactgcaagtggagggtatgaagattgaagaggagtcagaggctatggctgagaaattcctcgaaggcgaagtgcccttggaaacatttttggaaaactttagctccatgagaatgctctctcatcttcgccgtgtgagggtcgaaaagttgcaagaggtcgtacgcaagcccagagccagccaggagctcgcaggggacgctcctccaccccgtccacccccaccagtgagacctgtaccccagggaacacctcctgtggttgaagagcagccacaaccgccattggctatgccaccctaccctctgccatattctccatctccctctctgcccgttggccctacagcccatggagccttaccacccgcaccatttcccgtggtgagtcaaccttcattctactccggacctctgggaccaacttaccccgcagcccagcttggcccaaggggcgctgctggctacagctggtctccgcagaggagcatgcctcccaggcctggctaccccggtacacccatgggtgctagcggacccggttatccgcttcgaggcggacgggctccatcccccggatacccacagcaaagtccctacccagccactgggggaaagcctccataccctatccagccgcagctcccctcctttccgggacagccacaaccctccgttccgctgcagcctccttacccgccagggccagctcctccttatggttttccccctccgccaggcccagcctggcctgggtactag

SEQ ID NO: 195942 - DNA, 447 bp, Artificial Sequence
  derived and/or modified sequence
atggagacactaaaagataaaaccttgcaggagctcgaggagcttcagaacgattcagaagccatcgatcagttagctctggagagccccgaagtccaggatctgcaactggagagggagatggcactggccactaaccggagcctcgcagaaagaaaccttgagttccaaggccctctcgagatatctcgaagcaacttgtctgaccgctaccaggaattgcggaagttggtcgagcgttgccaggaacagaaagctaagctggaaaaattttcatctgctctgcaacccggaactctgctggatctactccaagtggaaggaatgaaaatcgaagaagaatccgaggccatggctgagaagtttttggagggcgaagtcccccttgaaacctttctagaaaatttctcatcaatgcgaatgctctctcacctgcgcagagtgtag

SEQ ID NO: 195943 - DNA, 969 bp, Artificial Sequence
  derived and/or modified sequence
atggagaccctgaaggacaagacgcttcaggaactcgaggagttgcagaacgactccgaagccatcgatcagctcgccctcgagtctccagaggtccaggacctgcagctggaacgcgaaatggcgctggccactaatcgatcactggcagaaagaaacttagaattccagggccctttggagatcagccgaagcaacctcagtgataggtatcaggaactgcgcaagttagtggagcgctgtcaggaacaaaaagcgaagctcgaaaagttctcctctgctttgcagccgggaactttactcgacctcctccaagtggaagggatgaagatcgaggaagagtccgaagctatggctgagaagttcttggagggggaggtacccctggagaccttcttggaaaatttctcatccatgcgaatgctctctcatctgcgccgagtccgcgtcgagaaactccaggaggtggtgcgaaaaccaagggcctcccaggagttggcaggtgacgccccacctcctcggccaccccctcccgtcagacccgtaccccaaggcaccccccctgtcgtcgaggaacagccccaacccccactggccatgccaccttatcccttgccgtactccccatccccgagcttgcctgtggggcctactgctcacggtgccctccccccagcgccatttcccgtggtgtcgcagccatctttttactccggacccctcggtccaacgtacccagcagctcagctaggaccacgaggcgcagcaggatattcgtggagccctcaaagaagcatgccaccccgacctgggtatccaggaactcctatgggagcatctggcccaggatatccactacgaggaggaagagctccatctcctggttatcctcagcaatccccctaccccgcaactgggggaaaaccgccttaccccattcaaccacagctccctttcagcctctgttag

SEQ ID NO: 195944 - DNA, 2865 bp, Artificial Sequence
  derived and/or modified sequence
gtggcccgggcggccgcgagcgtgtgtgtgtggcacgatgtcgtggtaactcagaggcgcgcgaggcggggcggccaacggggtcgcggggcgagcacgcgcgccactggggcgccggacgttgcaagggggtcacatccggtagggggcgggcctggcggaccccggaagtgtgggcgcggctgcggtttaacccgcggtggcggcggcgacggcggccctggcagggaaggatggagacgctgaaggataagaccctgcaggagctggaggagttgcagaatgactcggaggcgattgaccagctggccctggagtcccctgaggtccaggacctacagctggaacgggagatggcactggccaccaaccggagcctggcagagcggaacttggagttccagggtcccctggagatcagccgctcaaacctctcggatagataccaggagctccggaagctcgtggagcggtgccaggagcagaaggcaaagctggagaaattttcttcagcactgcagccagggaccttgttagaccttctgcaggtggaaggcatgaagatcgaagaagagtccgaggccatggctgagaagttcctggagggcgaggtgcccctggaaacgttcctggagaatttttcctccatgaggatgctgtcccacctgcgccgggttcgcgtggaaaagctccaggaagtggtgaggaagcccagggcttcccaggagctggccggcgatgcccctccaccccgtccaccacccccggtgcgcccagtcccccagggaacaccccctgtggttgaagagcagccgcagccaccattagccatgcctccctaccctttgccctacagcccatcccccagcctgcctgtgggccccactgcccatggagccctgccaccggcccctttcccagtagtgtcccagccctccttctacagcgggcctctgggccccacttacccggcagcccagcttggacccaggggtgctgcgggttactcctggtccccacagaggagcatgccaccccggccgggctatcctgggaccccaatgggtgcctctgggcctgggtaccccttgcggggaggcagggcccccagtcctggttatcctcaacagtccccataccccgcaacaggaggaaaacctccctacccaatacagcctcagctccccagctttccaggccagccccagccctcagtgcccctgcagcccccttatccccccgggcccgcccctccctatgggttcccaccaccgccggggcctgcctggcctgggtattagacacactcctggccctcggcccctccctagtcccacccacgctcaacctttggcccagccatcgccgagattcgagggtcaactggaagtggcgttggtgctccctgtggacttgcgtcggcacccagaggccttggagggacaaggcactgggcggtgtgactggtcatggcacttgctggccttctggccagaggtcctcctggaagcccctcctttcagtgcctggctgcagcggtgctagccaggctggagtccagcacctctcgccggtgtctgtgtgagtgagcgcatgtgcgcatttatgagcatctacttgcggctgcactcagggccatttgaacccagtgcagagttatctctatgaggaggccccgggtctccagccccctccatctcccctggggtttggcatatttgacatggagccccatgccaagggatgcagctgttggtgtctgtccagtccattcaaggctagcctgcccatgcactgtggcaggggttggattggagggagagaacagagttgggaaaaacaacaggtttgagtcctataaagccataatttaactccagtagctgatgtcagacaagcttgtcctatgtcctatttgagtggcagcagcgccagcccagcaagaaggctgggggttgtcaaggttgtccccagaccttgcttgcagtggttggagaacccagggggctgccttgggccctctggccagagggaagcgggcagctctagccctggagattgtggtcacattggggcttgtttaggattggagggccaggtcacctccccagccaccctcccttctctcctctggggtccccactttagggcgactttgcccgaggcccacgcatccatccactcctttagtgccttgaatctcattcacaagcagccccctcccttcccctccccttctcactctgttgatgtaatcctcccacccccagtgtccatcctaagacaggcatcaaaagaggccctaactttacttcccaaatggtgctttttaaaaaacaccatcactacattaggggcaattttttcacacctccctgtcttcagaatgtaaagggtggggattatgtctctgtttaatatgcagccccctgcactgtggggtttggggcatgttcagtaataagaatgaatacaatagacaaagggggtgtgatgagtgttaacttggttgttccagaggtaaaccaggtctcagggaagagcctggagctgctattgcttaggaagttgtacgtgccttgaaatgtccactacctgaggacgcagcatctggtgggcccggggctgctggggccaaggagggaccttgaccttctggtgcctgcccctccccggcctatgtgccatccgcgtgacgctaggtcagcgctgccggttctttaccaaatgtgcttgcttctcctaagttatttataaagagaaatcactaatggactctactggtttgagtgcttctgagctggatgaccgaccgcctgtatgtttgtgtaattaattgccataataaactttgatgagtcacat

SEQ ID NO: 195945 - DNA, 506 bp, Artificial Sequence
  derived and/or modified sequence
ccccaccactcaccgccaccctcctttctgcgtctctgcaggccctcgtcccatatggaaggatggagacgctgaaggataagaccctgcaggagctggaggagttgcagaatgactcggaggcgattgaccagctggccctggagtcccctgaggtccaggacctacagctggaacgggagatggcactggccaccaaccggagcctggcagagcggaacttggagttccagggtcccctggagatcagccgctcaaacctctcggatagataccaggagctccggaagctcgtggagcggtgccaggagcagaaggcaaagctggagaaattttcttcagcactgcagccagggaccttgttagaccttctgcaggtggaaggcatgaagatcgaagaagagtccgaggccatggctgagaagttcctggagggcgaggtgcccctggaaacgttcctggagaatttttcctccatgaggatgctgtcccacctgcgccgggtt

SEQ ID NO: 195946 - DNA, 1230 bp, Artificial Sequence
  derived and/or modified sequence
actggggcgccggacgttgcaagggggtcacatccggtagggggcgggcctggcggaccccggaagtgtgggcgcggctgcggtttaacccgcggtggcggcggcgacggcggccctggcagggaaggatggagacgctgaaggataagaccctgcaggagctggaggagttgcagaatgactcggaggcgattgaccagctggccctggagtcccctgaggtccaggacctacagctggaacgggagatggcactggccaccaaccggagcctggcagagcggaacttggagttccagggtcccctggagatcagccgctcaaacctctcggatagataccaggagctccggaagctcgtggagcggtgccaggagcagaaggcaaagctggagaaattttcttcagcactgcagccagggaccttgttagaccttctgcaggtggaaggcatgaagatcgaagaagagtccgaggccatggctgagaagttcctggagggcgaggtgcccctggaaacgttcctggagaatttttcctccatgaggatgctgtcccacctgcgccgggttcgcgtggaaaagctccaggaagtggtgaggaagcccagggcttcccaggagctggccggcgatgcccctccaccccgtccaccacccccggtgcgcccagtcccccagggaacaccccctgtggttgaagagcagccgcagccaccattagccatgcctccctaccctttgccctacagcccatcccccagcctgcctgtgggccccactgcccatggagccctgccaccggcccctttcccagtagtgtcccagccctccttctacagcgggcctctgggccccacttacccggcagcccagcttggacccaggggtgctgcgggttactcctggtccccacagaggagcatgccaccccggccgggctatcctgggaccccaatgggtgcctctgggcctgggtaccccttgcggggaggcagggcccccagtcctggttatcctcaacagtccccataccccgcaacaggaggaaaacctccctacccaatacagcctcagctccccttctcactctgttgatgtaatcctcccacccccagtgtccatcctaagacaggcatcaaaagaggccctaactttacttcccaaatggtgctttttaaaaaacaccatcactacattaggggcaattttttcacacctccctgtcttc

SEQ ID NO: 195947 - protein, 1164 aa, Artificial Sequence
  derived and/or modified sequence
MALFPAFAGLSEAPDGGSSRKELDWLSNPSFCVGSITSLSQQTEAAPAHVSEGLPLTRSHLKSESSDESDTNKKLKQTSRKKKKEKKKKRKHQHHKKTKRKHGPSSSSRSETDTDSEKDKPSRGVGGSKKESEEPNQGNNAAADTGHRFVWLEDIQAVTGETFRTDKKPDPANWEYKSLYRGDIARYKRKGDSCLGINPKKQCISWEGTSTEKKHSRKQVERYFTKKSVGLMNIDGVAISSKTEPPSSEPISFIPVKDLEDAAPVTTWLNPLGIYDQSTTHWLQGQGPPEQESKQPDAQPDSESAALKAKVEEFNRRVRENPRDTQLWMAFVAFQDEVMKSPGLYAIEEGEQEKRKRSLKLILEKKLAILERAIESNQSSVDLKLAKLKLCTEFWEPSTLVKEWQKLIFLHPNNTALWQKYLLFCQSQFSTFSISKIHSLYGKCLSTLSAVKDGSILSHPALPGTEEAMFALFLQQCHFLRQAGHSEKAISLFQAMVDFTFFKPDSVKDLPTKGQVEFFEPFWDSGEPRAGEKGARGWKAWMHQQERGGWVVINPDEDDDEPEEDDQEIKDKTLPRWQIWLAAERSRDQRHWRPWRPDKTKKQTEEDCEDPERQVLFDDIGQSLIRLSSHDLQFQLVEAFLQFLGVPSGFTPPASCLYLAMDENSIFDNGLYDEKPLTFFNPLFSGASCVGRMDRLGYPRWTRGQNREGEEFIRNVFHLVMPLFSGKEKSQLCFSWLQYEIAKVIWCLHTKNKKRLKSQGKNCKKLAKNLLKEPENCNNFCLWKQYAHLEWLLGNTEDARKVFDTALGMAGSRELKDSDLCELSLLYAELEVELSPEVRRAATARAVHILTKLTESSPYGPYTGQVLAVHILKARKAYEHALQDCLGDSCVSNPAPTDSCSRLISLAKCFMLFQYLTIGIDAAVQIYEQVFAKLNSSVFPEGSGEGDSASSQSWTSVLEAITLMHTSLLRFHMKVSVYPLAPLREALSQALKLYPGNQVLWRSYVQIQNKSHSASKTRRFFDTITRSAKPLEPWLFAIEAEKLRKRLVETVQRLDGREIHATIPETGLMHRIQALFENAMRSDSGSQCPLLWRMYLNFLVSLGNKERSKGVFYKALQNCPWAKVLYLDAVEYFPDEMQEILDLMTEKELRVRLPLEELELLLED

SEQ ID NO: 195948 - protein, 933 aa, Artificial Sequence
  derived and/or modified sequence
MNIDGVAISSKTEPPSSEPISFIPVKDLEDAAPVTTWLNPLGIYDQSTTHWLQGQGPPEQESKQPDAQPDSESAALKAKVEEFNRRVRENPRDTQLWMAFVAFQDEVMKSPGLYAIEEGEQEKRKRSLKLILEKKLAILERAIESNQSSVDLKLAKLKLCTEFWEPSTLVKEWQKLIFLHPNNTALWQKYLLFCQSQFSTFSISKIHSLYGKCLSTLSAVKDGSILSHPALPGTEEAMFALFLQQCHFLRQAGHSEKAISLFQAMVDFTFFKPDSVKDLPTKGQVEFFEPFWDSGEPRAGEKGARGWKAWMHQQERGGWVVINPDEDDDEPEEDDQEIKDKTLPRWQIWLAAERSRDQRHWRPWRPDKTKKQTEEDCEDPERQVLFDDIGQSLIRLSSHDLQFQLVEAFLQFLGVPSGFTPPASCLYLAMDENSIFDNGLYDEKPLTFFNPLFSGASCVGRMDRLGYPRWTRGQNREGEEFIRNVFHLVMPLFSGKEKSQLCFSWLQYEIAKVIWCLHTKNKKRLKSQGKNCKKLAKNLLKEPENCNNFCLWKQYAHLEWLLGNTEDARKVFDTALGMAGSRELKDSDLCELSLLYAELEVELSPEVRRAATARAVHILTKLTESSPYGPYTGQVLAVHILKARKAYEHALQDCLGDSCVSNPAPTDSCSRLISLAKCFMLFQYLTIGIDAAVQIYEQVFAKLNSSVFPEGSGEGDSASSQSWTSVLEAITLMHTSLLRFHMKVSVYPLAPLREALSQALKLYPGNQVLWRSYVQIQNKSHSASKTRRFFDTITRSAKPLEPWLFAIEAEKLRKRLVETVQRLDGREIHATIPETGLMHRIQALFENAMRSDSGSQCPLLWRMYLNFLVSLGNKERSKGVFYKALQNCPWAKVLYLDAVEYFPDEMQEILDLMTEKELRVRLPLEELELLLED

SEQ ID NO: 195949 - DNA, 5828 bp, Artificial Sequence
  derived and/or modified sequence
ccccttggccccgccccaccctgctttgccctgcctctccctgccccgccgcgccccagtcccttgacgaccctcctctctgggccccgcccctcccgcttcggggtcaagccccagagagcgccgcgaaaaccacatttcccagagtgcaccgcgacggcaggggtcctcagaccggcgctcgctcgccggcgccatccctatagagaagaacggaggtacggcctgtggtcatggcgctgttcccagcctttgcggggcttagtgaggctcccgatggcgggagctccaggaaagagttagactggctgagcaacccaagcttttgtgttggatccataacgtccctgagccaacaaactgaagcagctccagcccatgtttctgaagggttaccgctgacaaggagtcatctgaaatcagagtcttcagatgaaagtgacactaacaaaaagctcaaacaaacaagtagaaaaaagaagaaagagaaaaagaaaaaaaggaagcatcagcatcataagaaaacaaagaggaagcatgggccgtcgagtagcagcaggtctgagacagacaccgattctgaaaaggacaaaccttccagaggcgttggaggcagtaaaaaggaatctgaggaaccgaatcaaggaaataatgctgcagctgatactggacatcgctttgtttggcttgaggacattcaggctgtgacgggagaaaccttcagaacagataagaaaccagatcctgcgaactgggagtacaagtctctctaccgaggggatatagcaagatacaagaggaaaggagactcctgccttggcattaaccctaagaagcagtgcatatcttgggaagggacttccacagagaagaagcattcacgcaagcaggttgaacgctattttactaagaagagtgtgggattaatgaacatcgatggagttgccattagcagtaaaactgaacctccctcatctgagcccatctcctttataccagtgaaggacttggaagatgcggctcctgttacaacctggttgaatcctctggggatttatgatcagtcaaccacacattggctacaaggacagggtcctccagagcaggaatcaaagcagccagacgcacagccagacagcgagagtgcggctctcaaggccaaggtggaggagtttaacaggagggtgcgggagaatcctcgggatacgcagctgtggatggcatttgttgcttttcaggacgaggtcatgaaaagtcctggcctgtatgccatcgaggaaggagagcaggaaaagcgaaagaggtccctgaagctcattctggagaagaagctggccattctggagcgggccattgagagcaaccagagcagtgtggatctgaaactggccaagctgaagctctgcacagagttctgggagccctccactctggtcaaagagtggcagaaactgatatttttgcatcccaataatacagccctttggcagaaataccttttattttgccagagccagtttagtaccttttcgatatcaaaaattcacagtctttatggaaaatgcttgagcactttgtctgctgttaaggacggcagcatcttatctcaccctgcgttgcctggcacggaagaggccatgtttgcactctttcttcagcagtgccactttctgcggcaggctggccactctgagaaggccatctcattgttccaggccatggtggacttcaccttcttcaaacccgacagcgtgaaagatctgcctaccaaaggacaggtggaattctttgaacccttttgggacagtggagagccccgggctggggagaagggagcccgaggctggaaggcgtggatgcaccagcaggaacgaggtggctgggtggtcatcaacccagatgaggatgacgatgaaccagaagaggatgaccaggaaataaaagataagactctgcccaggtggcagatctggcttgctgctgagcgttcccgtgaccagaggcactggcggccctggcgccctgataagaccaagaagcaaaccgaggaagactgtgaggatcccgagagacaggtgttgtttgatgatattgggcaatctttgatcagactttccagccatgatcttcagttccagctggtggaggccttcctgcagttcttgggtgtgccttctggctttactcctccagcctcctgtctttatctggccatggatgagaacagcatctttgataatggactttatgatgaaaagcccttgacttttttcaaccctttgttttctggggctagctgtgttggccgcatggataggttgggctatcctcgctggaccaggggtcagaaccgagagggcgaggagttcatccgcaatgtcttccaccttgtcatgcctttattttcaggcaaagagaagtcccagctctgcttctcctggttacagtatgagattgcaaaggtcatttggtgcctgcacactaaaaacaagaagagattaaagtctcaagggaagaactgcaaaaaactagccaagaatctccttaaggagccagaaaactgcaacaacttttgcctgtggaagcagtatgcacatctggagtggttgcttggcaacacggaggatgccagaaaagtttttgacacagcacttggcatggcaggaagcagagaactgaaagactctgacctctgtgagctcagtctgctctatgctgagctggaggtggagctgtcgccagaagtgagaagggctgccacagctcgagctgttcacatattaaccaagctgactgagagcagcccctatgggccctacactggacaggtgttggctgttcacattttgaaagcgcgaaaggcttatgagcacgcactgcaggactgtttgggtgacagctgtgtctccaatccagctcccaccgattcctgtagccgcctaattagcctggctaaatgcttcatgctcttccagtatttgaccatagggattgatgctgctgtgcagatatacgaacaggtgtttgcaaaactgaacagttctgttttcccagaaggctctggcgagggggacagtgccagctcccagagttggaccagtgttctcgaagccatcacactgatgcacacgagcctgctgagattccacatgaaagtgagtgtttacccgctggcccctctgcgagaggcactctcacaggctttaaagttgtatccaggcaaccaggttctttggaggtcctatgtacagattcagaataagtcccacagtgccagcaaaaccaggagattttttgacacaatcaccaggtctgccaaacccttggagccttggttgtttgcaattgaagctgagaaactgaggaagagactggtggaaactgtccagaggttagacggtagagagatccacgccacaattcctgagaccggcttaatgcatcggatccaagccctgtttgaaaatgccatgcgcagcgacagtggcagccagtgccccttgctgtggaggatgtatttgaactttctggtttccttaggaaataaagaaagaagcaaaggtgtattctacaaagcacttcagaattgcccttgggcaaaggtgttgtacctggacgccgtggagtatttccccgatgagatgcaggagatcctggacctgatgactgagaaggagctccgggtgcgcctgccgctggaggagctggagctgctgctggaggattagagagcagcgggaaaacgggctgtgcctgcgaggccaagttgcccaccctgcggagctaggaggcgcgagcagagaacgtgtgtgttaggagaactcggcttttgaaatgttctttctcgatagtaataatgtgggctgccagcctctcacatcttgcacactttttgggtgtgtaaatgacacaaaagttatttacatattatatatgtgaatatgtgtatatatgtacatagccagagagtcatgccacgtggtcattaaaccgatgatgattgaggcgtggcagcgtccttgctcattctctccctgtgcgcagccagcactggcccccgcacggtgaatgtgttccctccgctggtgtcgtggtggtcctgccaggccctctctgagataaaggtctggtttttcagcactaggatgtcttccccaggctggtgagcaggagattttgctcttgtgttgagacccgcagttaacgcttggtgttctggcctgcacgcagtgtgtggcaagttccctgagtttacctcggcggcgatgcctccgcctggagctggaggggcagcgtgccctggggctgctgaaaaactcaggcctgtggagtcagaacccgctcttcagcaggtcccaggccacttgagtgtggaaggctgcccggggcactggcagcctctgggggaagcctgctcccaagccgtctaggagccgagcacgctgtaccgccagccccagccctgcctgcatgaggggcccggcacgcttgtgcagcaacgctgcttacactatgaaggccaaggctggcctggttctggtgttgcattcgagggctgtgaacagaatgaaatgtcaacatccatttttcagacttgttctgcctccgaagagatttttagtgctgagtgattttcactattaacatatggctggaaggaatggttttcttatcttctccgagctctagactggctagcttctctctggctttttttgttttgttttcctctctttagaattgctgtatacttgtatctcctcagcacatttagaaaagccagtgtataattttggctggcaactgacggacgcagcgggcagcagcaggcagggcagcgcacgagagcacctcccagggcacggtgggaaactggccagcccagccccactactgccctctcctgctcgtccccagtccctgagctacaggtggctgtaggcagaagcccaccgggtgttccttagcgacagacaggtcgtcagctgctccccttgatgccttttcacagaaacaaccctcaacttgaggaagttgagagctccactccgaggtggacttgctccccctccctgagagctaactggcttgaactgtcatgagttcctggctgcccacaaagagggaccttctccacccttgtcctctgcgtggggcagacatcagccagacatgtcaccgacctgattgggggcagggagtaggaagtccaggaccaaaccatgctccccatgacagcagctggcgcctcagtccccatctgactcatgtctcttctcatctggttcagaacttagaagggcgtggcctctgatcagctggttccctccaaaccccagtggcaacctgtcccttgagagccaggaatggctcttagcagtgggcagtgagcccccgagaggataaagcggctgctcgaacagattgcgagcacattacttgctgcatgggaggaggtttaaaacaaatcaaagattccttgagggcattttacagaaaacaagatgtcaagagcatcactgttgttatttaaaagcccatttgaggccaggcgcggtggctcacgtctgtaatcccagcactttgggaggccgaggcggacggatcacgaggtcaggagatcgagaccatcctggctaacatggtgaaacccccgtctctactaaaaatacaaaaaattagccgggcgtggtggctggcgcctgtagtcccagctactcggaaggctaaggcaggagaatggcgtgaacctgggaggcagagcttgcagtgagccaagatcgcgccactgcactccagcctgggcgacacagcaagactccgtctcg

SEQ ID NO: 195950 - DNA, 3465 bp, Artificial Sequence
  derived and/or modified sequence
atagagaagaacggaggtacggcctgtggtcatggcgctgttcccagcctttgcggggcttagtgaggctcccgatggcgggagctccaggaaagtcaaggaaataatgctgcagctgatactggacatcgctttgtttggcttgaggacattcaggctgtgacgggagaaaccttcagaacagataagaaaccagatcctgcgaactgggagtacaagtctctctaccgaggggatatagcaagatacaagaggaaaggagactcctgccttggcattaaccctaagaagcagtgcatatcttgggaagggacttccacagagaagaagcattcacgcaagcaggttgaacgctattttactaagaagagtgtgggattaatgaacatcgatggagttgccattagcagtaaaactgaacctccctcatctgagcccatctcctttataccagtgaaggacttggaagatgcggctcctgttacaacctggttgaatcctctggggatttatgatcagtcaaccacacattggctacaaggacagggtcctccagagcaggaatcaaagcagccagacgcacagccagacagcgagagtgcggctctcaaggccaaggtggaggagtttaacaggagggtgcgggagaatcctcgggatacgcagctgtggatggcatttgttgcttttcaggacgaggtcatgaaaagtcctggcctgtatgccatcgaggaaggagagcaggaaaagcgaaagaggtccctgaagctcattctggagaagaagctggccattctggagcgggccattgagagcaaccagagcagtgtggatctgaaactggccaagctgaagctctgcacagagttctgggagccctccactctggtcaaagagtggcagaaactgatatttttgcatcccaataatacagccctttggcagaaataccttttattttgccagagccagtttagtaccttttcgatatcaaaaattcacagtctttatggaaaatgcttgagcactttgtctgctgttaaggacggcagcatcttatctcaccctgcgttgcctggcacggaagaggccatgtttgcactctttcttcagcagtgccactttctgcggcaggctggccactctgagaaggccatctcattgttccaggccatggtggacttcaccttcttcaaacccgacagcgtgaaagatctgcctaccaaaggacaggtggaattctttgaacccttttgggacagtggagagccccgggctggggagaagggagcccgaggctggaaggcgtggatgcaccagcaggaacgaggtggctgggtggtcatcaacccagatgaggatgacgatgaaccagaagaggatgaccaggaaataaaagataagactctgcccaggtggcagatctggcttgctgctgagcgttcccgtgaccagaggcactggcggccctggcgccctgataagaccaagaagcaaaccgaggaagactgtgaggatcccgagagacaggtgttgtttgatgatattgggcaatctttgatcagactttccagccatgatcttcagttccagctggtggaggccttcctgcagttcttgggtgtgccttctggctttactcctccagcctcctgtctttatctggccatggatgagaacagcatctttgataatggactttatgatgaaaagcccttgacttttttcaaccctttgttttctggggctagctgtgttggccgcatggataggttgggctatcctcgctggaccaggggtcagaaccgagagggcgaggagttcatccgcaatgtcttccaccttgtcatgcctttattttcaggcaaagagaagtcccagctctgcttctcctggttacagtatgagattgcaaaggtcatttggtgcctgcacactaaaaacaagaagagattaaagtctcaagggaagaactgcaaaaaactagccaagaatctccttaaggagccagaaaactgcaacaacttttgcctgtggaagcagtatgcacatctggagtggttgcttggcaacacggaggatgccagaaaagtttttgacacagcacttggcatggcaggaagcagagaactgaaagactctgacctctgtgagctcagtctgctctatgctgagctggaggtggagctgtcgccagaagtgagaagggctgccacagctcgagctgttcacatattaaccaagctgactgagagcagcccctatgggccctacactggacaggtgttggctgttcacattttgaaagcgcgaaaggcttatgagcacgcactgcaggactgtttgggtgacagctgtgtctccaatccagctcccaccgattcctgtagccgcctaattagcctggctaaatgcttcatgctcttccagtatttgaccatagggattgatgctgctgtgcagatatacgaacaggtgtttgcaaaactgaacagttctgttttcccagaaggctctggcgagggggacagtgccagctcccagagttggaccagtgttctcgaagccatcacactgatgcacacgagcctgctgagattccacatgaaagtgagtgtttacccgctggcccctctgcgagaggcactctcacaggctttaaagttgtatccaggcaaccaggttctttggaggtcctatgtacagattcagaataagtcccacagtgccagcaaaaccaggagattttttgacacaatcaccaggtctgccaaacccttggagccttggttgtttgcaattgaagctgagaaactgaggaagagactggtggaaactgtccagaggttagacggtagagagatccacgccacaattcctgagaccggcttaatgcatcggatccaagccctgtttgaaaatgccatgcgcagcgacagtggcagccagtgccccttgctgtggaggatgtatttgaactttctggtttccttaggaaataaagaaagaagcaaaggtgtattctacaaagcacttcagaattgcccttgggcaaaggtgttgtacctggacgccgtggagtatttccccgatgagatgcaggagatcctggacctgatgactgagaaggagctccgggtgcgcctgccgctggaggagctggagctgctgctggaggattagagagcagcgggaaaacgggctgtgcctgcgaggccaagttgcccaccctgcggagctaggaggcgcgagcagagaacgtgtgtgttaggagaactcggcttttgaaatgttctttctcgatagtaataatgtgggctgccagcctctcacatcttgcacactttttgggtgtgtaaatgacacaaaagttatttacatattatatatgtgaatatgtgtatatatgtacatagccagagagtcatgccacgtggtcattaaaccgatgatgattgaggcgtg

SEQ ID NO: 195951 - DNA, 3495 bp, Artificial Sequence
  derived and/or modified sequence
atggccctgttccccgccttcgccggcctgagcgaggcccccgacggcggcagcagcagaaaggagctggactggctgagcaaccccagcttctgcgtgggcagcatcaccagcctgagccagcagaccgaggccgcccccgcccacgtgagcgagggcctgcccctgaccagaagccacctgaagagcgagagcagcgacgagagcgacaccaacaagaagctgaagcagaccagcagaaagaagaagaaggagaagaagaagaagagaaagcaccagcaccacaagaagaccaagagaaagcacggccccagcagcagcagcagaagcgagaccgacaccgacagcgagaaggacaagcccagcagaggcgtgggcggcagcaagaaggagagcgaggagcccaaccagggcaacaacgccgccgccgacaccggccacagattcgtgtggctggaggacatccaggccgtgaccggcgagaccttcagaaccgacaagaagcccgaccccgccaactgggagtacaagagcctgtacagaggcgacatcgccagatacaagagaaagggcgacagctgcctgggcatcaaccccaagaagcagtgcatcagctgggagggcaccagcaccgagaagaagcacagcagaaagcaggtggagagatacttcaccaagaagagcgtgggcctgatgaacatcgacggcgtggccatcagcagcaagaccgagccccccagcagcgagcccatcagcttcatccccgtgaaggacctggaggacgccgcccccgtgaccacctggctgaaccccctgggcatctacgaccagagcaccacccactggctgcagggccagggcccccccgagcaggagagcaagcagcccgacgcccagcccgacagcgagagcgccgccctgaaggccaaggtggaggagttcaacagaagagtgagagagaaccccagagacacccagctgtggatggccttcgtggccttccaggacgaggtgatgaagagccccggcctgtacgccatcgaggagggcgagcaggagaagagaaagagaagcctgaagctgatcctggagaagaagctggccatcctggagagagccatcgagagcaaccagagcagcgtggacctgaagctggccaagctgaagctgtgcaccgagttctgggagcccagcaccctggtgaaggagtggcagaagctgatcttcctgcaccccaacaacaccgccctgtggcagaagtacctgctgttctgccagagccagttcagcaccttcagcatcagcaagatccacagcctgtacggcaagtgcctgagcaccctgagcgccgtgaaggacggcagcatcctgagccaccccgccctgcccggcaccgaggaggccatgttcgccctgttcctgcagcagtgccacttcctgagacaggccggccacagcgagaaggccatcagcctgttccaggccatggtggacttcaccttcttcaagcccgacagcgtgaaggacctgcccaccaagggccaggtggagttcttcgagcccttctgggacagcggcgagcccagagccggcgagaagggcgccagaggctggaaggcctggatgcaccagcaggagagaggcggctgggtggtgatcaaccccgacgaggacgacgacgagcccgaggaggacgaccaggagatcaaggacaagaccctgcccagatggcagatctggctggccgccgagagaagcagagaccagagacactggagaccctggagacccgacaagaccaagaagcagaccgaggaggactgcgaggaccccgagagacaggtgctgttcgacgacatcggccagagcctgatcagactgagcagccacgacctgcagttccagctggtggaggccttcctgcagttcctgggcgtgcccagcggcttcaccccccccgccagctgcctgtacctggccatggacgagaacagcatcttcgacaacggcctgtacgacgagaagcccctgaccttcttcaaccccctgttcagcggcgccagctgcgtgggcagaatggacagactgggctaccccagatggaccagaggccagaacagagagggcgaggagttcatcagaaacgtgttccacctggtgatgcccctgttcagcggcaaggagaagagccagctgtgcttcagctggctgcagtacgagatcgccaaggtgatctggtgcctgcacaccaagaacaagaagagactgaagagccagggcaagaactgcaagaagctggccaagaacctgctgaaggagcccgagaactgcaacaacttctgcctgtggaagcagtacgcccacctggagtggctgctgggcaacaccgaggacgccagaaaggtgttcgacaccgccctgggcatggccggcagcagagagctgaaggacagcgacctgtgcgagctgagcctgctgtacgccgagctggaggtggagctgagccccgaggtgagaagagccgccaccgccagagccgtgcacatcctgaccaagctgaccgagagcagcccctacggcccctacaccggccaggtgctggccgtgcacatcctgaaggccagaaaggcctacgagcacgccctgcaggactgcctgggcgacagctgcgtgagcaaccccgcccccaccgacagctgcagcagactgatcagcctggccaagtgcttcatgctgttccagtacctgaccatcggcatcgacgccgccgtgcagatctacgagcaggtgttcgccaagctgaacagcagcgtgttccccgagggcagcggcgagggcgacagcgccagcagccagagctggaccagcgtgctggaggccatcaccctgatgcacaccagcctgctgagattccacatgaaggtgagcgtgtaccccctggcccccctgagagaggccctgagccaggccctgaagctgtaccccggcaaccaggtgctgtggagaagctacgtgcagatccagaacaagagccacagcgccagcaagaccagaagattcttcgacaccatcaccagaagcgccaagcccctggagccctggctgttcgccatcgaggccgagaagctgagaaagagactggtggagaccgtgcagagactggacggcagagagatccacgccaccatccccgagaccggcctgatgcacagaatccaggccctgttcgagaacgccatgagaagcgacagcggcagccagtgccccctgctgtggagaatgtacctgaacttcctggtgagcctgggcaacaaggagagaagcaagggcgtgttctacaaggccctgcagaactgcccctgggccaaggtgctgtacctggacgccgtggagtacttccccgacgagatgcaggagatcctggacctgatgaccgagaaggagctgagagtgagactgcccctggaggagctggagctgctgctggaggactag

SEQ ID NO: 195952 - DNA, 2802 bp, Artificial Sequence
  derived and/or modified sequence
atgaacatcgacggcgtggccatcagcagcaagaccgagccccccagcagcgagcccatcagcttcatccccgtgaaggacctggaggacgccgcccccgtgaccacctggctgaaccccctgggcatctacgaccagagcaccacccactggctgcagggccagggcccccccgagcaggagagcaagcagcccgacgcccagcccgacagcgagagcgccgccctgaaggccaaggtggaggagttcaacagaagagtgagagagaaccccagagacacccagctgtggatggccttcgtggccttccaggacgaggtgatgaagagccccggcctgtacgccatcgaggagggcgagcaggagaagagaaagagaagcctgaagctgatcctggagaagaagctggccatcctggagagagccatcgagagcaaccagagcagcgtggacctgaagctggccaagctgaagctgtgcaccgagttctgggagcccagcaccctggtgaaggagtggcagaagctgatcttcctgcaccccaacaacaccgccctgtggcagaagtacctgctgttctgccagagccagttcagcaccttcagcatcagcaagatccacagcctgtacggcaagtgcctgagcaccctgagcgccgtgaaggacggcagcatcctgagccaccccgccctgcccggcaccgaggaggccatgttcgccctgttcctgcagcagtgccacttcctgagacaggccggccacagcgagaaggccatcagcctgttccaggccatggtggacttcaccttcttcaagcccgacagcgtgaaggacctgcccaccaagggccaggtggagttcttcgagcccttctgggacagcggcgagcccagagccggcgagaagggcgccagaggctggaaggcctggatgcaccagcaggagagaggcggctgggtggtgatcaaccccgacgaggacgacgacgagcccgaggaggacgaccaggagatcaaggacaagaccctgcccagatggcagatctggctggccgccgagagaagcagagaccagagacactggagaccctggagacccgacaagaccaagaagcagaccgaggaggactgcgaggaccccgagagacaggtgctgttcgacgacatcggccagagcctgatcagactgagcagccacgacctgcagttccagctggtggaggccttcctgcagttcctgggcgtgcccagcggcttcaccccccccgccagctgcctgtacctggccatggacgagaacagcatcttcgacaacggcctgtacgacgagaagcccctgaccttcttcaaccccctgttcagcggcgccagctgcgtgggcagaatggacagactgggctaccccagatggaccagaggccagaacagagagggcgaggagttcatcagaaacgtgttccacctggtgatgcccctgttcagcggcaaggagaagagccagctgtgcttcagctggctgcagtacgagatcgccaaggtgatctggtgcctgcacaccaagaacaagaagagactgaagagccagggcaagaactgcaagaagctggccaagaacctgctgaaggagcccgagaactgcaacaacttctgcctgtggaagcagtacgcccacctggagtggctgctgggcaacaccgaggacgccagaaaggtgttcgacaccgccctgggcatggccggcagcagagagctgaaggacagcgacctgtgcgagctgagcctgctgtacgccgagctggaggtggagctgagccccgaggtgagaagagccgccaccgccagagccgtgcacatcctgaccaagctgaccgagagcagcccctacggcccctacaccggccaggtgctggccgtgcacatcctgaaggccagaaaggcctacgagcacgccctgcaggactgcctgggcgacagctgcgtgagcaaccccgcccccaccgacagctgcagcagactgatcagcctggccaagtgcttcatgctgttccagtacctgaccatcggcatcgacgccgccgtgcagatctacgagcaggtgttcgccaagctgaacagcagcgtgttccccgagggcagcggcgagggcgacagcgccagcagccagagctggaccagcgtgctggaggccatcaccctgatgcacaccagcctgctgagattccacatgaaggtgagcgtgtaccccctggcccccctgagagaggccctgagccaggccctgaagctgtaccccggcaaccaggtgctgtggagaagctacgtgcagatccagaacaagagccacagcgccagcaagaccagaagattcttcgacaccatcaccagaagcgccaagcccctggagccctggctgttcgccatcgaggccgagaagctgagaaagagactggtggagaccgtgcagagactggacggcagagagatccacgccaccatccccgagaccggcctgatgcacagaatccaggccctgttcgagaacgccatgagaagcgacagcggcagccagtgccccctgctgtggagaatgtacctgaacttcctggtgagcctgggcaacaaggagagaagcaagggcgtgttctacaaggccctgcagaactgcccctgggccaaggtgctgtacctggacgccgtggagtacttccccgacgagatgcaggagatcctggacctgatgaccgagaaggagctgagagtgagactgcccctggaggagctggagctgctgctggaggactag

SEQ ID NO: 195953 - DNA, 3495 bp, Artificial Sequence
  derived and/or modified sequence
atggcacttttccccgccttcgctggccttagcgaggcccccgatggtggctctagtaggaaagaacttgattggttgagcaaccccagcttttgcgtcgggtccattacgtccctgtcgcagcaaacagaagctgcccctgcgcatgtgtcggaagggttaccactgacgagaagtcacctcaagagtgaatccagcgatgaatccgacactaacaaaaaattaaaacagaccagccggaagaaaaaaaaagaaaaaaagaaaaagcggaaacatcagcaccacaagaagactaagcgaaaacatggacccagttcttcatctagatcagagactgatacagacagcgaaaaagacaaaccctcccggggcgtgggcggctctaagaaagagtcagaggaaccaaaccagggcaacaacgctgctgccgacacagggcaccgcttcgtgtggctagaggacattcaggccgtgaccggcgagaccttccggaccgacaaaaaaccggaccctgctaactgggaatacaagtcactttacagaggagatatcgcgcgatataagaggaagggagattcgtgtctggggatcaaccctaagaaacaatgtataagctgggagggcacatccacagaaaaaaaacattcgaggaaacaggtggagagatactttacaaagaaatccgtagggctcatgaatatcgatggagtggccatctcttctaagacagaaccaccatcctccgaacctattagttttatccctgttaaagatctcgaggacgccgctcccgtgactacttggcttaatcccttggggatctacgaccagtcaaccacgcactggttgcaggggcaggggccccccgaacaggaatccaagcagcccgacgctcaacctgatagcgaatctgctgcgcttaaagctaaagtcgaggagttcaataggcgcgtgagagagaacccacgcgatacccagctatggatggccttcgtggctttccaggatgaagttatgaaatcaccaggactgtatgccattgaggagggagagcaagaaaaaagaaagaggtcgcttaagttaatacttgaaaaaaagcttgccatccttgaacgggctatcgaaagtaatcagtcgagcgtagaccttaaattagctaagttgaagctttgtactgagttctgggagccatctacattagtcaaggagtggcagaagctgatctttttacatccaaacaatactgcactgtggcagaagtacttgctgttctgccagtcgcagttctccactttttcaatcagcaagatccacagcttgtacggaaaatgtctgtctaccctgagtgccgtcaaagacggaagcattctctctcaccctgccctccctggaacagaagaggccatgtttgcactcttcctgcagcagtgccacttcctgagacaggccgggcacagtgagaaagctatttccctcttccaagcgatggtggattttactttctttaaacccgacagcgtgaaggatctgcctaccaaaggtcaggtggaattcttcgagccgttctgggattctggcgaaccccgtgctggagagaagggtgccagggggtggaaggcatggatgcatcagcaggagcgcggtgggtgggttgtgattaaccccgacgaggacgatgacgagcctgaagaggacgatcaggagatcaaggacaagaccttgccacgctggcagatctggctcgccgccgagcgctccagggaccaaaggcactggagaccatggcgccctgataagactaaaaagcagactgaggaggattgtgaggatccggagaggcaggtgctttttgatgacatagggcaaagccttatcagactgagctcacatgatcttcagttccagctggtggaagcgttcttgcagttcttaggagtccccagcggctttaccccccccgctagttgtctgtaccttgccatggatgagaattccattttcgacaacgggctgtatgatgaaaaaccacttacattctttaatccactgttcagtggagcctcttgtgtgggaagaatggatcgactgggctacccaagatggacgcgcggccagaacagagaaggagaagagttcattaggaacgtattccacctggttatgccactgtttagtggcaaggagaaatcacaactgtgtttcagctggttgcagtacgaaattgccaaggtgatctggtgtctccacaccaagaacaagaagcgcctaaagagccaggggaagaactgtaaaaaactggcgaagaacttgctaaaggaacccgaaaactgcaacaatttctgcttatggaagcagtatgctcacctggagtggctcttaggcaacactgaggacgctcgcaaagtgttcgacactgccctgggcatggcaggaagtcgggaactgaaggactccgatctgtgtgaactatcacttttgtatgcggaactggaagtggagctgtcccccgaagtccggcgggcagcaacagctagggcagtacatatccttaccaagttaaccgaaagttcaccctacgggccatatacaggacaagtgctcgcagtgcatatcctgaaggcgcggaaagcctacgagcacgccttacaggactgtcttggcgactcttgcgtttctaacccggcgcctactgattcatgctcaagattaattagcctcgcaaaatgttttatgctgtttcagtacctgactatcggcattgacgccgcagttcaaatttatgaacaagtctttgctaagttgaacagctccgttttccctgagggcagcggggaaggagacagcgcaagttcccagagttggaccagcgtgttggaggcgatcacgctgatgcacacttctctgctgaggttccacatgaaggtcagcgtctaccccctggcccctcttcgcgaggctctgagccaggctcttaaactctaccccggcaaccaggtgctctggcggtcctacgttcagatacagaacaagtctcatagcgcatctaaaacaaggagattttttgataccataacacgctcagcaaagcccctggagccctggctcttcgctatcgaagcagagaaactgcggaagagactcgtcgagacagtgcagcgtcttgacggacgtgagattcacgccactatcccggagacaggccttatgcaccgtatccaggctttatttgaaaatgccatgaggtctgattccggatctcagtgccccctgttatggcgtatgtatcttaactttctggttagcctgggcaataaagagagatcaaagggcgtgttctacaaagcactgcagaactgtccctgggctaaagttctctatctggatgccgttgagtacttcccagatgagatgcaagagatactggaccttatgactgaaaaagaactacgcgtgagactgcccctggaggaactggaactgctgctcgaggactag

SEQ ID NO: 195954 - DNA, 2802 bp, Artificial Sequence
  derived and/or modified sequence
atgaacatagacggcgtggccatctcttccaaaaccgaaccaccaagctccgagcccatatcattcattccagtaaaggacctcgaggacgccgcgccagtaactacatggctcaacccgctcggcatttatgaccaaagcacaacccactggctccagggacagggtccaccggaacaggaatctaagcagcctgacgcccagccggactctgagtccgcggcgctcaaggctaaggtggaggagtttaaccgccgcgtacgcgagaacccacgcgatactcagctttggatggcattcgtggcttttcaagatgaggttatgaagagccccggactttatgcaatcgaggaaggagagcaggagaagcgtaagcgctcgcttaagctgatcctggagaagaagttagcaatactggaacgtgcgatcgaatcaaatcagagttcagttgacctcaagctcgccaagttaaagctgtgcaccgaattctgggagcctagtaccttagtcaaagagtggcagaagctgatcttcctgcatcctaacaataccgccctgtggcaaaaatacctgctgttttgtcagtctcaatttagcacctttagtataagcaagattcattccctctacggtaagtgcctcagtacactgtctgcagtcaaggatggcagcattctgagtcaccccgccttacccggcactgaagaagccatgtttgcccttttcctacagcagtgtcactttctccgccaggcaggacatagcgaaaaagccatatctctcttccaggctatggtcgactttaccttttttaagcccgatagtgtgaaggatcttcccacaaagggccaggtcgaatttttcgagcctttctgggactctggcgagccacgggccggcgagaaaggcgccaggggatggaaggcctggatgcatcagcaggaacgaggtggatgggttgttattaatcccgacgaggatgatgatgagcccgaagaggatgatcaggagattaaggacaagaccctcccgcgctggcaaatctggctagcggctgaaagaagtagagaccagagacactggaggccgtggcggccggataagacaaaaaagcagactgaggaggattgcgaggaccctgagaggcaagttcttttcgatgatatcggccagtccctcattcgcttgtcctcacacgatctgcaattccaacttgtcgaagcgtttttacaattcctgggcgtaccatctggattcacccctcctgcttcatgcctatacctggctatggacgagaattcaatctttgataatgggctgtatgacgaaaaacctctgaccttcttcaaccctcttttcagcggagccagctgcgtgggtcgcatggacaggttgggatacccccggtggacacgaggtcagaaccgcgagggtgaagagtttatccgtaacgtattccatttggtcatgccactcttctctggtaaggaaaagagtcagctgtgtttttcttggcttcaatacgaaatagcaaaagtcatctggtgtcttcatacaaagaataaaaagagactgaaatctcaaggcaagaattgcaaaaagttagcgaaaaaccttttgaaagagccagagaactgtaataatttctgtctgtggaaacagtatgcccacctggagtggttactaggcaatacagaggatgcccggaaggtcttcgacaccgccctggggatggccggatcccgtgagctgaaggactctgatctgtgcgaattgtccctgctttatgcagagctagaggttgaacttagtcctgaggtgcgccgcgccgccaccgccagggccgtgcacattttaactaaactgaccgagagttcaccatacgggccatataccggacaggttctggccgtccacattctcaaggctagaaaggcgtacgaacatgctctgcaggattgtcttggagattcgtgtgtgagcaatcctgcaccaacagactcatgttcccggctgatctccttggctaaatgttttatgctcttccagtatcttactattggcatcgacgccgcagttcagatttatgagcaggtgtttgccaagttgaattcctccgtgtttccagaaggctctggggaaggtgattcggcctccagtcaaagctggacgtctgttttggaagcaattactctgatgcatacatctctcttgaggttccacatgaaggtgtcagtgtacccgctcgctccactcagggaggctctttcacaggcgttgaaactatatccagggaaccaagtgctgtggaggtcgtatgtccagattcagaacaaatcgcacagcgcctccaagactaggcggttcttcgatacgatcacaaggagcgctaagccactcgaaccctggttattcgcgatcgaggcagaaaaacttagaaagcgtctggttgagacagtgcagaggttggacggccgggagattcacgcgacgatcccagagacaggtcttatgcataggattcaagcgcttttcgaaaatgcgatgcgatccgatagcggcagccagtgtccgctgctatggcgcatgtacctgaattttttggtgtcgcttggaaacaaagagcgctccaagggagtcttttacaaagctctgcagaactgtccatgggcgaaagtcctgtatttagatgccgtcgagtacttcccagacgaaatgcaggaaattctggacttgatgaccgagaaggaattacgcgttaggctgcctctagaggagctcgaactccttctggaagactag

SEQ ID NO: 195955 - DNA, 3495 bp, Artificial Sequence
  derived and/or modified sequence
atggccctcttccctgcctttgctggcctgtctgaggccccagatggcggcagcagcaggaaggagctggactggctgagcaaccccagcttctgtgtgggcagcatcaccagcctgagccagcagacagaagctgccccagcccacgtgtctgagggcctgcccctgaccaggagccacctgaagtctgagagcagtgatgaaagtgacaccaacaagaagctgaagcagaccagcaggaagaagaagaaggagaagaagaagaagaggaagcaccagcaccacaagaagaccaagaggaagcacggccccagcagcagcagccgctcagaaacagacacagacagcgagaaggacaagcccagccggggcgtgggcggcagcaagaaggagagcgaggagcccaaccagggcaacaatgctgctgctgacaccggccacagatttgtgtggctggaggacatccaggccgtgactggagagaccttcagaacagacaagaagccagaccctgccaactgggagtacaagagcctgtacagaggagacatcgcccgctacaagaggaagggggacagctgcctgggcatcaaccccaagaagcagtgcatctcctgggagggcaccagcacagagaagaagcacagcaggaagcaggtggagcgctacttcaccaagaagtctgtgggcctgatgaacattgatggagtggccatcagcagcaagacagagccccccagcagcgagcccatctccttcatccctgtgaaggacctggaggatgctgcccctgtgaccacctggctgaaccccctgggcatctatgaccagagcaccacccactggctgcagggccagggccccccagagcaggagagcaagcagccagatgcccagcctgacagcgagagcgctgccctgaaggccaaggtggaggagttcaacagaagagtgcgggagaacccccgggacacccagctgtggatggcctttgtggccttccaggatgaggtgatgaagagccctggcctgtatgccatcgaggagggggagcaggagaagaggaagaggagcctgaagctgatcctggagaagaagctggccatcctggagcgggccatcgagagcaaccagagctctgtggacctgaagctggccaagctgaagctgtgcacagagttctgggagcccagcaccctggtgaaggagtggcagaagctgatcttcctgcaccccaacaacacagccctgtggcagaagtacctgctcttctgccagagccagttcagcaccttcagcatcagcaagatccacagcctgtatggcaagtgcctgagcaccctgtctgctgtgaaggatggcagcatcctgagccacccagccctgcctggaacagaggaggccatgtttgccctcttcctgcagcagtgccacttcctgcggcaggccggccacagcgagaaggccatcagcctcttccaggccatggtggacttcaccttcttcaagccagacagcgtgaaggacctgcccaccaagggccaggtggagttctttgagcccttctgggacagcggggagccccgggccggggagaagggggcccggggctggaaggcctggatgcaccagcaggagcggggcggctgggtggtgatcaacccagatgaagatgatgatgagcctgaggaggatgaccaggagatcaaggacaagaccctgccccgctggcagatctggctggccgctgagaggagccgggaccagaggcactggaggccctggaggccagacaagaccaagaagcagacagaggaggactgtgaagatcctgagcggcaggtgctgtttgatgacatcggccagagcctcatccggctgagcagccatgacctgcagttccagctggtggaggccttcctgcagttcctgggcgtgcccagcggcttcaccccaccagccagctgcctgtacctggccatggatgaaaattccatctttgacaatggcctgtatgatgagaagcccctgaccttcttcaaccccctcttcagcggggccagctgtgtgggccgcatggaccggctgggctacccccgctggacccggggccagaaccgggagggggaggagttcatcagaaatgtgttccacctggtgatgcccctcttcagcggcaaggagaagagccagctgtgcttctcctggctgcagtatgaaattgccaaggtgatctggtgcctgcacaccaagaacaagaagaggctgaagagccagggcaagaactgcaagaagctggccaagaacctgctgaaggagcctgagaactgcaacaacttctgcctgtggaagcagtatgcccacctggagtggctgctgggcaacacagaagatgccaggaaggtgtttgacacagccctgggcatggccggcagccgggagctgaaggacagcgacctgtgtgagctgagcctgctgtatgcagagctggaggtggagctgagccctgaggtgagaagagctgccacagcccgggctgtgcacatcctgaccaagctgacagagagcagcccctacggcccctacacaggccaggtgctggccgtgcacatcctgaaggccaggaaggcctatgagcacgccctgcaggactgcctgggggacagctgtgtgagcaacccagcccccacagacagctgcagccgcctcatcagcctggccaagtgcttcatgctgttccagtacctgaccatcggcattgatgctgctgtgcagatctatgagcaggtgtttgccaagctgaacagctctgtgtttcctgagggcagcggggagggggacagcgccagcagccagagctggacctctgtgctggaggccatcaccctgatgcacaccagcctgctgcgcttccacatgaaggtgtctgtgtaccccctggcccccctgcgggaggccctgagccaggccctgaagctgtacccaggcaaccaggtgctgtggaggagctatgtgcagatccagaacaagagccacagcgccagcaagacccggcgcttctttgacaccatcaccaggtctgccaagcccctggagccctggctgtttgccatcgaggccgagaagctgaggaagaggctggtggagaccgtgcagaggctggatggccgggagatccacgccaccatccctgagaccggcctgatgcaccgcatccaggccctgtttgaaaatgccatgagaagtgacagcggcagccagtgccccctgctgtggaggatgtacctgaacttcctggtgtccctgggcaacaaggagaggagcaaaggagtcttctacaaggccctgcagaactgcccctgggccaaggtgctgtacctggatgctgtggagtacttcccagatgagatgcaggagatcctggacctgatgacagagaaggagctgcgggtgcggctgcccctggaggagctggagctgctgctggaggactag

SEQ ID NO: 195956 - DNA, 2802 bp, Artificial Sequence
  derived and/or modified sequence
atgaacattgatggagtggccatcagcagcaagacagagccccccagcagcgagcccatctccttcatccctgtgaaggacctggaggatgctgcccctgtgaccacctggctgaaccccctgggcatctatgaccagagcaccacccactggctgcagggccagggccccccagagcaggagagcaagcagccagatgcccagccagattctgagagcgctgccctgaaggccaaggtggaggagttcaacagaagagtgcgggagaacccccgggacacccagctgtggatggcctttgtggccttccaggatgaggtgatgaagagccctggcctgtatgccatcgaggagggggagcaggagaagaggaagaggagcctgaagctgatcctggagaagaagctggccatcctggagcgggccatcgagagcaaccagagctctgtggacctgaagctggccaagctgaagctgtgcacagagttctgggagcccagcaccctggtgaaggagtggcagaagctgatcttcctgcaccccaacaacacagccctgtggcagaagtacctgctcttctgccagagccagttcagcaccttcagcatcagcaagatccacagcctgtatggcaagtgcctgagcaccctgtctgctgtgaaggatggcagcatcctgagccacccagccctgcccggcacagaggaggccatgtttgccctcttcctgcagcagtgccacttcctgcggcaggccggccacagcgagaaggccatcagcctcttccaggccatggtggacttcaccttcttcaagccagattctgtgaaggacctgcccaccaagggccaggtggagttctttgagcccttctgggacagcggggagcccagggctggggagaagggggcccggggctggaaggcctggatgcaccagcaggagcggggcggctgggtggtgatcaacccagatgaagatgatgatgagccagaagaagatgaccaggagatcaaggacaagaccctgccccgctggcagatctggctggccgctgagaggagccgggaccagaggcactggaggccctggaggccagacaagaccaagaagcagacagaggaggactgtgaggaccctgagcggcaggtgctgtttgatgacatcggccagagcctcatccggctgagcagccatgacctgcagttccagctggtggaggccttcctgcagttcctgggcgtgcccagcggcttcaccccaccagccagctgcctgtacctggccatggatgagaacagcatctttgacaatggcctgtatgatgagaagcccctgaccttcttcaaccccctcttcagcggggccagctgtgtgggccgcatggaccggctgggctacccccgctggacccggggccagaaccgggagggggaggagttcatcagaaatgtgttccacctggtgatgcccctcttcagcggcaaggagaagagccagctgtgcttctcctggctgcagtatgagatcgccaaggtgatctggtgcctgcacaccaagaacaagaagaggctgaagagccagggcaagaactgcaagaagctggccaagaacctgctgaaggagcctgagaactgcaacaacttctgcctgtggaagcagtatgcccacctggagtggctgctgggcaacacagaagatgccaggaaggtgtttgacacagccctgggcatggccggcagccgggagctgaaggacagcgacctgtgtgagctgagcctgctgtatgcagagctggaggtggagctgagccctgaggtgcggcgggccgccacagcccgggctgtgcacatcctgaccaagctgacagagagcagcccctacggcccctacacaggccaggtgctggccgtgcacatcctgaaggccaggaaggcctatgaacatgccctgcaggactgcctgggggacagctgtgtgagcaacccagcccccacagacagctgcagccgcctcatcagcctggccaagtgcttcatgctgttccagtacctgaccatcggcattgatgctgctgtgcagatctatgagcaggtgtttgccaagctgaacagcagcgtcttccctgagggcagcggggagggggacagcgccagcagccagagctggacctctgtgctggaggccatcaccctgatgcacaccagcctgctgcgcttccacatgaaggtgtctgtgtaccccctggcccccctgcgggaggccctgagccaggccctgaagctgtacccaggcaaccaggtgctgtggaggagctatgtgcagatccagaacaagagccacagcgccagcaagacccggcgcttctttgacaccatcaccaggtctgccaagcccctggagccctggctgtttgccattgaagctgagaagctgaggaagaggctggtggagaccgtgcagaggctggatggccgggagatccacgccaccatccctgagaccggcctgatgcaccgcatccaggccctgtttgaaaatgccatgagaagtgacagcggcagccagtgccccctgctgtggaggatgtacctgaacttcctggtgtccctgggcaacaaggagaggagcaagggcgtcttctacaaggccctgcagaactgcccctgggccaaggtgctgtacctggatgctgtggagtacttcccagatgagatgcaggagatcctggacctgatgacagagaaggagctgcgggtgcggctgcccctggaggagctggagctgctgctggaggactag

SEQ ID NO: 195957 - DNA, 3495 bp, Artificial Sequence
  derived and/or modified sequence
atggccctgttccccgccttcgccggcctgagcgaggcccccgacggggggtcgtcgcggaaagaattagactggttgagcaacccttctttctgcgtcggaagcatcacttctctgtctcagcagacggaggcggcgcctgcccacgtctctgagggcctccccctcacacgttcacacctcaaatccgagagttccgatgaaagcgataccaacaagaagctcaaacagacctccaggaaaaagaagaaagagaagaaaaagaagaggaaacatcaacatcacaagaagacaaaaagaaaacatggaccttcatcgtctagccgcagcgaaaccgacacagactcagagaaggacaagccctctaggggtgtggggggatctaagaaggagtcagaggagcctaatcagggaaacaacgcggccgccgacaccgggcatcgcttcgtatggcttgaagatattcaggcagtgaccggcgagaccttcagaaccgataagaaaccagatccggccaattgggagtataagtcactctataggggcgacattgccagatacaaaagaaagggcgacagttgtctgggcattaaccccaaaaagcaatgtatttcttgggagggtaccagtaccgaaaagaagcactccaggaagcaggtagaacgatattttaccaaaaagtccgtgggactaatgaacatcgacggagtggcaatttcttctaaaactgaacctccttcctccgaacccatctctttcatccccgtgaaggatctagaagatgcggctccagttaccacctggttgaaccctctcgggatctacgatcaaagtacaacccattggcttcagggccagggtccacccgaacaagaatcaaagcagccagacgcccaaccggacagtgaaagcgctgctctaaaagccaaggtggaggagttcaaccggcgagtgagagagaacccaagagatacccaactgtggatggcctttgtcgccttccaggatgaagtcatgaagtcaccggggctatatgctatcgaagagggagagcaggaaaaacgaaagaggtccctgaaactgatattggagaaaaagcttgctatcctcgagagggcgatcgagagcaaccagtcttcagttgacttgaagttggcaaagctgaaactgtgtacggagttttgggagccaagtactctggtgaaagaatggcaaaagctgatctttctgcaccctaacaatacagccctctggcaaaagtacttacttttctgtcaatctcagttttcaacattctcgatttccaagattcactcactctacggcaagtgtctgtccaccctgtcagcggtgaaagatgggagtattctatctcatcctgccctcccagggacagaggaagcgatgtttgcgctgtttctccaacagtgccactttctgagacaggcaggccacagcgagaaggctatcagccttttccaagcaatggtggattttacgttttttaaacctgattctgttaaggatctccccacaaagggacaggttgagttctttgaacctttctgggattctggtgaacctagggcaggggagaaaggagctcgtggatggaaagcctggatgcatcagcaagagcggggaggctgggtcgtcatcaatcccgacgaagatgacgacgaacccgaggaggatgaccaagagattaaagataagactctgccacgatggcagatctggctggctgccgaaagatcccgcgatcagcgtcattggcgcccctggaggccggacaagaccaaaaaacaaactgaggaggactgcgaggaccccgagaggcaagtcctgtttgatgacattggccagagtctcattcgactgtctagccacgatctgcagttccagctggtggaggctttcctgcaatttttgggagtgccatcaggattcacacccccagcgagctgtctttacctcgccatggacgaaaactcaattttcgataatggcctttacgatgagaaacctctgaccttcttcaatccactgttctctggcgcctcctgcgtagggcgcatggaccgccttgggtacccccggtggaccaggggccagaatcgtgaaggcgaagagttcatccgtaacgtttttcaccttgttatgccccttttctctggcaaggaaaaatcacagctgtgcttttcatggctccagtatgaaattgccaaggtgatttggtgcctgcacaccaagaataagaagcggctcaaatctcagggcaagaactgcaagaaattggcgaagaacctcttgaaggaaccagaaaactgtaacaatttctgcctttggaagcaatacgcgcatctggagtggctcctgggtaacactgaggatgcccggaaagtatttgacaccgccctcgggatggccggaagtagggaactcaaggacagcgacctttgtgagctgtccctcctttacgctgaactcgaggttgaactgagccccgaggttcggagagccgcaacagccagggctgtgcacatcctcacaaaacttaccgaaagttcaccatatggtccatatacagggcaggtgctcgctgttcatatcctcaaggccaggaaggcatacgaacatgcactgcaggactgcctaggggatagttgcgtgagtaaccccgctcctacagatagctgcagcaggctgatctctctggcaaaatgctttatgttatttcagtacctaacaatcggaatagacgctgcagtacagatctacgagcaggtgttcgcaaagctgaattctagtgtgtttccagagggatcaggcgagggcgacagtgcaagctctcaatcctggacctccgtcttggaggcgataactctgatgcacacgtctcttctgcggttccacatgaaagtttccgtgtatcctttggctcctctgcgagaagcgctctctcaggccctcaaactttaccccgggaaccaggtactctggcggagttacgtacagatccagaataagagtcactctgccagcaagacccgccgctttttcgacaccattactagatcagctaaacctctcgagccgtggctgttcgccatagaggccgaaaagcttaggaaaagattggtggaaacagtccagaggctagatggacgggagatccacgctacaatccccgagactggattaatgcacaggatccaggccctatttgaaaatgcgatgagatcagatagcgggtcgcaatgtccattgttatggaggatgtatctgaatttcctggtgtcactcggcaataaggaaaggagtaaaggtgtgttctacaaagcgctccagaactgtccatgggccaaggtgctctatctggatgctgtggagtacttccctgatgagatgcaggagattttagatctgatgactgaaaaagagctgcgagtgagactgcctcttgaagagctggaactcttactagaggattag

SEQ ID NO: 195958 - DNA, 2802 bp, Artificial Sequence
  derived and/or modified sequence
atgaacatcgacggcgtggccatcagcagcaagaccgagccccccagtagcgagcccatctcatttattccagtgaaggacctggaagatgcagccccagtcacaacctggctaaatcctctgggtatttacgaccagagtactactcactggctccaaggacagggccctcctgagcaggagagtaaacaaccagacgcccagcctgatagcgagtccgccgccttaaaagccaaagtcgaggaattcaacagaagagtgcgagagaatccacgggatacacaactgtggatggcgtttgtggcctttcaggacgaggttatgaagtcgcctggcctgtacgctattgaagagggcgagcaagaaaaaaggaagagatccctcaagttgattctggaaaaaaagttggccatcctggaacgcgccattgagtccaaccagtcaagtgttgatctgaagctggcaaagctcaagctgtgtaccgaattttgggagcccagcaccttggttaaagagtggcagaagctgatctttttgcacccaaataacactgcgctctggcagaaatacctgctgttttgtcaatctcagtttagcactttctccatttctaaaattcactcattatacgggaagtgtctgagcaccttaagtgccgtcaaggacggcagtatcctctcccaccctgctctaccagggaccgaggaggccatgtttgccctctttttgcagcagtgccacttcttacgacaggccggccattctgaaaaggctataagtctattccaggcaatggtggacttcaccttttttaagcctgattccgtgaaggatctgcccacaaaaggtcaggtggagttcttcgaaccattttgggattccggtgagccacgcgcaggcgaaaaaggagcccggggttggaaagcttggatgcaccaacaggaacgagggggatgggtagttatcaatcccgatgaggatgatgatgaacctgaggaggatgaccaggaaatcaaggataaaactctgcctcggtggcagatctggctggccgccgagcgctctcgggaccagagacactggaggccctggcgcccagacaagacgaaaaagcagaccgaagaagattgcgaagaccctgagagacaagtgctgtttgatgacatcggccaatcactgattcggctcagttcacatgacctgcagtttcagctggtggaagcattcctgcagttcttaggcgtgcccagtggcttcacaccccccgctagctgcctgtacttggccatggatgagaattccatatttgataacggactctacgatgagaagcccctgactttctttaacccattgttctccggtgctagttgtgttggccgcatggacaggttgggctacccccggtggaccaggggacagaatcgggaaggagaagagttcattaggaatgtctttcatctggttatgccgctgtttagcggcaaggagaaatcgcaattgtgttttagctggctacaatacgagatcgctaaggtgatctggtgcttgcacaccaaaaataagaagcgactgaagtctcagggcaaaaattgtaagaagctggcgaaaaatctgttgaaagagccggaaaattgcaataacttttgtctgtggaagcaatacgctcatctggaatggttactgggtaatacagaggacgcaagaaaggtctttgacaccgccctaggcatggcaggctcccgcgaattgaaggattcggatctttgcgaactgtctctgttgtacgccgagctggaggtcgagctgtcgccagaggtgcgccgcgcagcaactgccagagccgtgcacatcctaaccaagctaaccgagagctcaccctacggcccgtacacggggcaggtgctggccgttcacattcttaaggcgagaaaggcttatgagcacgctttgcaagactgtctgggagactcatgcgtgtcaaaccccgcaccaactgatagttgttcaagactcatctccctggctaaatgttttatgcttttccaatatctgaccatcggaattgacgctgcagtccagatatacgaacaggtatttgccaaactgaactcctccgttttccccgagggctccggggagggcgactccgcatcatcacagtcttggacgtctgtgctggaagccatcaccttgatgcacacctcactgcttcgcttccacatgaaagtgtccgtgtaccccctggctcctttaagagaagccttaagccaggccctgaaactgtatccaggcaatcaggtcctatggcggtcatacgtacagatccagaacaaatcacattccgccagcaaaactcgcagattctttgacacaatcacccgaagcgcgaagcccttggagccgtggctctttgctattgaggctgagaaattgagaaagaggctggtggagaccgtccaaaggctggacggccgggagatacacgcaaccattcccgagacagggctgatgcaccgcattcaggctttgttcgagaatgctatgaggtctgactcgggctcccagtgtccgcttttgtggcgcatgtacctaaattttttggtgtccctcggaaacaaggaacgcagcaaaggagtcttctataaggcactgcagaactgcccttgggcaaaggtgctatacctggacgccgttgagtacttccccgacgagatgcaagagattttagacctcatgaccgaaaaggagctgagagtgcggctgcctttagaggaacttgagctcctcttagaggattag

SEQ ID NO: 195959 - DNA, 3495 bp, Artificial Sequence
  derived and/or modified sequence
atggcactgtttcccgctttcgctgggctgagcgaagccccagacggcggtagttcccgcaaggaattggactggctttcaaaccctagtttttgcgtgggcagcatcacaagtctgtctcaacagactgaagcagcgcctgcccacgtctccgaaggacttcctttaacaaggtctcatctgaaatccgagtcttccgatgaaagcgacacgaacaaaaaactgaaacagacctccaggaagaaaaagaaggaaaaaaagaaaaaacgcaagcatcagcaccacaaaaagacaaaaaggaaacacggacccagctcatcttcacgatctgagactgatactgactctgaaaaggacaagccctcaaggggggtcgggggttcgaaaaaggaatcagaagagcctaatcagggaaataatgctgccgcagacaccggccaccgatttgtgtggctggaagacattcaggctgtaacaggcgaaaccttccggaccgataagaagccggacccggcaaactgggaatataagagtttgtataggggtgacatcgctcggtataaaagaaaaggggatagctgcttggggattaaccccaagaagcagtgcatatcctgggaagggacatcaacagagaagaagcactcgcggaaacaggtggagaggtactttacaaagaagtcagtcggtctaatgaatatcgacggcgtggccatcagcagcaagaccgagcctccctccagcgagcccatctctttcatcccggtgaaggatctggaggatgcggcacccgttactacctggctcaaccccctgggcatctacgatcagagcactacccattggttgcaaggtcaaggccctcctgaacaggaatcaaagcaacctgacgcacagcccgatagtgagagtgcggcacttaaggcaaaggtcgaagagtttaatagacgggtcagggagaaccccagagatactcagctatggatggcgtttgtcgcatttcaggatgaagtgatgaagtcgccagggctttacgctattgaagagggggaacaggaaaagcgcaaaaggagcctcaagctgatcctggaaaagaaattggctattttggagcgcgcaatagaatctaatcagagcagcgtcgacctgaaattggccaagctgaaactgtgtacagagttctgggaacccagcaccctcgttaaggagtggcagaaactgatctttcttcatcccaacaatactgcgctctggcagaagtatctgcttttttgtcagtcccagttcagcacatttagcattagtaagatccattcactgtatggcaaatgcttgagtacactgtccgccgtgaaggacggctccattctgtcccaccctgctctcccaggtacggaggaagcaatgttcgctctcttcctccaacaatgtcacttcctccgccaggccggacattcagaaaaggccatttcactttttcaggccatggttgatttcacgttctttaagcccgactctgtgaaagatctgcccaccaagggccaggtagaattctttgaaccattctgggactcaggcgaacctcgggcaggtgagaagggggcaaggggatggaaggcttggatgcatcagcaggagcgcggaggttgggtggtgataaatcctgatgaggatgacgatgaacccgaagaggacgaccaggagatcaaggacaaaactctgcctcgttggcagatctggctcgcagccgaacgcagccgcgatcaaagacattggcgaccctggcgacctgataaaacaaaaaagcaaaccgaagaggattgtgaagaccctgaaagacaagtattgtttgacgacattggtcagtcactgattcggctgagcagtcatgacctgcagtttcagctggtggaggcttttttgcagtttctcggggtgcccagcggatttactcctcctgccagttgtctctacctagccatggacgaaaactctatctttgataatggactttatgacgaaaagccgctgaccttcttcaatccactgttcagcggtgcttcttgcgtcggtcgcatggatcgcctaggctacccgaggtggacaagagggcaaaacagggaaggcgaggaatttatacggaacgtgtttcacctggtcatgcctctgtttagcggtaaggagaaaagccagctgtgtttctcatggctccagtatgaaatcgccaaggtcatctggtgtctgcacacaaagaataagaagcgcctcaagagtcaaggaaaaaactgtaagaagttagctaagaacctgctgaaagagccggaaaactgcaacaatttttgtttatggaagcagtacgcccatctggagtggctcttaggcaacaccgaagacgctcgcaaagtgtttgatactgctctcggcatggcaggcagccgtgagttaaaagattccgatctctgtgagctgtcgctcttgtatgccgaactggaggtagaactgtcacctgaagttaggcgggcagccaccgcacgggcagtgcatattttgactaagctcactgagtcaagcccatacggaccttacacagggcaggtgctcgcagtgcatatactgaaggctcggaaagcctatgagcatgcgttgcaggattgcctaggcgattcatgcgtcagtaatcccgctcctacagattcctgctcgaggttgatttccctcgctaagtgttttatgctcttccagtatctgacaatcggtattgacgccgcagtccagatatacgaacaggtgttcgctaagttaaacagttctgtgttcccagaaggctccggtgagggggattccgctagcagccagtcttggacttccgttctggaagcaatcacacttatgcacacatcccttcttagatttcacatgaaggtgtcggtttatcccttggcccctctgagggaagccctgagtcaggcactgaaattgtatccaggcaaccaggtgttgtggaggtcatatgtgcagattcagaacaaatctcattcagcctctaagacgcgtagatttttcgacaccataacacggtccgccaaacccctggagccttggctgttcgccatcgaggctgaaaaactcagaaaaaggctggtagagaccgttcaacgtctggacggaagggaaattcacgctaccattcccgagacagggcttatgcaccgtattcaggccctgttcgagaatgcaatgcgttccgattccgggtcccagtgtcctttgttgtggagaatgtatttgaactttctggtctctctgggaaataaagaacgctccaagggcgtcttttacaaggccctgcaaaattgcccctgggccaaagtgctctacctggacgcggttgaatactttccagatgagatgcaagagatcttggatctcatgactgagaaagagctgcgcgtgcgtctgccactcgaggaattggagttacttctggaggattag

SEQ ID NO: 195960 - DNA, 2802 bp, Artificial Sequence
  derived and/or modified sequence
atgaacatcgatggagtagctatctccagcaaaactgaaccccctagcagcgagcccataagctttatccccgtgaaggacctcgaagatgcagcaccagtgactacctggctcaaccctctgggcatctacgaccagagcaccacccactggctgcagggtcaggggcctcctgagcaggagagtaagcaaccagacgctcagccggacagtgaatccgctgcattaaaagctaaagtggaggaattcaatcgcagggtccgtgaaaaccccagagacacccagctgtggatggcgttcgtggctttccaggatgaagtgatgaaaagcccaggcctgtacgccatagaggaaggtgagcaagaaaagcgaaagaggtccctcaagttgatcctggaaaaaaaactggcaatccttgagcgggctattgagtccaatcagagttctgtcgacctcaagctggccaaactgaaactgtgtacggagttctgggagccctctactctcgttaaagaatggcagaagctcatctttttgcaccctaacaatactgccctttggcagaaataccttctcttctgccagtctcagttcagcactttcagtattagcaagattcacagcctgtacggcaaatgcctgtctaccctctcagccgtgaaggatgggagcatcctatctcatccagctctgcctggtacagaggaggcgatgtttgccctcttcttgcagcagtgccattttctacgccaggcaggacattccgagaaagccattagcctattccaggctatggttgattttacattctttaagcctgattccgtgaaggacctgccaactaaaggccaggtggagttttttgaacccttttgggattcaggagaaccacgggctggtgaaaagggcgcacgaggatggaaggcttggatgcatcagcaagaacgaggagggtgggtcgttatcaatcccgatgaggatgatgatgagccagaggaggatgaccaggagatcaaggataagaccttaccacggtggcagatatggctagcggctgagcgctcaagagaccagcgacactggagaccatggcgcccagacaagaccaagaagcagacagaagaagattgcgaggacccggagcggcaggtgctgttcgatgacatcggtcagtccctgattaggctgtctagtcatgatctccaattccagctggtagaggcgttcctgcagttcttaggggttccatcgggattcaccccgccagcttcctgcctgtacctcgcaatggatgaaaattctatttttgacaacggactttacgacgagaaaccactgactttcttcaatcccctgtttagcggtgcgagctgcgtggggcgaatggaccgcttgggctatcctaggtggacccggggtcagaaccgtgagggtgaggaattcataagaaatgtgttccatctcgtgatgccattattctcaggtaaagagaaatcccagttgtgttttagctggcttcagtacgaaatcgccaaagtcatttggtgtttgcacactaagaacaaaaagaggttaaagagccagggaaaaaattgtaaaaagttagctaaaaacctgctcaaggaaccagaaaactgcaataatttttgcctttggaagcagtatgcccatctggagtggttgttgggtaacaccgaagatgccagaaaagtcttcgacactgcgctgggaatggccggtagccgtgagctgaaggattccgacctgtgcgagttgagcctgctgtacgctgagcttgaggtcgaactgagtcccgaggtgaggcgcgctgctacagccagggcagtgcatatcctcaccaaactgaccgaatcttcgccttatggcccttacacaggccaggtgctagccgttcacatcctgaaggcaaggaaagcatacgaacacgctctacaggactgccttggcgattcctgtgtatccaaccccgcaccaacggattcttgtagcaggctgatctctctcgccaaatgcttcatgctctttcagtatctgacaataggcattgatgccgcagtccagatctacgaacaggtcttcgccaagcttaactcttccgtttttcccgagggtagcggggagggggactccgcttccagtcagagttggacatctgtcttagaggcgattacactcatgcataccagcctgctcaggttccatatgaaagtgagcgtttaccctttggccccactgcgcgaggcgctgtctcaggccctgaaactgtaccctggaaatcaagtcctgtggaggtcctatgtgcagatccagaataaatctcattccgccagcaaaacacgcagattttttgacacaatcacaaggtcagctaagcccctggaaccctggttattcgccatcgaggccgaaaagttgcgaaaacggttggtggagactgttcaacggctggacggcagggagatacacgcaaccatcccagaaaccggcctgatgcaccgtatccaggcactatttgagaatgccatgcggagtgatagcggtagtcagtgccccctcctgtggcgcatgtaccttaactttctagtctcgctcggaaacaaggagagaagcaagggggtcttctataaagcactccagaattgtccatgggccaaggtactctacttagatgcagttgagtattttcccgatgaaatgcaggagattctggatctaatgaccgagaaggaactgcgcgttcgactgcctctggaggaactggagctgctgctcgaggattag

SEQ ID NO: 195961 - protein, 477 aa, Artificial Sequence
  derived and/or modified sequence
MDELVHDLASALEQTSEQNKLGELWEEMALSPRQQRRQLRKRRGRKRRSDFTHLAEHTCCYSEASESSLDEATKDCREVAPVTNFSDSDDTMVAKRHPALNAIVKSKQHSWHESDSFTENAPCRPLRRRRKVKRVTSEVAASLQQKLKVSDWSYERGCRFKSAKKQRLSRWKENTPWTSSGHGLCESAENRTFLSKTGRKERMECETDEQKQGSDENMSECETSSVCSSSDTGLFTNDEGRQGDDEQSDWFYEGECVPGFTVPNLLPKWAPDHCSEVERMDSGLDKFSDSTFLLPSRPAQRGYHTRLNRLPGAAARCLRKGRRRLVGKETSINTLGTERISHIISDPRQKDFWLPSAGKRERNQFNPLSPLYSLDVLADASHRRCSPAHCSARQANVHWGPPCSRDIKRKRKPVATASLSSPSAVHMDAVEPTTPASQAPKSPSSEWLVRTSAAEKATDATTATFFKMPQEKSPGYS

SEQ ID NO: 195962 - DNA, 2438 bp, Artificial Sequence
  derived and/or modified sequence
ccggcggtgagagtcggcccaaaaagcggcggccgttggaggtggctgcggcagctgatgtggcctcatggatgagctggtacacgacttagcctcagccttggagcagacatctgagcagaataagcttggtgaactgtgggaggagatggcgctgagcccccgacagcagaggcggcagcttcggaaacgccgaggtcggaagcgtcgttctgacttcactcacctggcagagcatacctgctgctacagcgaggcctctgagtcaagtctggatgaggccactaaggactgtcgagaagtggctccggtgaccaattttagtgactctgatgacacaatggtagccaaacgacacccagctctcaatgccattgtcaagagtaagcaacattcttggcatgaatctgactcctttactgaaaatgcaccttgtcgaccactcaggcgcaggcggaaggtgaagcgagtgacatcagaggtggctgctagccttcagcagaagctgaaggtgtcagattggagctatgagagaggctgcaggttcaagtctgctaagaagcagcgtctgtcccgctggaaggagaatactccctggacctcatcaggccacggattgtgtgaatcagcagaaaataggactttcctaagcaaaacaggaaggaaagaaaggatggagtgtgaaacagatgaacaaaaacagggctctgatgagaacatgtcagaatgtgaaaccagcagtgtgtgtagcagcagtgacactgggctctttaccaatgatgaagggcgacaaggtgatgacgaacagagtgattggttctatgaaggagaatgtgtcccaggattcactgtccctaatcttctgcccaagtgggctcctgatcattgttctgaagtagaaagaatggattctggattggataaattttcagattccacattccttttaccttctcggccagctcaaagagggtaccatactcgcttgaatcgtctacctggagctgcagctcgatgcctcagaaaggggcgaagaaggctggttgggaaggagaccagcataaacactttggggactgagaggataagccatatcattagtgaccctcggcagaaagatttctggttaccatcagctgggaaaagagaacgaaatcagttcaatcccctgtctcccctttactccctggatgttcttgccgatgcttctcaccgaaggtgttcaccagcacactgctctgccagacaggcaaatgtacactggggaccaccatgttcacgtgacatcaagaggaagcggaaaccagtggccacagcatctttgtctagccccagtgcagttcacatggatgcagtggagccaaccacaccagcatcacaagcccccaaatcacccagctctgagtggttggtgaggacctctgcagcagagaaagccacagacgcaactactgctacattttttaaaatgccacaagaaaagagccctggatacagctagagagcaggacttcaccctccaggagctgactgggtgttgctgaagcaaatgttggactttgtgttagatagtcttgcatatcttaatcgacattcccagtcctttcaccaccagaaccaactcctctttcaaacacagcagtggattctttctctcagaagatcatgttgtgggaatcttttttttaaatagtgaaatattgaggcagcaattttttacaaaaaggtcatcctctgctctatttgttaccttgttattgctgtctcaacatttactacagctccatttacagaactgttgcttttttgcagttgtctttgttcttgaaaaaccagtaactgcttctgcataccttttgtgtagagcttttaatatcatttgaggaagttccaaatttgtagccagttccaaacaaatttaaatattgagttgagacctgtatggaattgtgttcgcaggagataaggcttgcctttgagcctactcttgattcatgcagagtgccaataagataaatcaaccaagttttggggcctcaaaagagacaccagcaactgggccttgagaacttccatttttttgcagattgtctgcagaaactcagacagctcatcagcagcagcagctgtattgtattttacctcatcttcagagtttatgttctactgaaagaggacgtgtgtatacacacacacacacacacacacacacagattggtataatggagaagatggtttaggtgtacagcaaatttaaaatagtcagtggattgtgtcttactacttcatgtcccagtgtaagcctttatgtcctaagcaggactttattgttagtattataggctaataacctgcagcagaaattcatactctattataataatggcttcttggggccatgctttggggaagtaaaatgtctttttgacatgccttt

SEQ ID NO: 195963 - DNA, 2456 bp, Artificial Sequence
  derived and/or modified sequence
gaggtcagagagggaagccccggcggtgagagtcggcccaaaaagcggcggccgttggaggtggctgcggcagctgatgtggcctcatggatgagctggtacacgacttagcctcagccttggagcagacatctgagcagaataagcttggtgaactgtgggaggagatggcgctgagcccccgacagcagaggcggcagcttcggaaacgccgaggtcggaagcgtcgttctgacttcactcacctggcagagcatacctgctgctacagcgaggcctctgagtcaagtctggatgaggccactaaggactgtcgagaagtggctccggtgaccaattttagtgactctgatgacacaatggtagccaaacgacacccagctctcaatgccattgtcaagagtaagcaacattcttggcatgaatctgactcctttactgaaaatgcaccttgtcgaccactcaggcgcaggcggaaggtgaagcgagtgacatcagaggtggctgctagccttcagcagaagctgaaggtgtcagattggagctatgagagaggctgcaggttcaagtctgctaagaagcagcgtctgtcccgctggaaggagaatactccctggacctcatcaggccacggattgtgtgaatcagcagaaaataggactttcctaagcaaaacaggaaggaaagaaaggatggagtgtgaaacagatgaacaaaaacagggctctgatgagaacatgtcagaatgtgaaaccagcagtgtgtgtagcagcagtgacactgggctctttaccaatgatgaagggcgacaaggtgatgacgaacagagtgattggttctatgaaggagaatgtgtcccaggattcactgtccctaatcttctgcccaagtgggctcctgatcattgttctgaagtagaaagaatggattctggattggataaattttcagattccacattccttttaccttctcggccagctcaaagagggtaccatactcgcttgaatcgtctacctggagctgcagctcgatgcctcagaaaggggcgaagaaggctggttgggaaggagaccagcataaacactttggggactgagaggataagccatatcattaccctcggcagaaagatttctggttaccatcagctgggaaaagagaacgaaatcagttcaatcccctgtctcccctttactccctggatgttcttgccgatgcttctcaccgaaggtgttcaccagcacactgctctgccagacaggcaaatgtacactggggaccaccatgttcacgtgacatcaagaggaagcggaaaccagtggccacagcatctttgtctagccccagtgcagttcacatggatgcagtggagccaaccacaccagcatcacaagcccccaaatcacccagctctgagtggttggtgaggacctctgcagcagagaaagccacagacgcaactactgctacattttttaaaatgccacaagaaaagagccctggatacagctagagagcaggacttcaccctccaggagctgactgggtgttgctgaagcaaatgttggactttgtgttagatagtcttgcatatcttaatcgacattcccagtcctttcaccaccagaaccaactcctctttcaaacacagcagtggattctttctctcagaagatcatgttgtgggaatcttttttttaaatagtgaaatattgaggcagcaattttttacaaaaaggtcatcctctgctctatttgttaccttgttattgctgtctcaacatttactacagctccatttacagaactgttgcttttttgcagttgtctttgttcttgaaaaaccagtaactgcttctgcataccttttgtgtagagcttttaatatcatttgaggaagttccaaatttgtagccagttccaaacaaatttaaatattgagttgagacctgtatggaattgtgttcgcaggagataaggcttgcctttgagcctactcttgattcatgcagagtgccaataagataaatcaaccaagttttggggcctcaaaagagacaccagcaactgggccttgagaacttccatttttttgcagattgtctgcagaaactcagacagctcatcagcagcagcagctgtattgtattttacctcatcttcagagtttatgttctactgaaagaggacgtgtgtatacacacacacacacacacacacacacagattggtataatggagaagatggtttaggtgtacagcaaatttaaaatagtcagtggattgtgtcttactacttcatgtcccagtgtaagcctttatgtcctaagcaggactttattgttagtattataggctaataacctgcagcagaaattcatactctattataataatggcttcttggggccatgctttggggaagtaaaatgtctttttgacatgcctttata

SEQ ID NO: 195964 - DNA, 1434 bp, Artificial Sequence
  derived and/or modified sequence
atggacgagctggtgcacgacctggccagcgccctggagcagaccagcgagcagaacaagctgggcgagctgtgggaggagatggccctgagccccagacagcagagaagacagctgagaaagagaagaggcagaaagagaagaagcgacttcacccacctggccgagcacacctgctgctacagcgaggccagcgagagcagcctggacgaggccaccaaggactgcagagaggtggcccccgtgaccaacttcagcgacagcgacgacaccatggtggccaagagacaccccgccctgaacgccatcgtgaagagcaagcagcacagctggcacgagagcgacagcttcaccgagaacgccccctgcagacccctgagaagaagaagaaaggtgaagagagtgaccagcgaggtggccgccagcctgcagcagaagctgaaggtgagcgactggagctacgagagaggctgcagattcaagagcgccaagaagcagagactgagcagatggaaggagaacaccccctggaccagcagcggccacggcctgtgcgagagcgccgagaacagaaccttcctgagcaagaccggcagaaaggagagaatggagtgcgagaccgacgagcagaagcagggcagcgacgagaacatgagcgagtgcgagaccagcagcgtgtgcagcagcagcgacaccggcctgttcaccaacgacgagggcagacagggcgacgacgagcagagcgactggttctacgagggcgagtgcgtgcccggcttcaccgtgcccaacctgctgcccaagtgggcccccgaccactgcagcgaggtggagagaatggacagcggcctggacaagttcagcgacagcaccttcctgctgcccagcagacccgcccagagaggctaccacaccagactgaacagactgcccggcgccgccgccagatgcctgagaaagggcagaagaagactggtgggcaaggagaccagcatcaacaccctgggcaccgagagaatcagccacatcatcagcgaccccagacagaaggacttctggctgcccagcgccggcaagagagagagaaaccagttcaaccccctgagccccctgtacagcctggacgtgctggccgacgccagccacagaagatgcagccccgcccactgcagcgccagacaggccaacgtgcactggggccccccctgcagcagagacatcaagagaaagagaaagcccgtggccaccgccagcctgagcagccccagcgccgtgcacatggacgccgtggagcccaccacccccgccagccaggcccccaagagccccagcagcgagtggctggtgagaaccagcgccgccgagaaggccaccgacgccaccaccgccaccttcttcaagatgccccaggagaagagccccggctacagctag

SEQ ID NO: 195965 - DNA, 1434 bp, Artificial Sequence
  derived and/or modified sequence
atggatgagctggtgcacgacctggcctctgcactcgagcagacctcagaacagaataaactcggggaactttgggaagagatggctctatctcctagacaacaaaggcgtcaactgcgaaagcgtagaggaaggaagcggcggtcagacttcacccacctggccgaacatacctgctgttattcagaagccagcgagagttctctagacgaagcgactaaggactgccgagaggttgccccagtgaccaacttcagcgactctgatgacacaatggttgccaagcggcatcccgcattgaatgctatagtgaaatctaagcagcatagttggcatgaaagcgattctttcacagaaaacgcgccctgtagaccgctccgccgaaggaggaaggtcaaacgagttaccagtgaggtggctgcttcgctacagcagaaactgaaggtaagcgactggagctatgagcggggttgccggttcaaatcagctaagaaacaacgcctttcaagatggaaggaaaacacaccctggacctcctccgggcacgggctctgcgagagcgccgagaacagaactttcttgagcaaaaccggtcgcaaggaacggatggaatgtgaaaccgatgaacagaagcagggcagtgatgaaaacatgagcgagtgcgaaacgtcctcagtctgcagctcgtcggacacgggcctgtttacaaatgacgaaggaaggcagggcgatgatgaacagtccgactggttttacgaaggagagtgcgtcccaggattcactgtcccaaaccttctgcccaagtgggcgccagatcactgctcagaggtcgagagaatggactccgggctggataaattctccgatagcaccttcctccttccttcaagacccgcgcagagaggctatcacactaggttaaacaggctccctggcgccgccgcccgctgcctgaggaaaggccgccgcagacttgtggggaaagaaactagcatcaataccctggggactgaacgcatttcgcatatcattagcgacccacggcagaaggatttttggctcccttctgctgggaaacgtgagagaaatcagttcaatccacttagtccactgtactccttagatgtgctggccgatgcctctcaccggaggtgcagccccgcccactgctcggccagacaagccaacgtgcattggggccccccatgcagtcgtgacattaagcggaaaagaaagcccgtggctacggcctcactaagctctccgtccgcagtgcacatggatgccgtcgagcccaccacccccgccagccaagcccccaagtcacccagttccgaatggctggtgagaacctctgcagcggagaaggcgacagacgccacaactgccacattcttcaaaatgccacaggaaaaatctcctggatacagttag

SEQ ID NO: 195966 - DNA, 1434 bp, Artificial Sequence
  derived and/or modified sequence
atggatgagctggtgcatgacctggccagcgccctggagcagaccagcgagcagaacaagctgggggagctgtgggaggagatggccctgagcccccggcagcagaggcggcagctgaggaagaggcggggcaggaagagaagaagtgacttcacccacctggccgagcacacctgctgctacagcgaggccagcgagagcagcctggatgaggccaccaaggactgccgggaggtggcccctgtgaccaacttcagtgacagtgatgacaccatggtggccaagaggcacccagccctgaatgccatcgtgaagagcaagcagcacagctggcatgaaagtgacagcttcacagaaaatgccccctgccggcccctgcggcggcggaggaaggtgaagagggtgaccagcgaggtggccgccagcctgcagcagaagctgaaggtgtctgactggagctatgaaagaggctgccgcttcaagagcgccaagaagcagaggctgagccgctggaaggagaacaccccctggaccagcagcggccacggcctgtgtgagagcgcagaaaatagaaccttcctgagcaagacaggcaggaaggagaggatggagtgtgaaacagatgagcagaagcagggcagtgatgagaacatgtctgaatgtgagaccagctctgtgtgcagcagcagtgacaccggcctcttcaccaatgatgagggccggcagggagatgatgagcagagcgactggttctatgaaggagaatgtgtgcccggcttcaccgtgcccaacctgctgcccaagtgggccccagaccactgcagcgaggtggagaggatggacagcggcctggacaagttcagtgacagcaccttcctgctgcccagcaggcctgcccagaggggctaccacacccggctgaaccggctgcctggagctgctgcccgctgcctgaggaagggcagaagaaggctggtgggcaaggagaccagcatcaacaccctgggcacagagcgcatcagccacatcatcagtgacccccggcagaaggacttctggctgcccagcgctgggaagcgggagaggaaccagttcaaccccctgagccccctgtacagcctggatgtgctggctgatgccagccaccggcgctgcagccctgcccactgcagcgcccggcaggccaacgtgcactggggccccccctgcagccgggacatcaagaggaagaggaagcctgtggccacagccagcctgagcagccccagcgctgtgcacatggatgctgtggagcccaccaccccagccagccaggcccccaagagccccagcagcgagtggctggtgaggaccagcgctgctgagaaggccacagatgccaccacagccaccttcttcaagatgccccaggagaagagccctggctacagctag

SEQ ID NO: 195967 - DNA, 1434 bp, Artificial Sequence
  derived and/or modified sequence
atggacgagctggtgcacgacctggccagcgccctggagcagaccagcgagcagaacaaactcggagagctttgggaagagatggcgttatctcccaggcagcagaggaggcagctccgcaagcgccgcggacggaagaggcggtctgattttacacacctggcagagcatacatgttgttattccgaggcaagcgagagcagcttagatgaagccaccaaggactgccgcgaggtcgcgcctgtgaccaactttagcgattctgatgatacaatggtggcaaagcgccacccggctttaaacgcaatcgtgaagtctaaacaacactcgtggcacgaaagcgattcattcacagagaatgctccttgccggccgctccggaggaggaggaaggtcaagagggtcacctctgaagtggctgcctctctgcagcagaagttgaaagtttctgattggtcctatgagcgaggctgtcgctttaagagtgcaaagaaacagaggctaagtcgctggaaagaaaatacaccctggacatccagcggacacggtttgtgtgagtctgctgagaaccgaacatttctgtcaaagaccgggcgaaaagaaaggatggagtgtgagaccgacgaacaaaaacagggtagcgacgagaacatgtccgaatgtgaaacatcctccgtctgtagctctagcgacaccggcttgtttactaatgacgaggggcgccagggagacgacgagcagagcgactggttctacgagggcgagtgcgtcccagggttcacggtacccaaccttttaccaaaatgggcccctgatcactgttctgaggtcgaacgcatggattctgggctggataagttctcagatagtacattcctcctgccatcgagacctgctcagcgcggctaccatacgcgcttgaataggcttcctggcgctgcggcgcgctgtctccgaaaaggcaggcgccgcctggtcggtaaggaaactagcattaatacactcggaaccgagcggatctcgcacattatctccgaccctcggcagaaggacttttggcttccaagtgccggaaagcgcgaacgcaaccagttcaaccccctttcaccactctatagccttgatgttttggccgatgcaagtcatagacgatgcagtcctgcccactgttctgccagacaggccaacgtgcattggggccccccctgtagcagggacattaagcgcaagcgcaaaccggtagccactgcatcccttagctcccccagcgcggttcatatggacgccgtggaaccaaccacacctgcatcccaagctccaaaaagccccagtagtgagtggttggtgcggacaagtgctgcagaaaaagccactgacgccacaaccgccaccttcttcaagatgcctcaggaaaaatcacctggttattcttag

SEQ ID NO: 195968 - DNA, 1434 bp, Artificial Sequence
  derived and/or modified sequence
atggacgaattggtccatgacttggctagtgccctcgaacagacaagcgaacagaacaagctgggtgaactgtgggaggagatggcactctctccccgtcaacaacgtagacaacttcgcaaacgaagggggagaaagcggaggtcagatttcacccatttggccgaacatacctgctgctatagtgaggccagcgaatctagtctggatgaggctacgaaagactgcagagaagtggcgccagtgaccaactttagtgacagcgacgacacgatggtcgccaaaaggcaccctgcccttaacgccatagtgaagtctaaacagcactcgtggcatgagagtgattccttcactgagaatgctccttgccgtcccttgcggaggagaaggaaggtaaaaagggtgacaagcgaagtggccgctagtcttcagcagaagctcaaagtctcagactggtcctatgaaagagggtgccggttcaaaagcgccaaaaagcagcgcctgagccggtggaaggagaacacaccttggacaagttccgggcacgggctgtgcgagtctgcagagaataggacctttttgagcaagacaggcaggaaggaaaggatggaatgcgagaccgatgagcagaagcagggcagtgatgagaatatgtccgaatgtgagaccagctccgtgtgcagctccagcgacaccggcttatttacgaatgacgagggacgacaaggtgacgacgagcagtcggactggttttatgaaggagagtgcgttcctggcttcacagtgccgaatcttctaccaaagtgggctccagaccactgctccgaagttgagcgcatggacagcggcctggataaattttctgactctacctttctgctgccctcccgacctgcacagcgaggctaccacaccaggttaaatcggctcccaggcgcagcggcacgttgcttaaggaaaggtcggagaagattggtcggcaaggagacctccatcaacacacttggcacggagcgaatatcccatatcattagcgaccctagacaaaaagatttctggctgccctcagcaggaaagcgagagaggaatcagtttaatcctctttctcctctgtatagcctggacgtcctcgccgacgcatcccatcgcaggtgttcacccgctcactgttccgccaggcaggctaatgtccactggggccctccgtgctccagagacataaagagaaaacgaaaaccagttgccacggctagtctctcttctccttccgcggtgcacatggatgccgtggagccaaccactccagccagccaggccccaaagtctccctctagcgaatggctcgtgcggacctctgccgctgaaaaagccactgacgccacaacagcaacattcttcaagatgcctcaggagaagtcacccggttactcatag

SEQ ID NO: 195969 - protein, 588 aa, Artificial Sequence
  derived and/or modified sequence
MSSGLRAADFPRWKRHISEQLRRRDRLQRQAFEEIILQYNKLLEKSDLHSVLAQKLQAEKHDVPNRHEISPGHDGTWNDNQLQEMAQLRIKHQEELTELHKKRGELAQLVIDLNNQMQRKDREMQMNEAKIAECLQTISDLETECLDLRTKLCDLERANQTLKDEYDALQITFTALEGKLRKTTEENQELVTRWMAEKAQEANRLNAENEKDSRRRQARLQKELAEAAKEPLPVEQDDDIEVIVDETSDHTEETSPVRAISRAATRRSVSSFPVPQDNVDTHPGSGKEVRVPATALCVFDAHDGEVNAVQFSPGSRLLATGGMDRRVKLWEVFGEKCEFKGSLSGSNAGITSIEFDSAGSYLLAASNDFASRIWTVDDYRLRHTLTGHSGKVLSAKFLLDNARIVSGSHDRTLKLWDLRSKVCIKTVFAGSSCNDIVCTEQCVMSGHFDKKIRFWDIRSESIVREMELLGKITALDLNPERTELLSCSRDDLLKVIDLRTNAIKQTFSAPGFKCGSDWTRVVFSPDGSYVAAGSAEGSLYIWSVLTGKVEKVLSKQHSSSINAVAWSPSGSHVVSVDKGCKAVLWAQY

SEQ ID NO: 195970 - DNA, 1767 bp, Artificial Sequence
  derived and/or modified sequence
atgagttccggactaagggcggcagacttcccgagatggaagcgccacatctctgaacaattacgtcgccgggataggcttcagcgccaggccttcgaagagatcatcttacaatacaacaaattacttgaaaagtctgatctacatagcgtgcttgcacagaaacttcaggccgagaaacacgacgtccctaacagacatgaaataagcccagggcacgacggaacatggaatgataatcagctgcaggaaatggctcagcttcggatcaaacaccaggaagaattgactgagctacataaaaagcgaggggaactcgcacagctggtgattgatttaaacaaccagatgcagcgcaaagaccgagagatgcagatgaatgaagcgaagattgcggagtgtttacagactatatccgatcttgaaactgaatgcctggatttgaggacgaagttgtgtgatctggaacgcgcgaaccagacgctgaaggatgagtatgacgccctccagatcacttttacagcactggagggcaaactcaggaaaaccaccgaggagaaccaggaactggtaacgcgttggatggcagagaaggcacaggaagcaaataggttgaacgccgagaatgaaaaggacagtcgcagacgacaggcacggctgcagaaagagctggctgaagctgctaaagagcctctccccgtggagcaggatgacgacatagaagtgatcgttgatgagacatccgatcacacagaggaaacgagtcctgttcgagccatctcccgggcagcaaccaggcgctccgtttcctccttccctgtgccgcaggacaatgtggatacccaccctggatccggtaaagaggtgcgggtgcctgccactgctctctgcgtcttcgatgctcatgacggcgaggtgaatgcggtgcaatttagccctggtagtaggcttcttgctacgggcgggatggatcgtagagtaaagctttgggaggtgttcggagagaagtgtgagtttaaaggctccctgtcgggatcaaatgccgggatcactagtatcgagtttgattctgccggcagctacttactcgctgcatccaatgacttcgcttctagaatctggactgtagacgactatagattgagacacacacttactgggcacagtgggaaggttctgtccgctaagttcctcctggacaacgctagaatagttagcggttctcacgaccgcacactgaaactttgggatctccgatctaaagtctgtatcaagaccgtgttcgccggctcatcttgcaacgacattgtgtgcactgaacagtgtgtcatgagcgggcacttcgacaaaaagatcaggttctgggacatcaggagcgagagtattgttcgcgagatggagttacttgggaaaataaccgcactggacctgaacccggagcgcaccgaacttttatcgtgctcacgtgatgatctcctgaaagtgattgacctccggactaatgccatcaagcagacgttcagcgcccccggtttcaagtgcggctcggactggactcgtgtcgttttcagtcctgatggaagctacgttgcagccggatctgctgagggctctctgtatatttggtctgttttaacgggcaaggttgaaaaggttctctccaaacagcactcctctagcataaatgcggtcgcctggagtccatcggggagccacgtggttagcgtggacaaggggtgtaaagctgtgctgtgggcccagtactag

SEQ ID NO: 195971 - DNA, 1767 bp, Artificial Sequence
  derived and/or modified sequence
atgagcagcggcctgcgggctgctgacttcccccgctggaagaggcacatcagcgagcagctgcggcggcgggaccggctgcagaggcaggcctttgaggagatcatcctgcagtacaacaagctgctggagaagagtgacctgcacagcgtgctggcccagaagctgcaggccgagaagcatgatgtgcccaacagacatgagatcagccctggccatgatggcacctggaatgacaaccagctgcaggagatggcccagctgcgcatcaagcaccaggaggagctgacagagctgcacaagaagagaggagagctggcccagctggtgattgacctgaacaaccagatgcagaggaaggaccgggagatgcagatgaatgaggccaagattgctgaatgtctgcagaccatcagtgacctggagacagagtgcctggacctgcggaccaagctgtgtgacctggagcgggccaaccagaccctgaaggatgaatatgatgccctgcagatcaccttcaccgccctggagggcaagctgaggaagaccacagaggagaaccaggagctggtgacccgctggatggccgagaaggcccaggaggccaaccggctgaatgcagaaaatgagaaggacagcagaagacggcaggcccggctgcagaaggagctggccgaggccgccaaggagcccctgcctgtggagcaggatgatgacatcgaggtgattgtggatgagaccagtgaccacacagaggagaccagccctgtgcgggccatcagcagagctgccacccggcgctctgtgtcctccttccctgtgccccaggacaacgtggacacccaccctggcagcggcaaggaggtgcgggtgcctgccacagccctgtgtgtgtttgatgcccatgatggagaggtgaatgctgtgcagttcagccctggcagccggctgctggccaccggcggcatggacagaagagtgaagctgtgggaggtgtttggagagaagtgtgagttcaagggcagcctgagcggcagcaatgccggcatcaccagcattgaatttgattctgctggcagctacctgctggccgccagcaatgactttgccagccgcatctggacagtggatgactaccgcctgcggcacaccctgaccggccacagcggcaaggtgctgagcgccaagttcctgctggacaatgcccgcatcgtgtctggcagccatgacaggaccctgaagctgtgggacctgcggagcaaggtgtgcatcaagacagtgtttgctggcagcagctgcaatgacatcgtgtgcacagagcagtgtgtgatgagcggccactttgacaagaagatccgcttctgggacatccgctctgagagcatcgtgcgggagatggagctgctgggcaagatcacagccctggacctgaaccctgagaggacagagctgctgagctgcagcagagatgacctgctgaaggtgattgacctgcggaccaatgccatcaagcagaccttcagcgcccctggcttcaagtgtggcagtgactggaccagggtggtgttctccccagatggcagctatgtggccgccggcagcgctgagggcagcctgtacatctggagcgtgctgaccgggaaggtggagaaggtgctgagcaagcagcacagcagcagcatcaatgctgtggcctggagccccagcggcagccacgtggtgtctgtggacaagggctgcaaggctgtgctgtgggcccagtactag

SEQ ID NO: 195972 - DNA, 1767 bp, Artificial Sequence
  derived and/or modified sequence
atgagcagcggcctgcgggccgccgacttcccccggtggaagcggcatatctccgagcagctacgcaggagggatcgcctccaacggcaggcctttgaagagattattctgcagtataataagctcctggagaagagcgatctccacagcgtgttggcgcagaagctgcaggcagaaaagcatgacgtccccaatagacacgagatctcacccggccatgatgggacgtggaatgacaatcaacttcaagagatggctcaattgagaattaagcaccaggaggaacttactgaactacacaaaaaaaggggagaacttgcgcagctggtaattgatctcaataaccaaatgcagcgcaaggacagagagatgcagatgaatgaagccaaaatcgccgaatgtttgcagactatctctgatctagagacagaatgtctggacctcaggacaaaactgtgcgacctagaaagagctaaccagacccttaaagatgaatatgatgcgctgcaaataacatttactgcgctggagggtaagctgaggaagacgaccgaggagaatcaagagctggttaccagatggatggcagagaaggctcaggaggcgaatcggctgaatgcggagaacgagaaagacagtcgccgcagacaggctagactgcaaaaggagttagccgaggcagctaaagaaccccttccggtggaacaggacgatgacattgaggttatcgtggacgagacaagtgatcacaccgaagaaactagcccagtcagagctatttcaagggctgcaactcgcagatccgtgtcttcatttccagtacctcaggataatgtagatacccatccaggctccgggaaggaggtgagggtgcctgctaccgcactctgcgtgtttgatgcacacgatggcgaggttaacgccgtgcagttctcaccaggctctcgactcctcgcgaccgggggcatggatcgccgagtgaagctttgggaggtgttcggggagaagtgcgaattcaaaggcagcctctccggctctaatgctggtatcacatcaattgagttcgactctgcaggctcttatctgctcgccgcttcaaatgatttcgcctcaagaatatggacagttgacgattatcgactccgccacacgcttactggacatagcggtaaggttctcagcgcaaagttcctgttagacaacgcaaggattgtaagtgggtcacatgacagaacattaaagttgtgggatttgaggagcaaggtgtgcatcaagacggtcttcgcaggctccagctgcaatgatattgtttgtaccgagcagtgtgtgatgtccggccactttgacaaaaagatccggttctgggatatccggtctgagagtatagtgagggagatggagctgctcggcaaaattaccgctctcgatctgaaccccgagagaaccgagctcctcagttgtagcagggacgatctgcttaaagtgatagaccttagaaccaacgccatcaagcagaccttttctgcgcccggatttaagtgcgggagcgactggactcgtgtggtcttcagccctgatggctcctacgtggccgctggatccgccgaaggctccctgtacatctggagcgtattgactggtaaagtagagaaggtgctgagtaagcagcactcttcaagtatcaacgccgtggcttggagcccgagtggttctcatgtggtgagcgtcgataagggctgtaaggccgtgctttgggcacaatattag

SEQ ID NO: 195973 - DNA, 1767 bp, Artificial Sequence
  derived and/or modified sequence
atgtcctctggcctgagagcagcagactttcccaggtggaagaggcacattagcgaacaattgcgccgacgcgacagactgcagcgccaggccttcgaggagatcatcttgcagtataataagctgctagagaaatctgacctccattcggttttggcgcagaaactgcaagcggagaagcacgatgtgccaaatcggcacgagatcagtcctgggcacgatggcacctggaacgacaatcagctacaggaaatggcacagctgaggataaaacaccaggaggaactcactgaactgcacaaaaaacggggtgaactggcccaactcgtcattgatctgaacaaccagatgcaacgcaaggaccgagaaatgcagatgaatgaggccaagatcgcagagtgcctgcagaccatctctgacctggagacagagtgtcttgacctgagaacgaagctttgtgaccttgagcgcgctaatcaaaccctcaaggatgaatacgacgctctgcagatcacattcactgccctggaaggcaaattacggaaaaccaccgaggagaaccaggaactggtcacacgctggatggcagaaaaagcccaagaagccaatcgcctgaacgccgagaacgaaaaagattcccgtcgacggcaagcaaggctccagaaggaactggcagaagccgcaaaggagccgctccccgtggaacaggacgacgacattgaagttatcgtcgacgagactagtgatcataccgaggagactagtcccgttagggctatcagtcgcgcagcaacccggaggtctgtgtcttcctttccagtcccacaagacaacgtagacactcaccccggatctggcaaagaggtacgcgtaccagcgactgcactttgcgtttttgatgcccatgacggtgaagtgaacgcagtgcaattcagcccaggttcacgactgctggccaccggcggaatggaccgacgggtgaagctttgggaggttttcggtgagaagtgtgagtttaaaggaagcctgtccggttctaacgccggtatcacctccattgaattcgactcagccggaagttacctgttggccgcatctaacgacttcgcttccagaatttggaccgtggatgattataggttgcgccacacactcacaggtcactccggcaaggtgctttctgccaagtttcttctagacaacgctcgcatcgttagtgggtcccacgaccgcacgttaaagctctgggaccttagatctaaagtatgcatcaaaacagtgttcgctggcagctcttgcaatgacatcgtatgtaccgaacagtgtgtgatgagcggccactttgataagaagatcaggttttgggacatccgttcagagagcatagtccgagagatggagctactggggaaaataactgcactggatctcaaccccgagagaactgagctgctgagctgttctcgcgatgacttgctgaaagtcatcgacctgaggactaacgcaatcaagcagaccttcagtgcgcctgggtttaaatgcgggagcgattggacccgggtggtgtttagccctgatggatcctatgtggctgccggaagcgctgagggttccctctacatatggtccgtgttaacagggaaagtcgaaaaagtactttcaaagcagcactcttcctctattaacgctgtggcctggtccccttctggtagtcatgttgtgagtgtagataaagggtgtaaggccgtgctctgggcccagtactag

SEQ ID NO: 195974 - DNA, 3213 bp, Artificial Sequence
  derived and/or modified sequence
gtgtggaggtgagctccgggattgccggcattcccgcttctgctggttgcttcatgctgcaggctgcggccgtcagccctcgctcgcattggtggcgctgaggtgccggggcagcaagtgacatgtcgtcgggcctccgcgccgctgacttcccccgctggaagcgccacatctcggagcaactgaggcgccgggaccggctgcagagacaggcgttcgaggagatcatcctgcagtataacaaattgctggaaaagtcagatcttcattcagtgttggcccagaaactacaggctgaaaagcatgacgtaccaaacaggcacgagataagtcccggacatgatggcacatggaatgacaatcagctacaagaaatggcccaactgaggattaagcaccaagaggaactgactgaattacacaagaaacgtggggagttagctcaactggtgattgacctgaataaccaaatgcagcggaaggacagggagatgcagatgaatgaagcaaaaattgcagaatgtttgcagactatctctgacctggagacggagtgcctagacctgcgcactaagctttgtgaccttgaaagagccaaccagaccctgaaggatgaatatgatgccctgcagatcacttttactgccttggagggaaaactgaggaaaactacggaagagaaccaggagctggtcaccagatggatggctgagaaagcccaggaagccaatcggcttaatgcagagaatgaaaaagactccaggaggcggcaagcccggctgcagaaagagcttgcagaagcagcaaaggaacctctaccagtcgaacaggatgatgacattgaggtcattgtggatgaaacttctgatcacacagaagagacctctcctgtgcgagccatcagcagagcagccacgagacgctctgtctcttccttcccagtcccccaggacaatgtggatactcatcctggttctggtaaagaagtgagggtaccagctactgccttgtgtgtcttcgatgcacatgatggggaagtcaacgctgtgcagttcagtccaggttcccggttactggccactggaggcatggaccgcagggttaagctttgggaagtatttggagaaaaatgtgagttcaagggttccctatctggcagtaatgcaggaattacaagcattgaatttgatagtgctggatcttacctcttagcagcttcaaatgattttgcaagccgaatctggactgtggatgattatcgattacggcacacactcacgggacacagtgggaaagtgctgtctgctaagttcctgctggacaatgcgcggattgtctcaggaagtcacgaccggactctcaaactctgggatctacgcagcaaagtctgcataaagacagtgtttgcaggatccagttgcaatgatattgtctgcacagagcaatgtgtaatgagtggacattttgacaagaaaattcgtttctgggacattcgatcagagagcatagttcgagagatggagctgttgggaaagattactgccctggacttaaacccagaaaggactgagctcctgagctgctcccgtgatgacttgctaaaagttattgatctccgaacaaatgctatcaagcagacattcagtgcacctgggttcaagtgcggctctgactggaccagagttgtcttcagccctgatggcagttacgtggcggcaggctctgctgagggctctctgtatatctggagtgtgctcacagggaaagtggaaaaggttctttcaaagcagcacagctcatccatcaatgcggtggcgtggtcgccctctggctcgcacgttgtcagtgtggacaaaggatgcaaagctgtgctgtgggcacagtactgacggggctctcagggctgggaggaccccagtgccctcctcagaagaagcacatgggctcctgcagccctgtcctggcaggtgatgtgctgggtatagcatggacctcccagagaagctcaagctatgtggcactgtagctttgccgtgaatgggatttctgaagatttgactgaggtctctcttggcctggaagaataacactgaaaaaacctgacgctgcggtcacttagcagaggctcaggttcttgccttgggaaacactactagctctgaccttccatacctcacttgggggagcacagggccccgctgggcctcctcaccaacggcagtgccaaaatcagcccccacatcaaggtggtgttctctgtgctttctctcgtccttccaaagtcggttctggcctaacgcatgtcccaacaccttgggttcatttgcccggtgaactcactttaagcattggattaacggaaactcccgaactacagacccctccctggtgggttgcatgaatgtgtctcattactgctgaaatgtcctcacatctctttcactgttcttcagagctttctggctctctttcccccacaaaattcgacatatttaaaaatctccgtgtggctttaaaaaatggttttttgtttttttgtttttttgaggtgggagaggatgtgtgaaaatcttttccagggaaatgggttcgctgcagaggtaaggatgtgttcctgtatcgatctgcagacacccagaaggtgggtgcacactgcatgcttgggggtgccaagggattcgagacctccaacatacttgtctgaaggtggtgattctggccatggcccctctgccaagcctgtgtgcgatgcccttggtgctttagtgcaagaagcctaggctcagaagcacagcagcgccatctttccgtttcaggggttgtgatgaaggccaaggaaaaacatttatctttactattttacctacgtataaagttttagttcattgggtgtgcgaaacaccctttttatcacttttaaatttgcactttattttttttcttccatgcttgttctctggacatttggggatgtgagtgttagagctggtgagagaggagtcaggtggccttcccaccgatggtcctggcctccacctgccctctcttccctgcctgatcaccgctttccaatttgcccttcagagaacttaagtcaaggagagttgaaattcacaggccagggcacatcttttatttatttcattatgttggccaacagaacttgattgtaaataataataaagaaatctgttatatacttttcaaactcca

SEQ ID NO: 195975 - DNA, 1767 bp, Artificial Sequence
  derived and/or modified sequence
atgagcagcggcctgagagccgccgacttccccagatggaagagacacatcagcgagcagctgagaagaagagacagactgcagagacaggccttcgaggagatcatcctgcagtacaacaagctgctggagaagagcgacctgcacagcgtgctggcccagaagctgcaggccgagaagcacgacgtgcccaacagacacgagatcagccccggccacgacggcacctggaacgacaaccagctgcaggagatggcccagctgagaatcaagcaccaggaggagctgaccgagctgcacaagaagagaggcgagctggcccagctggtgatcgacctgaacaaccagatgcagagaaaggacagagagatgcagatgaacgaggccaagatcgccgagtgcctgcagaccatcagcgacctggagaccgagtgcctggacctgagaaccaagctgtgcgacctggagagagccaaccagaccctgaaggacgagtacgacgccctgcagatcaccttcaccgccctggagggcaagctgagaaagaccaccgaggagaaccaggagctggtgaccagatggatggccgagaaggcccaggaggccaacagactgaacgccgagaacgagaaggacagcagaagaagacaggccagactgcagaaggagctggccgaggccgccaaggagcccctgcccgtggagcaggacgacgacatcgaggtgatcgtggacgagaccagcgaccacaccgaggagaccagccccgtgagagccatcagcagagccgccaccagaagaagcgtgagcagcttccccgtgccccaggacaacgtggacacccaccccggcagcggcaaggaggtgagagtgcccgccaccgccctgtgcgtgttcgacgcccacgacggcgaggtgaacgccgtgcagttcagccccggcagcagactgctggccaccggcggcatggacagaagagtgaagctgtgggaggtgttcggcgagaagtgcgagttcaagggcagcctgagcggcagcaacgccggcatcaccagcatcgagttcgacagcgccggcagctacctgctggccgccagcaacgacttcgccagcagaatctggaccgtggacgactacagactgagacacaccctgaccggccacagcggcaaggtgctgagcgccaagttcctgctggacaacgccagaatcgtgagcggcagccacgacagaaccctgaagctgtgggacctgagaagcaaggtgtgcatcaagaccgtgttcgccggcagcagctgcaacgacatcgtgtgcaccgagcagtgcgtgatgagcggccacttcgacaagaagatcagattctgggacatcagaagcgagagcatcgtgagagagatggagctgctgggcaagatcaccgccctggacctgaaccccgagagaaccgagctgctgagctgcagcagagacgacctgctgaaggtgatcgacctgagaaccaacgccatcaagcagaccttcagcgcccccggcttcaagtgcggcagcgactggaccagagtggtgttcagccccgacggcagctacgtggccgccggcagcgccgagggcagcctgtacatctggagcgtgctgaccggcaaggtggagaaggtgctgagcaagcagcacagcagcagcatcaacgccgtggcctggagccccagcggcagccacgtggtgagcgtggacaagggctgcaaggccgtgctgtgggcccagtactag

SEQ ID NO: 195976 - protein, 591 aa, Artificial Sequence
  derived and/or modified sequence
MWERLNCAAEDFYSRLLQKFNEEKKGIRKDPFLYEADVQVQLISKGQPNPLKNILNENDIVFIVEKVPLEKEETSHIEELQSEETAISDFSTGENVGPLALPVGKARQLIGLYTMAHNPNMTHLKINLPVTALPPLWVRCDSSDPEGTCWLGAELITTNNSITGIVLYVVSCKADKNYSVNLENLKNLHKKRHHLSTVTSKGFAQYELFKSSALDDTITASQTAIALDISWSPVDEILQIPPLSSTATLNIKVESGEPRGPLNHLYRELKFLLVLADGLRTGVTEWLEPLEAKSAVELVQEFLNDLNKLDGFGDSTKKDTEVETLKHDTAAVDRSVKRLFKVRSDLDFAEQLWCKMSSSVISYQDLVKCFTLIIQSLQRGDIQPWLHSGSNSLLSKLIHQSYHGTMDTVSLSGTIPVQMLLEIGLDKLKKDYISFFIGQELASLNHLEYFIAPSVDIQEQVYRVQKLHHILEILVSCMPFIKSQHELLFSLTQICIKYYKQNPLDEQHIFQLPVRPTAVKNLYQSEKPQKWRVEIYSGQKKIKTVWQLSDSSPIDHLNFHKPDFSELTLNGSLEERIFFTNMVTCSQVHFK

SEQ ID NO: 195977 - protein, 477 aa, Artificial Sequence
  derived and/or modified sequence
MAHNPNMTHLKINLPVTALPPLWVRCDSSDPEGTCWLGAELITTNNSITGIVLYVVSCKADKNYSVNLENLKNLHKKRHHLSTVTSKGFAQYELFKSSALDDTITASQTAIALDISWSPVDEILQIPPLSSTATLNIKVESGEPRGPLNHLYRELKFLLVLADGLRTGVTEWLEPLEAKSAVELVQEFLNDLNKLDGFGDSTKKDTEVETLKHDTAAVDRSVKRLFKVRSDLDFAEQLWCKMSSSVISYQDLVKCFTLIIQSLQRGDIQPWLHSGSNSLLSKLIHQSYHGTMDTVSLSGTIPVQMLLEIGLDKLKKDYISFFIGQELASLNHLEYFIAPSVDIQEQVYRVQKLHHILEILVSCMPFIKSQHELLFSLTQICIKYYKQNPLDEQHIFQLPVRPTAVKNLYQSEKPQKWRVEIYSGQKKIKTVWQLSDSSPIDHLNFHKPDFSELTLNGSLEERIFFTNMVTCSQVHFK

SEQ ID NO: 195978 - DNA, 1776 bp, Artificial Sequence
  derived and/or modified sequence
atgtgggagagactgaactgcgccgccgaggacttctacagcagactgctgcagaagttcaacgaggagaagaagggcatcagaaaggaccccttcctgtacgaggccgacgtgcaggtgcagctgatcagcaagggccagcccaaccccctgaagaacatcctgaacgagaacgacatcgtgttcatcgtggagaaggtgcccctggagaaggaggagaccagccacatcgaggagctgcagagcgaggagaccgccatcagcgacttcagcaccggcgagaacgtgggccccctggccctgcccgtgggcaaggccagacagctgatcggcctgtacaccatggcccacaaccccaacatgacccacctgaagatcaacctgcccgtgaccgccctgccccccctgtgggtgagatgcgacagcagcgaccccgagggcacctgctggctgggcgccgagctgatcaccaccaacaacagcatcaccggcatcgtgctgtacgtggtgagctgcaaggccgacaagaactacagcgtgaacctggagaacctgaagaacctgcacaagaagagacaccacctgagcaccgtgaccagcaagggcttcgcccagtacgagctgttcaagagcagcgccctggacgacaccatcaccgccagccagaccgccatcgccctggacatcagctggagccccgtggacgagatcctgcagatcccccccctgagcagcaccgccaccctgaacatcaaggtggagagcggcgagcccagaggccccctgaaccacctgtacagagagctgaagttcctgctggtgctggccgacggcctgagaaccggcgtgaccgagtggctggagcccctggaggccaagagcgccgtggagctggtgcaggagttcctgaacgacctgaacaagctggacggcttcggcgacagcaccaagaaggacaccgaggtggagaccctgaagcacgacaccgccgccgtggacagaagcgtgaagagactgttcaaggtgagaagcgacctggacttcgccgagcagctgtggtgcaagatgagcagcagcgtgatcagctaccaggacctggtgaagtgcttcaccctgatcatccagagcctgcagagaggcgacatccagccctggctgcacagcggcagcaacagcctgctgagcaagctgatccaccagagctaccacggcaccatggacaccgtgagcctgagcggcaccatccccgtgcagatgctgctggagatcggcctggacaagctgaagaaggactacatcagcttcttcatcggccaggagctggccagcctgaaccacctggagtacttcatcgcccccagcgtggacatccaggagcaggtgtacagagtgcagaagctgcaccacatcctggagatcctggtgagctgcatgcccttcatcaagagccagcacgagctgctgttcagcctgacccagatctgcatcaagtactacaagcagaaccccctggacgagcagcacatcttccagctgcccgtgagacccaccgccgtgaagaacctgtaccagagcgagaagccccagaagtggagagtggagatctacagcggccagaagaagatcaagaccgtgtggcagctgagcgacagcagccccatcgaccacctgaacttccacaagcccgacttcagcgagctgaccctgaacggcagcctggaggagagaatcttcttcaccaacatggtgacctgcagccaggtgcacttcaagtag

SEQ ID NO: 195979 - DNA, 1776 bp, Artificial Sequence
  derived and/or modified sequence
atgtgggaaaggctgaactgcgcagctgaggacttttacagtagacttctgcagaaattcaacgaggagaagaaggggattagaaaagatccattcctgtacgaagctgacgtacaagtccagttgatctctaaaggccagcccaacccccttaagaacattctcaatgagaacgatattgtttttattgtagaaaaagttcctcttgaaaaagaagaaacaagtcatatagaggagctccagtctgaagagactgcaatatccgatttctctactggtgagaatgtcggacccctcgctctgccggttggcaaggctcgacaattaatcggcttgtacacaatggcccacaatcccaacatgactcacctgaagattaatctgccagttacagccctgccccctctctgggtacggtgcgattcgagcgatcccgaggggacatgctggctgggcgccgagttgataacaaccaacaatagcattactggaatagtgttgtatgtggtgtcctgcaaggctgacaagaactactcagtgaacctagaaaatctgaaaaacttgcataagaagcgccatcatctgagtactgtgacaagcaaagggtttgcccagtatgagctatttaagagtagcgccttagatgataccattaccgctagccagacagcaatagccctagatatctcttggagccctgtggatgaaatcctccagattcctcctcttagtagcaccgctacactgaacattaaggtggagagtggcgagccaagaggtcccctgaatcacctatacagagaactaaagtttctgctggttcttgctgatggtctgcggactggggttacagaatggctggagccgctggaagcaaaatcggccgtcgagcttgtgcaggaatttctgaatgatctaaataagctggacgggttcggagactcgacgaaaaaggacaccgaggtggaaaccctgaaacacgacacagccgcagttgaccgctccgtgaaacgtttgttcaaggttcgcagcgacttagacttcgctgaacagctgtggtgcaaaatgtcgagtagcgtgatttcctatcaagacttagttaaatgcttcaccttgatcatccagagtctgcagcggggcgatatccagccatggctccacagtggctccaatagtctcctttctaagcttatacatcaatcataccacggcaccatggatacggttagcctctccggaaccataccagtgcagatgttgctagagatcggtttggacaagttgaagaaagactacatctcattcttcatcggccaagaactggcttccctcaatcacctcgagtacttcattgcacctagcgtggacattcaggaacaagtgtacagagtgcagaagctgcatcacatcctggagattctggtttcctgtatgcctttcattaaatcccaacacgaactgttgttcagcttgacacagatctgtattaagtattataagcagaaccccctggacgaacagcacatcttccagctgcccgtcaggcctacagcggttaaaaacctctatcaatccgagaagccacagaaatggcgcgttgagatctactctggtcaaaaaaagattaagaccgtttggcagttatccgattctagcccgatcgatcatttgaactttcacaagccagatttctccgaactcacgcttaacggaagcttggaagaacgcatttttttcacgaacatggtaacttgctcgcaagttcattttaaatag

SEQ ID NO: 195980 - DNA, 1776 bp, Artificial Sequence
  derived and/or modified sequence
atgtgggagcggctgaactgtgccgctgaggacttctacagccggctgctgcagaagttcaatgaggagaagaagggcatcaggaaggaccccttcctgtatgaagcagatgtgcaggtgcagctgatcagcaagggccagcccaaccccctgaagaacatcctgaatgaaaatgacatcgtgttcatcgtggagaaggtgcccctggagaaggaggagaccagccacatcgaggagctgcagagcgaggagacagccatcagtgacttcagcactggagaaaatgtgggccccctggccctgcctgtgggcaaggcccggcagctgattggcctgtacaccatggcccacaaccccaacatgacccacctgaagatcaacctgcctgtgacagccctgccccccctgtgggtgcgctgtgacagcagtgaccctgagggcacctgctggctgggcgctgagctgatcaccaccaacaacagcatcactggaattgtgctgtatgtggtgtcctgcaaggctgacaagaactacagcgtgaacctggagaacctgaagaacctgcacaagaagaggcaccacctgagcacagtgaccagcaaaggatttgcccagtatgagctgttcaagagcagcgccctggatgacaccatcacagccagccagacagccatcgccctggacatctcctggagccctgtggatgagatcctgcagatcccccccctgagcagcacagccaccctgaacatcaaggtggagagcggggagccccggggccccctgaaccacctgtaccgggagctgaagttcctgctggtgctggctgatggcctgaggactggagtgacagagtggctggagcccctggaggccaagtctgctgtggagctggtgcaggagttcctgaatgacctgaacaagctggatggctttggagacagcaccaagaaggacacagaggtggagaccctgaagcatgacacagctgctgtggacagatctgtgaagaggctcttcaaggtgcggagtgacctggactttgctgagcagctgtggtgcaagatgagcagcagcgtcatctcctaccaggacctggtgaagtgcttcaccctcatcatccagagcctgcagagaggagacatccagccctggctgcacagcggcagcaacagcctgctgagcaagctgatccaccagagctaccacggcaccatggacacagtgtccctgagcggcaccatccctgtgcagatgctgctggagatcggcctggacaagctgaagaaggactacatctccttcttcatcggccaggagctggccagcctgaaccacctggagtacttcatcgcccccagcgtggacatccaggagcaggtgtacagagtgcagaagctgcaccacatcctggagatcctggtgtcctgcatgcccttcatcaagagccagcacgagctgctcttcagcctgacccagatctgcatcaagtactacaagcagaaccccctggatgagcagcacatcttccagctgcctgtgcggcccacagctgtgaagaacctgtaccagagcgagaagccccagaagtggagggtggagatctacagcggccagaagaagatcaagacagtgtggcagctgagtgacagcagccccatcgaccacctgaacttccacaagccagacttcagcgagctgaccctgaatggcagcctggaggagcgcatcttcttcaccaacatggtgacctgcagccaggtgcacttcaagtag

SEQ ID NO: 195981 - DNA, 1776 bp, Artificial Sequence
  derived and/or modified sequence
atgtgggagcggctgaactgcgccgccgaggacttctacagccggcttttgcagaagtttaatgaagagaaaaagggcattcgtaaagatccgtttctgtacgaggcagacgttcaagtgcagcttatctcaaaggggcagcctaatcctctgaaaaatatcttgaatgaaaacgacattgtctttattgtagagaaggtcccattagaaaaagaggaaacctctcacattgaagaactgcaaagcgaagagactgctattagcgattttagcactggagagaacgtgggccctctggctcttcccgtaggtaaagcacggcagcttatcgggctgtacacaatggcacataatcctaatatgacacacctcaagatcaaccttcctgtaactgcgcttccaccgctgtgggttcggtgtgattcctcagatccggagggtacttgctggctgggcgcggagctaatcactactaacaactctataactggcattgttctttatgtcgtctcttgtaaggctgataaaaattacagcgttaatctcgaaaatttgaagaacctacacaaaaagcggcaccatctgagtaccgttactagtaaaggctttgctcagtatgaactcttcaagtcctccgcgctcgatgatacgatcacagcctcacaaaccgccattgccctagatataagttggtcgcccgttgacgagattctgcagatcccgccactctctagcaccgcaactctaaacataaaggttgagtcaggggagccacggggacccctaaaccacctgtacagagaacttaagtttctcctcgtactggctgatggtctcagaactggggtcacagaatggcttgaacctctggaggctaagtctgcagtggaacttgttcaggaattcctgaatgatctgaacaagttggacggtttcggagactctacaaaaaaagacacagaggttgaaacccttaaacatgatacagcagctgttgatagatcagtgaagagactattcaaggtgcgttctgacctcgacttcgccgaacagctctggtgtaaaatgtcaagcagcgttatatcttaccaggacttagtcaagtgttttaccctgatcatccaaagtctgcaaagaggagatatccagccgtggttgcactcaggttctaacagtttgctgtcaaaactcatccaccaatcataccacgggaccatggatacagtgtcactgtcaggcaccatccccgtccaaatgctactggagatcggcctggataaacttaagaaagattatatatcattctttatcggacaggagcttgcctcccttaaccaccttgaatacttcatagcaccttctgtagatattcaggaacaggtctatcgagtgcagaagctgcaccatatccttgaaattctggtgagttgtatgccgtttattaaatctcaacacgaactgctgttttcactgactcagatttgcataaaatactacaaacagaaccccctcgatgaacagcatatcttccagctacccgtccgccccacagccgtgaagaacctataccagtcggaaaagcctcaaaaatggagggtcgagatttatagcggtcaaaagaagatcaagaccgtttggcagctgagcgatagtagccctattgaccacctcaatttccataaacccgatttctcagagctcaccttgaatgggtccttggaggaacgtattttctttaccaacatggtgacttgttctcaggtgcactttaagtag

SEQ ID NO: 195982 - DNA, 1776 bp, Artificial Sequence
  derived and/or modified sequence
atgtgggaaaggctgaattgcgcagccgaagatttttactcccgcctgcttcagaaattcaacgaggaaaagaaaggcatcaggaaagacccattcctctacgaggctgatgtgcaggtgcagctgatctcaaagggacagccaaaccccttaaagaacatcctgaatgaaaacgacattgtctttatcgtcgaaaaggtacccttagagaaggaagaaaccagccatattgaggagctgcagtctgaggaaactgcgatatccgattttagtacaggcgagaatgtgggtcccctggccctgccagtaggaaaagctcggcagctgatcgggttgtacaccatggcacacaatccgaatatgacccatctcaaaatcaacttacctgtgactgctctgcctccactctgggtccgatgtgattcatcagatccagaagggacctgctggctgggcgctgagctgattactactaacaacagcatcacaggaatcgttctttatgtcgtgtcatgcaaagctgacaaaaattactcggtcaacttggaaaacttaaagaacctccacaaaaagaggcatcatctcagtacagtcacgagcaaaggcttcgcgcagtacgagttgttcaagagctccgcactcgatgatacgattaccgcctcccaaacagccatagccctcgatatctcttggtctccggtggacgagattctgcagattccaccattgtcaagcacggccactctcaacattaaggtggaatccggcgagcccagaggcccattaaaccacctgtaccgggagttgaaatttctgctggtgctcgcggacgggctcagaaccggcgttactgagtggttggagcctcttgaagcgaaaagcgcggtcgaactcgttcaggagttcctcaacgacctgaataaactcgatgggttcggggattctactaagaaagacaccgaagtggaaactttaaaacacgatacagctgctgtggaccggtctgtgaaaaggctgttcaaagtccgcagcgatctggactttgccgaacagctgtggtgcaagatgagctcctcagtgatttcctaccaagacctggtgaagtgttttacgctgatcatacaaagcctacagcggggagatatacaaccctggctgcatagcggctctaactctctcctgtctaaacttattcaccagtcctaccatgggaccatggatactgtgagtttgagcggcacaatacccgtccagatgctgcttgagatcggcctggataagttgaagaaggactacatcagtttcttcatcggccaggagctggcttcccttaatcatctggagtactttatagctccttcagtcgacattcaggaacaggtgtaccgagtacaaaagcttcatcacattcttgagatattggtttcatgcatgccattcattaagagtcagcacgagctgctattctctcttacacagatttgcatcaagtattataaacagaatcctctggacgaacagcacatttttcaactcccggtcagaccaacggctgtgaaaaacctgtaccagtctgaaaaaccccagaaatggcgcgtcgagatttactctggccagaagaagattaaaactgtatggcaactgagcgacagtagccccattgaccatctgaacttccacaagcccgacttctctgagctgaccctgaatggctctctagaggaacggatattctttactaatatggtaacttgttctcaggtccacttcaagtag

SEQ ID NO: 195983 - DNA, 3183 bp, Artificial Sequence
  derived and/or modified sequence
agtcgaggtatcttctccccaaccactgctcttattttaattattgcagacggaagttgaagactattgacatagtaaatagctctgggtggcttgaaacgaaagtttaactttgcggacaaacaggacttattgtagggggtggtcaaaatagtcccggcggggcggggccatgacccctgacgtcgccggtccggcgcgcagttcagtttggcggttccggtaccgctctcacattggggcgggatgtgggagcggctgaactgcgcagcagaggacttttattctcgtctccttcagaaatttaatgaagaaaagaaaggaatccgtaaagacccatttctctatgaggctgatgtccaagtgcagttgatcagcaaaggccaaccaaaccctttgaaaaatattctaaatgaaaatgacatagtattcatagtggaaaaagtgcctttagaaaaggaagaaacaagtcatattgaagaacttcaatctgaagaaactgccatatctgatttctctactggcgaaaatgttggaccacttgctttaccagttgggaaggcaaggcagttaattggactttacaccatggctcacaatcctaatatgacccatttgaagattaatctgccagttactgcccttcctcccctttgggtaagatgtgacagttcagatcctgaaggtacttgttggctaggagctgagcttatcacaacaaacaacagcattacaggaattgtcttatatgtggtcagttgtaaagctgataaaaattattctgtaaatcttgaaaacctaaaaaatttacacaagaaaagacatcacttgtctactgtaacatccaaaggctttgcccagtatgagctctttaagtcctctgccttggatgatacaatcacagcatcacaaactgcgatcgctttggatatttcctggagtcctgtggatgagattcttcaaatccctccactctcttcaactgcaactctgaatattaaagtggaatcaggagagcccagaggtcctttgaatcatctctacagagaactgaaatttcttcttgttttggctgatggtttgaggactggtgtcactgaatggctcgagcccctggaagcaaaatctgctgttgaacttgttcaggaatttctgaatgacttaaataagctggatggatttggtgattctacaaaaaaagacactgaggttgagaccttgaagcatgacactgctgcagtcgatcgttccgtcaagcgtcttttcaaagttcggagtgatcttgattttgctgagcaactgtggtgcaaaatgagcagtagtgtgatttcataccaagacttggtgaagtgtttcacattgatcatccagagtctacaacgtggtgatatacagccatggctccatagtggaagtaacagtttactaagtaagctcattcatcagtcttatcatggaaccatggacacagtttctctcagtgggactattccagttcaaatgcttttggaaattggtttggacaaactaaagaaagattatatcagttttttcataggtcaggaacttgcatctttgaatcatttggaatacttcattgctccatcagtagatatacaagaacaggtttatcgtgtccaaaaactccaccatattctagaaatattagtcagttgcatgcctttcattaaatctcaacatgaactcctcttttctttaacacagatctgcataaagtattacaaacaaaatcctcttgatgagcaacacatttttcagctgccagtcagaccaactgctgtaaagaacttatatcaaagtgagaagccacagaaatggagagtggaaatatatagtggtcaaaagaagattaagacagtttggcaactgagtgacagctcacccatagaccatctgaattttcacaaacctgatttttcggaattaacactaaacggtagcctggaagaaaggatattctttactaacatggttacctgcagccaggtgcatttcaagtgaagtgtgctgatgaagtcctctataagcacaagccaaaaagagaaagagaaaaaaaggtaattattgtagaacctgaaaacagcaatgtatggaaaccctcaaagcagaaaagggaggaagatcctgaagattctcttatgaagctccaaaattgataatcctgtctcagctctgcctcctcaggaggagcattagtagaacagcagtgatgaggacacagagggagcagacagtgggtaccacgatctccgtaaccatttgcatgtgacttagcaagggctctgaaatgacaaagagaacgagcaccacaaatgagaacaggatcattttagtaaatacagctttatcccaaaagctttaactgtattgggaaaacttaaaaaatagcatcctcaaattttctgattcttatttgccatgaaatagaacttagtaaattaaatgttatttgaaaatgttataagagctttgtaaatatttcagaaaatatgggataaatgcctgaatttggttcttctacaggtgctataataaagtccatctctcaatacttatactttctaaattcatctcagaatattagcagccatattccacagttcctataatttttactgggggggatttgtgataggaaagtccttgggaaacatttccaatctttcaaaatattattgtgtatcttaagaagtataggaacttgtatgttgaaatgttgtatggtagttcttgtatagttaaataataatctttttaagagttaatgataagcatatgttatgtgcattattaataaaatagtggccacttaggtaatacccacttttatcttgtgtgctgggtactctggttactgagataaataaggcactggacatcctcacgtggagttcacaggctcatcagtgaattctgtaccacatttcaaccttgtttattttagtttaatggaatatacattcttagtattgcctgattatttaaatttgttgagggggattgcatgttgctttattggcctgtaaaaatagctagtttggtaagatttggtctcgcaccttccatctttgctaccacattaaagatgagcttgttaaaaaggaaagcatatttctctgattgcccttatggagaaataaagataaaattcaaagaaacaaa

SEQ ID NO: 195984 - DNA, 3267 bp, Artificial Sequence
  derived and/or modified sequence
agtcgaggtatcttctccccaaccactgctcttattttaattattgcagacggaagttgaagactattgacatagtaaatagctctgggtggcttgaaacgaaagtttaactttgcggacaaacaggacttattgtagggggtggtcaaaatagtcccggcggggcggggccatgacccctgacgtcgccggtccggcgcgcagttcagtttggcggttccggtaccgctctcacattggggcgggatgtgggagcggctgaactgcgcagcagaggacttttattctcgtctccttcagtgtcctgcagagataaagtgatgactgactcctgagtgtgaataacgggagagataatgtagttctgtttttcacatgtggttctgcgtttcaggaaatttaatgaagaaaagaaaggaatccgtaaagacccatttctctatgaggctgatgtccaagtgcagttgatcagcaaaggccaaccaaaccctttgaaaaatattctaaatgaaaatgacatagtattcatagtggaaaaagtgcctttagaaaaggaagaaacaagtcatattgaagaacttcaatctgaagaaactgccatatctgatttctctactggcgaaaatgttggaccacttgctttaccagttgggaaggcaaggcagttaattggactttacaccatggctcacaatcctaatatgacccatttgaagattaatctgccagttactgcccttcctcccctttgggtaagatgtgacagttcagatcctgaaggtacttgttggctaggagctgagcttatcacaacaaacaacagcattacaggaattgtcttatatgtggtcagttgtaaagctgataaaaattattctgtaaatcttgaaaacctaaaaaatttacacaagaaaagacatcacttgtctactgtaacatccaaaggctttgcccagtatgagctctttaagtcctctgccttggatgatacaatcacagcatcacaaactgcgatcgctttggatatttcctggagtcctgtggatgagattcttcaaatccctccactctcttcaactgcaactctgaatattaaagtggaatcaggagagcccagaggtcctttgaatcatctctacagagaactgaaatttcttcttgttttggctgatggtttgaggactggtgtcactgaatggctcgagcccctggaagcaaaatctgctgttgaacttgttcaggaatttctgaatgacttaaataagctggatggatttggtgattctacaaaaaaagacactgaggttgagaccttgaagcatgacactgctgcagtcgatcgttccgtcaagcgtcttttcaaagttcggagtgatcttgattttgctgagcaactgtggtgcaaaatgagcagtagtgtgatttcataccaagacttggtgaagtgtttcacattgatcatccagagtctacaacgtggtgatatacagccatggctccatagtggaagtaacagtttactaagtaagctcattcatcagtcttatcatggaaccatggacacagtttctctcagtgggactattccagttcaaatgcttttggaaattggtttggacaaactaaagaaagattatatcagttttttcataggtcaggaacttgcatctttgaatcatttggaatacttcattgctccatcagtagatatacaagaacaggtttatcgtgtccaaaaactccaccatattctagaaatattagtcagttgcatgcctttcattaaatctcaacatgaactcctcttttctttaacacagatctgcataaagtattacaaacaaaatcctcttgatgagcaacacatttttcagctgccagtcagaccaactgctgtaaagaacttatatcaaagtgagaagccacagaaatggagagtggaaatatatagtggtcaaaagaagattaagacagtttggcaactgagtgacagctcacccatagaccatctgaattttcacaaacctgatttttcggaattaacactaaacggtagcctggaagaaaggatattctttactaacatggttacctgcagccaggtgcatttcaagtgaagtgtgctgatgaagtcctctataagcacaagccaaaaagagaaagagaaaaaaaggtaattattgtagaacctgaaaacagcaatgtatggaaaccctcaaagcagaaaagggaggaagatcctgaagattctcttatgaagctccaaaattgataatcctgtctcagctctgcctcctcaggaggagcattagtagaacagcagtgatgaggacacagagggagcagacagtgggtaccacgatctccgtaaccatttgcatgtgacttagcaagggctctgaaatgacaaagagaacgagcaccacaaatgagaacaggatcattttagtaaatacagctttatcccaaaagctttaactgtattgggaaaacttaaaaaatagcatcctcaaattttctgattcttatttgccatgaaatagaacttagtaaattaaatgttatttgaaaatgttataagagctttgtaaatatttcagaaaatatgggataaatgcctgaatttggttcttctacaggtgctataataaagtccatctctcaatacttatactttctaaattcatctcagaatattagcagccatattccacagttcctataatttttactgggggggatttgtgataggaaagtccttgggaaacatttccaatctttcaaaatattattgtgtatcttaagaagtataggaacttgtatgttgaaatgttgtatggtagttcttgtatagttaaataataatctttttaagagttaatgataagcatatgttatgtgcattattaataaaatagtggccacttaggtaatacccacttttatcttgtgtgctgggtactctggttactgagataaataaggcactggacatcctcacgtggagttcacaggctcatcagtgaattctgtaccacatttcaaccttgtttattttagtttaatggaatatacattcttagtattgcctgattatttaaatttgttgagggggattgcatgttgctttattggcctgtaaaaatagctagtttggtaagatttggtctcgcaccttccatctttgctaccacattaaagatgagcttgttaaaaaggaaagcatatttctctgattgcccttatggagaaataaagataaaattc

SEQ ID NO: 195985 - DNA, 1839 bp, Artificial Sequence
  derived and/or modified sequence
acattggggcgggatgtgggagcggctgaactgcgcagcagaggacttttattctcgtctccttcagctgatgtccaagtgcagttgatcagcaaaggccaaccaaaccctttgaaaaatattctaaatgaaaatgacatagtattcatagtggaaaaagtgcctttagaaaaggaagaaacaagtcatattgaagaacttcaatctgaagaaactgccatatctgatttctctactggcgaaaatgttggaccacttgctttaccagttgggaaggcaaggcagttaattggactttacaccatggctcacaatcctaatatgacccatttgaagattaatctgccagttactgcccttcctcccctttgggtaagatgtgacagttcagatcctgaaggtacttgttggctaggagctgagcttatcacaacaaacaacagcattacaggaattgtcttatatgtggtcagttgtaaagctgataaaaattattctgtaaatcttgaaaacctaaaaaatttacacaagaaaagacatcacttgtctactgtaacatccaaaggctttgcccagtatgagctctttaagtcctctgccttggatgatacaatcacagcatcacaaactgcgatcgctttggatatttcctggagtcctgtggatgagattcttcaaatccctccactctcttcaactgcaactctgaatattaaagtggaatcaggagagcccagaggtcctttgaatcatctctacagagaactgaaatttcttcttgttttggctgatggtttgaggactggtgtcactgaatggctcgagcccctggaagcaaaatctgctgttgaacttgttcaggaatttctgaatgacttaaataagctggatggatttggtgattctacaaaaaaagacactgaggttgagaccttgaagcatgacactgctgcagtcgatcgttccgtcaagcgtcttttcaaagttcggagtgatcttgattttgctgagcaactgtggtgcaaaatgagcagtagtgtgatttcataccaagacttggtgaagtgtttcacattgatcatccagagtctacaacgtggtgatatacagccatggctccatagtggaagtaacagtttactaagtaagctcattcatcagtcttatcatggaaccatggacacagtttctctcagtgggactattccagttcaaatgcttttggaaattggtttggacaaactaaagaaagattatatcagttttttcataggtcaggaacttgcatctttgaatcatttggaatacttcattgctccatcagtagatatacaagaacaggtttatcgtgtccaaaaactccaccatattctagaaatattagtcagttgcatgcctttcattaaatctcaacatgaactcctcttttctttaacacagatctgcataaagtattacaaacaaaatcctcttgatgagcaacacatttttcagctgccagtcagaccaactgctgtaaagaacttatatcaaagtgagaagccacagaaatggagagtggaaatatatagtggtcaaaagaagattaagacagtttggcaactgagtgacagctcacccatagaccatctgaattttcacaaacctgatttttcggaattaacactaaacggtagcctggaagaaaggatattctttactaacatggttacctgcagccaggtgcatttcaagtgaagtgtgctgatgaagtcctctataagcacaagccaaaaagagaaagagaaaaaaaggtaattattgtagaacctgaaaacagcaatgtatggaaaccctcaa

SEQ ID NO: 195986 - protein, 616 aa, Artificial Sequence
  derived and/or modified sequence
MLTDSGGGGTSFEEDLDSVAPRSAPAGASEPPPPGGVGLGIRTVRLFGEAGPASGVGSSGGGGSGSGTGGGDAALDFKLAAAVLRTGGGGGASGSDEDEVSEVESFILDQEDLDNPVLKTTSEIFLSSTAEGADLRTVDPETQARLEALLEAAAFADPEVLRRLTSSVSCALDEAAAALTRMKAENSHNAGQVDTRSLAEACSDGDVNAVRKLLDEGRSVNEHTEEGESLLCLACSAGYYELAQVLLAMHANVEDRGNKGDITPLMAASSGGYLDIVKLLLLHDADVNSQSATGNTALTYACAGGFVDIVKVLLNEGANIEDHNENGHTPLMEAASAGHVEVARVLLDHGAGINTHSNEFKESALTLACYKGHLDMVRFLLEAGADQEHKTDEMHTALMEACMDGHVEVARLLLDSGAQVNMPADSFESPLTLAACGGHVELAALLIERGANLEEVNDEGYTPLMEAAREGHEEMVALLLAQGANINAQTEETQETALTLACCGGFSEVADFLIKAGADIELGCSTPLMEASQEGHLELVKYLLASGANVHATTATGDTALTYACENGHTDVADVLLQAGADLDKQEDMKTILEGIDPAKHQVRVAFDACKLLRKE

SEQ ID NO: 195987 - DNA, 1851 bp, Artificial Sequence
  derived and/or modified sequence
atgctgacggacagtggtggaggtggcactagcttcgaggaagacttggacagtgttgctccccggtccgcgcccgcaggggcaagtgaacctccgcccccgggaggggtcggtctcggaataagaaccgtccgtctctttggcgaggctggccctgcatccggggtgggttcaagtgggggcgggggcagtggctccggcactggcggtggcgacgcggcgctggacttcaaactggcggctgcggtgttacgcaccggcggcggcggcggcgccagtggcagcgacgaggatgaggtgtccgaggtggaaagcttcatcttagaccaagaggatctggacaatcctgttcttaagactacatccgaaatctttctttcaagcaccgccgagggtgcagatttgcgtacggtggacccggagactcaggcccgcctggaggccctgctggaagccgccgcttttgctgatcctgaagtcttgaggaggttgaccagtagtgtctcttgcgccttggatgaggctgccgccgctctgactcgcatgaaagccgagaacagccacaacgcagggcaagtggacacccggtccctagcggaggcttgttctgatggcgacgtgaatgcagtcagaaaactgcttgacgaaggtcgaagtgtgaatgaacatacagaggagggggagtctctcctttgtttggcctgcagtgcaggatattacgagcttgctcaggtgctactggcaatgcatgctaatgtagaggacagaggaaacaaaggagatatcacccctctcatggctgcatcctctggggggtacctcgacattgtaaagctgctgcttcttcacgacgccgacgtgaactcccagtccgcgacaggtaatactgcactgacatacgcctgcgcagggggctttgtcgatatagttaaggtgttgctaaacgagggggcaaatatcgaagatcacaacgagaacggccacacaccccttatggaggccgctagcgcaggacatgtcgaagtggcccgggtcttactcgaccatggcgcaggaatcaacacacacagcaacgaattcaaggagagcgctctgacactggcatgctataaagggcacctggacatggtgcgattccttctggaggcgggcgcagaccaggagcacaaaactgatgagatgcacactgcgctcatggaagcctgtatggatgggcacgtcgaagttgccaggttgttgctggactctggtgcgcaggtcaatatgccagcagactcatttgaatcacccttgactctggccgcctgtggaggacatgtagagctggcagccttgctgattgagaggggcgcaaatctcgaggaagttaatgacgaaggttacacacctctgatggaagcagcaagagagggccacgaggaaatggtcgccctattactggcgcaaggcgctaatataaacgcccagacggaagagacacaggaaaccgcactgacactggcgtgttgtggcggtttcagtgaagtagctgatttcctgatcaaagcaggcgcagacatcgagctgggctgcagcactcctctgatggaagcgagccaggaaggacatctggagctggtaaagtatctgctggcatccggcgcgaacgtgcatgcaaccactgctacaggggacaccgctctgacatacgcctgtgaaaatggtcatactgatgtggctgacgtcctgcttcaagccggagcagacctggacaagcaggaagatatgaaaaccattcttgaaggtattgaccctgcaaaacatcaggtgcgtgtggcttttgacgcctgcaagctgctgaggaaagaatag

SEQ ID NO: 195988 - DNA, 1851 bp, Artificial Sequence
  derived and/or modified sequence
atgctgacagattctgggggcggcggcaccagctttgaggaggacctggacagcgtggcccccaggtctgccccagctggggccagcgagcccccacctcctgggggcgtgggcctgggcatcagaacagtgcggctgtttggagaggccggccctgccagcggcgtgggcagcagcggcggcggcggcagcggcagcggcaccggcggcggagatgctgccctggacttcaagctggccgctgctgtgctgaggactggaggcggcggcggggccagcggcagtgatgaagatgaggtgtctgaggtggagagcttcatcctggaccaggaggacctggacaaccctgtgctgaagaccaccagcgagatcttcctgagcagcacagctgagggcgctgacctgaggacagtggaccctgagacccaggcccggctggaggccctgctggaggccgccgcctttgctgaccctgaggtgctgcggcggctgaccagctctgtgtcctgtgccctggatgaagctgctgctgccctgaccaggatgaaggccgagaacagccacaatgccggccaggtggacaccaggagcctggccgaggcctgcagtgatggagatgtgaatgctgtgaggaagctgctggatgagggccgctctgtgaatgagcacacagaggagggggagagcctgctgtgcctggcctgcagcgctggctactatgagctggcccaggtgctgctggccatgcacgccaacgtggaggaccggggcaacaagggggacatcacccccctgatggccgccagcagcggcggctacctggacatcgtgaagctgctgctgctgcatgatgctgatgtgaacagccagagcgccactggaaacacagccctgacctacgcctgtgccggcggctttgtggacatcgtgaaggtgctgctgaatgaaggagccaacatcgaggaccacaatgaaaatggccacacccccctgatggaggccgccagcgctggccacgtggaggtggcccgggtgctgctggaccatggagctggcatcaacacccacagcaatgagttcaaggagagcgccctgaccctggcctgctacaagggccacctggacatggtgcgcttcctgctggaggccggggctgaccaggagcacaagacagatgagatgcacacagccctgatggaggcctgcatggatggccacgtggaggtggcccggctgctgctggacagcggggcccaggtgaacatgcctgctgacagctttgagagccccctgaccctggccgcctgtggcggccacgtggagctggccgccctgctgattgagcggggggccaacctggaggaggtgaatgatgagggctacacccccctgatggaggccgcccgggagggccacgaggagatggtggccctgctgctggcccagggcgccaacatcaatgcccagacagaggagacccaggagacagccctgaccctggcctgctgcggcggcttcagcgaggtggccgacttcctgatcaaggccggggctgacatcgagctgggctgcagcacccccctgatggaggccagccaggagggccacctggagctggtgaagtacctgctggccagcggggccaacgtgcacgccaccacagccaccggggacacagccctgacctacgcctgtgaaaatggccacacagatgtggctgatgtgctgctgcaggccggggctgacctggacaagcaggaggacatgaagaccatcctggagggcatcgaccctgccaagcaccaggtgcgggtggcctttgatgcctgcaagctgctgaggaaggagtag

SEQ ID NO: 195989 - DNA, 1851 bp, Artificial Sequence
  derived and/or modified sequence
atgctgaccgacagcggcggcggcggcaccagcttcgaggaggacctcgattccgtcgccccccgatccgccccggccggtgcttcagagcccccacctcccggaggagttggcctgggcataaggaccgttaggctgtttggtgaggctggccctgccagcggagttggcagtagcgggggtggaggtagcggctccgggaccgggggtggggatgcagccctggacttcaagctcgctgcggcagtgctgcggacaggtggaggagggggcgcttcagggtctgacgaggacgaggtgtctgaggttgaaagtttcatcctcgaccaggaagatctcgacaatcccgtgctgaagaccacatccgaaatctttttgtctagtacggccgagggggccgacctgaggacagtggaccccgagactcaggctcgtctagaggcgcttttagaggcagcagcattcgccgaccctgaggtccttagacgcctgacttcctccgtctcgtgtgcactcgatgaggctgctgctgccctaacccgcatgaaggctgaaaattcacacaatgcaggccaggtcgatacccgctccttggccgaagcctgctcagatggagacgttaacgccgtgcgaaagctcctcgatgaagggcggagcgtaaacgaacataccgaagagggagagtccctgctgtgcctggcctgtagcgcagggtattacgaactggcacaggtgttgctcgctatgcatgcaaatgtggaagacagggggaataaaggcgacattactcccttgatggctgcttcctccggaggctatctggatatcgtcaagctgttactgctacacgatgccgatgtgaattctcagtccgccaccgggaatacggcgttgacatatgcatgtgccggagggttcgtggatatagtgaaggtgttgctcaacgaaggcgcaaatattgaagaccacaatgaaaatggacatactcccctgatggaggcagctagcgcagggcatgtggaagtcgcgcgcgtattactagaccacggggcagggatcaacacacattccaatgaattcaaggaaagcgctctgacgctggcctgttacaaggggcacctcgatatggttcgatttcttttggaggccggggcggaccaggagcataagaccgacgaaatgcacaccgccttaatggaagcttgtatggatgggcatgtcgaagtcgcacgtctcctgttagattcaggtgcccaagtgaacatgcctgccgattccttcgagtcccctctcacactggccgcttgcggaggacacgtcgagttggcagcactattaatcgagagaggggcaaatcttgaggaggtgaacgacgagggctacacccccttgatggaggccgccagagagggacacgaggaaatggtcgcccttctgctcgctcaaggtgccaatataaacgcccagacggaggagacccaggaaactgccttaaccctagcctgttgtggcggtttctctgaggttgcagattttctaatcaaagctggtgccgacatcgagctagggtgtagtacgcctttaatggaagcctcccaagaggggcacctcgagctggtcaaatacctgttggcctctggagcaaatgtccacgctactacagccactggggataccgctcttacatacgcctgcgagaacggccataccgatgtggccgacgtgctactccaggccggtgcggacctcgacaaacaagaagacatgaaaactatcttggagggaatcgatcccgctaagcaccaagttagggttgctttcgatgcttgtaagctgttgcgaaaagagtag

SEQ ID NO: 195990 - DNA, 2035 bp, Artificial Sequence
  derived and/or modified sequence
ggtgaccgcgagtgggtcggcaccgtctccggctccgggtgcgaacaatgctgactgatagcggaggcggcggcacctcctttgaggaggacctggactctgtggctccgcgatccgccccagctggggcctcggagccgcctccgccgggaggggtcggtctggggatccgcaccgtgaggctctttggggaggccgggccagcgtcgggagtcggcagcagcggcggcggcggcagcggcagcggtacgggcggaggggacgcggcgctggatttcaagttggcggctgccgtgctgaggaccgggggtggaggtggtgcctctggcagtgacgaggacgaagtgtccgaggttgaatcatttattttggaccaagaagatctggataacccagtgcttaaaacaacatcagagatattcttatcaagtactgcagaaggagcagacttacgcactgtggatccagagacacaggcacgactagaagcattgctagaagcagcagcttttgcagatcctgaggtactccggagactgacatcctcagttagttgtgcactggatgaagctgctgctgcactgacacggatgaaagcagaaaacagccacaatgcaggacaagtggacactcgcagtctagcagaagcttgttcagatggggatgttaatgctgttcgtaaattgctagatgaaggcagaagtgtaaatgaacatacagaagaaggagaaagcctgctgtgtttggcttgttcagcagggtattatgaattagcacaagtattgcttgctatgcatgctaatgttgaagatcgagggaataaaggagacataactcccctgatggcagcttccagtggaggttacttagatattgtgaaattattacttcttcatgatgctgatgtcaactcccagtctgcaacaggaaacactgcgctaacttatgcatgtgctggaggatttgttgacattgttaaagtgctccttaatgaaggtgcaaatatagaagatcataatgaaaatggacatactcccttaatggaagcagccagtgcaggtcatgtggaagttgcaagagttcttttagatcatggtgcaggcatcaacactcattctaatgaattcaaagaaagtgctctaacacttgcttgctacaaaggccatttggatatggttcgctttctacttgaagctggtgcagatcaagagcacaaaacagatgagatgcacactgccttaatggaggcctgcatggatggacatgtagaggtggcacgtttgcttttggatagtggtgctcaagtgaacatgcctgcagattcatttgaatctccattgacgctagctgcctgtggaggacatgttgaattggcagctctacttattgaaaggggagcaaatcttgaagaagttaatgatgaaggatacactcccttgatggaagctgcccgggaaggacatgaagaaatggtggcactactcttagcacaaggagcaaatataaatgcccagacagaagaaactcaagaaactgctcttactttggcttgctgtggaggattttctgaagttgcagactttcttattaaggcaggggctgatatagaacttggctgctccacacctctgatggaggcatctcaggagggacacctggaattggttaaatatttgctggcttctggcgctaatgtgcatgctacaacagcaacaggagacacagccttaacctatgcttgtgaaaatggacatacggatgttgcagatgttttacttcaagcaggggctgatttagacaagcaggaggacatgaagactattttggagggcatagatccggccaagcatcaggtgagggtggcctttgatgcttgtaagctactacgtaaagaatagatgttgtaggtaaccagaactctggatatctgaattccagccaagaagttccaggaccctgctgggtgacaaaggaaatcctcttcaattgaaaaagattatgaagtcccaataaaaagagatttgtattgctggta

SEQ ID NO: 195991 - DNA, 1851 bp, Artificial Sequence
  derived and/or modified sequence
atgctcacagacagcggaggcggaggcacatctttcgaggaggacttggattcggtggctcccagatccgcacccgctggggcttccgagccacccccaccgggaggcgtgggcctcggtatcaggactgtgagactcttcggcgaagccggacccgctagcggggtcggaagctcgggcggagggggatccggtagcggaactgggggaggcgatgctgcgctagatttcaaactggcggctgctgtgcttcggacagggggaggaggtggcgcttctggctctgatgaagatgaggtgtccgaggtagagtccttcatactcgatcaggaagatctagacaatcccgtcctcaagaccacctccgaaattttcttaagcagcaccgcagagggcgctgacttaagaactgttgatcccgagacacaggctcgccttgaggcactccttgaagctgcagcctttgcagaccccgaagtgcttaggcgtttaacctcgtccgtgtcctgtgctctggatgaagctgccgctgccctcacgagaatgaaggccgaaaatagccataacgcagggcaagtcgataccagatcgcttgccgaagcctgttccgacggggatgtgaacgccgtgcgcaagctgttggacgaaggtcgatctgtcaatgaacacacagaagagggggaatccctgctgtgcctcgcctgctcggccggttattacgaattagcccaggttttgcttgcaatgcatgcaaacgtggaagacagggggaacaagggagatatcacgcctctgatggcggcaagcagcggaggttatctggacattgtgaagctgctcctgctgcacgacgccgatgtaaacagccaatctgccaccggcaacacagcccttacctatgcatgtgccggtgggtttgtggatatagtgaaagtgctgctcaatgaaggcgcaaatatcgaagatcacaacgagaatggtcataccccgttgatggaggccgctagtgcagggcatgtggaggtagcacgggtgctgctcgatcacggcgcagggatcaacacccacagtaacgagttcaaggaatccgcacttacactcgcatgctataagggacacctggatatggtccgatttcttctggaggctggagccgatcaggagcacaagacagacgagatgcacacagctctgatggaagcctgcatggatggacatgtggaggtggcacgcctcctcctggatagcggagcacaggtgaatatgcctgccgactcattcgagagccctttaacactggcagcgtgtggtgggcatgtggagctcgcagcattgctcattgagaggggtgccaaccttgaggaagtgaacgacgagggctatacccccttaatggaggctgctagggaggggcacgaggagatggtggcgctcttgctggcccagggtgctaacatcaacgcccagactgaggaaactcaggaaactgctctgacattggcttgttgtggcggattttccgaagtggccgactttctgataaaggccggagctgacattgagttaggttgttcaactcctctaatggaagcttcacaagaggggcatttggagttggtaaaatacttgttagcatccggcgctaatgtacatgcgaccactgcaaccggcgacaccgcactcacctatgcctgcgagaatgggcacacagacgttgccgacgttctgctacaggcaggcgcagacctcgacaaacaggaagacatgaagactattctggagggtattgatccggcaaagcatcaggtgcgagtcgcgttcgacgcttgtaagctgctgcggaaggaatag

SEQ ID NO: 195992 - DNA, 1851 bp, Artificial Sequence
  derived and/or modified sequence
atgctgaccgacagcggcggcggcggcaccagcttcgaggaggacctggacagcgtggcccccagaagcgcccccgccggcgccagcgagccccccccccccggcggcgtgggcctgggcatcagaaccgtgagactgttcggcgaggccggccccgccagcggcgtgggcagcagcggcggcggcggcagcggcagcggcaccggcggcggcgacgccgccctggacttcaagctggccgccgccgtgctgagaaccggcggcggcggcggcgccagcggcagcgacgaggacgaggtgagcgaggtggagagcttcatcctggaccaggaggacctggacaaccccgtgctgaagaccaccagcgagatcttcctgagcagcaccgccgagggcgccgacctgagaaccgtggaccccgagacccaggccagactggaggccctgctggaggccgccgccttcgccgaccccgaggtgctgagaagactgaccagcagcgtgagctgcgccctggacgaggccgccgccgccctgaccagaatgaaggccgagaacagccacaacgccggccaggtggacaccagaagcctggccgaggcctgcagcgacggcgacgtgaacgccgtgagaaagctgctggacgagggcagaagcgtgaacgagcacaccgaggagggcgagagcctgctgtgcctggcctgcagcgccggctactacgagctggcccaggtgctgctggccatgcacgccaacgtggaggacagaggcaacaagggcgacatcacccccctgatggccgccagcagcggcggctacctggacatcgtgaagctgctgctgctgcacgacgccgacgtgaacagccagagcgccaccggcaacaccgccctgacctacgcctgcgccggcggcttcgtggacatcgtgaaggtgctgctgaacgagggcgccaacatcgaggaccacaacgagaacggccacacccccctgatggaggccgccagcgccggccacgtggaggtggccagagtgctgctggaccacggcgccggcatcaacacccacagcaacgagttcaaggagagcgccctgaccctggcctgctacaagggccacctggacatggtgagattcctgctggaggccggcgccgaccaggagcacaagaccgacgagatgcacaccgccctgatggaggcctgcatggacggccacgtggaggtggccagactgctgctggacagcggcgcccaggtgaacatgcccgccgacagcttcgagagccccctgaccctggccgcctgcggcggccacgtggagctggccgccctgctgatcgagagaggcgccaacctggaggaggtgaacgacgagggctacacccccctgatggaggccgccagagagggccacgaggagatggtggccctgctgctggcccagggcgccaacatcaacgcccagaccgaggagacccaggagaccgccctgaccctggcctgctgcggcggcttcagcgaggtggccgacttcctgatcaaggccggcgccgacatcgagctgggctgcagcacccccctgatggaggccagccaggagggccacctggagctggtgaagtacctgctggccagcggcgccaacgtgcacgccaccaccgccaccggcgacaccgccctgacctacgcctgcgagaacggccacaccgacgtggccgacgtgctgctgcaggccggcgccgacctggacaagcaggaggacatgaagaccatcctggagggcatcgaccccgccaagcaccaggtgagagtggccttcgacgcctgcaagctgctgagaaaggagtag

SEQ ID NO: 195993 - protein, 365 aa, Artificial Sequence
  derived and/or modified sequence
MAARLGALAASGLYRRRQHRQSPPPATGNMSDALANAVCQRCQARFSPAERIVNSNGELYHEHCFVCAQCFRPFPEGLFYEFEGRKYCEHDFQMLFAPCCGSCGEFIIGRVIKAMNNNWHPGCFRCELCDVELADLGFVKNAGRHLCRPCHNREKAKGLGKYICQRCHLVIDEQPLMFRSDAYHPDHFNCTHCGKELTAEARELKGELYCLPCHDKMGVPICGACRRPIEGRVVNALGKQWHVEHFVCAKCEKPFLGHRHYEKKGLAYCETHYNQLFGDVCYNCSHVIEGDVVSALNKAWCVSCFSCSTCNSKLTLKNKFVEFDMKPVCKRCYEKFPLELKKRLKKLSELTSRKAQPKATDLNSA

SEQ ID NO: 195994 - protein, 336 aa, Artificial Sequence
  derived and/or modified sequence
MSDALANAVCQRCQARFSPAERIVNSNGELYHEHCFVCAQCFRPFPEGLFYEFEGRKYCEHDFQMLFAPCCGSCGEFIIGRVIKAMNNNWHPGCFRCELCDVELADLGFVKNAGRHLCRPCHNREKAKGLGKYICQRCHLVIDEQPLMFRSDAYHPDHFNCTHCGKELTAEARELKGELYCLPCHDKMGVPICGACRRPIEGRVVNALGKQWHVEHFVCAKCEKPFLGHRHYEKKGLAYCETHYNQLFGDVCYNCSHVIEGDVVSALNKAWCVSCFSCSTCNSKLTLKNKFVEFDMKPVCKRCYEKFPLELKKRLKKLSELTSRKAQPKATDLNSA

SEQ ID NO: 195995 - DNA, 1098 bp, Artificial Sequence
  derived and/or modified sequence
atggccgccagactgggcgccctggccgccagcggcctgtacagaagaagacagcacagacagagccccccccccgccaccggcaacatgagcgacgccctggccaacgccgtgtgccagagatgccaggccagattcagccccgccgagagaatcgtgaacagcaacggcgagctgtaccacgagcactgcttcgtgtgcgcccagtgcttcagacccttccccgagggcctgttctacgagttcgagggcagaaagtactgcgagcacgacttccagatgctgttcgccccctgctgcggcagctgcggcgagttcatcatcggcagagtgatcaaggccatgaacaacaactggcaccccggctgcttcagatgcgagctgtgcgacgtggagctggccgacctgggcttcgtgaagaacgccggcagacacctgtgcagaccctgccacaacagagagaaggccaagggcctgggcaagtacatctgccagagatgccacctggtgatcgacgagcagcccctgatgttcagaagcgacgcctaccaccccgaccacttcaactgcacccactgcggcaaggagctgaccgccgaggccagagagctgaagggcgagctgtactgcctgccctgccacgacaagatgggcgtgcccatctgcggcgcctgcagaagacccatcgagggcagagtggtgaacgccctgggcaagcagtggcacgtggagcacttcgtgtgcgccaagtgcgagaagcccttcctgggccacagacactacgagaagaagggcctggcctactgcgagacccactacaaccagctgttcggcgacgtgtgctacaactgcagccacgtgatcgagggcgacgtggtgagcgccctgaacaaggcctggtgcgtgagctgcttcagctgcagcacctgcaacagcaagctgaccctgaagaacaagttcgtggagttcgacatgaagcccgtgtgcaagagatgctacgagaagttccccctggagctgaagaagagactgaagaagctgagcgagctgaccagcagaaaggcccagcccaaggccaccgacctgaacagcgcctag

SEQ ID NO: 195996 - DNA, 1098 bp, Artificial Sequence
  derived and/or modified sequence
atggcggctcgcttgggagctctggcagcaagcggcctgtatcgccggcggcagcatcggcaaagcccccctcctgctacaggcaacatgtccgacgccttagctaatgctgtctgtcagaggtgccaggcaaggttttcccccgccgagagaatcgttaattctaatggagaactgtatcatgaacattgctttgtgtgtgcacagtgctttagaccctttcctgaaggccttttttatgagttcgagggcaggaagtactgtgaacacgacttccagatgctcttcgctccctgctgcggcagctgcggtgagttcattatagggcgggtgatcaaggccatgaataacaactggcaccctgggtgctttcggtgtgaactgtgtgatgtcgaactggctgaccttggttttgtgaaaaacgccggccgacacctctgtaggccttgccataatcgtgagaaggccaagggactggggaaatatatctgccagaggtgccatctggtgattgatgagcagcccctgatgttccgttcagacgcgtaccatcctgatcatttcaactgcacccactgtggaaaggagctgaccgccgaagcacgcgagttgaagggtgagctttattgcctgccctgccacgataagatgggggtgcccatctgtggggcatgtcgaaggcctatagagggacgcgtggtgaacgctcttggcaaacagtggcatgtcgagcattttgtctgcgccaaatgcgagaagccttttctgggacatcggcactacgaaaagaaaggtctggcctattgcgagacccattacaatcagctgtttggagacgtgtgttacaactgttcacatgttatcgagggggatgttgtctcagctctcaacaaggcctggtgtgtgtcctgcttttcctgttcaacctgtaatagtaagctcacgcttaagaacaagttcgtcgagttcgacatgaagcctgtctgcaaacgctgttatgagaagttccctctcgagctgaagaagaggcttaagaaattgtccgaattaacctcccgaaaggcgcaacccaaggccacggatcttaactcagcttag

SEQ ID NO: 195997 - DNA, 2111 bp, Artificial Sequence
  derived and/or modified sequence
gcgtaacgtgagctcgcgaccagcgcgggggaggcgcccacacgcccgtcccgtcttggtgtctggccccaggcggccgcgcctcccctccgaggtggtcccatagcccctgcaccaggcggcccgcgcccgcgacctcaaggcggctgccccgcgccatggcggcccggctgggtgcgctggccgcgtcggggctgtaccggcggcgccagcaccggcagagcccgccgccagccacgggcaatatgtcggacgccttggccaacgccgtgtgccagcgctgccaggcccgcttctcccccgccgagcgcattgtcaacagcaatggggagctgtaccatgagcactgcttcgtgtgtgcccagtgcttccggcccttccccgaggggctcttctatgagtttgaaggccggaagtactgcgaacacgacttccaaatgctgtttgctccgtgctgtggatcctgcggtgagttcatcattggccgcgtcatcaaggccatgaacaacaactggcacccgggctgcttccgctgcgagctgtgtgatgtggagctggctgacctgggctttgtgaagaatgccggcaggcatctctgccggccttgccacaaccgtgagaaggccaagggcctgggcaagtacatctgccagcggtgccacctggtcatcgacgagcagcccctcatgttcaggagcgacgcctaccaccctgaccacttcaactgcacccactgtgggaaggagctgacagccgaggcccgcgagctgaagggtgagctctactgcctgccctgccatgacaagatgggcgtccccatctgcggggcctgccgccggcccatcgagggccgagtggtcaacgcgctgggcaagcagtggcacgtggagcactttgtctgtgccaagtgtgagaagccattcctggggcaccggcactatgagaagaagggcctggcctactgcgagactcactacaaccagctcttcggggacgtctgctacaactgcagccatgtgattgaaggcgatgtggtgtcggccctcaacaaggcctggtgtgtgagctgcttctcctgctccacctgcaacagcaagctcaccctgaagaacaagtttgtggagttcgacatgaagcccgtgtgtaagaggtgctacgagaagttcccgctggagctgaagaagcggctgaagaagctgtcggagctgacctcccgcaaggcccagcccaaggccacagacctcaactctgcctgaaggccctcttgcgcagctgcctctcggcccctccgccttctcccctcctgctgtccatgcttggccccctcgtccccatccacctgtgccctccgcatcttaccctccctttctctttcctcattgccttctcccttcctgttccctcatctctgccttccccatgtctctcctctccttggccgtggcttctgtctgtgaggaggcaggagctggggagtgggagcctatgaccccacgtctgacagccatgtccacctgtgcccacagcttccgcccacagacctccagggacaggagcaaattgcaccacagctccccgcctggcctggccctccccaggcggctcagtggctcatgctgtcctgtgagagcccctgccccagagcggccccactaagcgcatgtggctcctgggctacccacagccagggcagcctgctggagccacagggccagggccatgcagatggaggcctctgggagccacctccaatccctcaccactcactcaaccagtggcacagtgtccttgtgcccacactgagccagcaagtcctgctgtccacacccacaagctacctggagggacaggacccacctccatccttcggaaggccttcctggaatcccaccttggcctccgccctcggttccgccccgcccctctccccccgaccttggggcttgtgtcgagcccttgggtggggccaggaggaggtgatggcgtcagaggaggtgtggtcagaggtgacttgttcccacctccagggaggacgcttcgtcttcggccagcgcagacctggtgtttgtttgttgggctcacgcttgcacaatgaaggcttgttcacacaa

SEQ ID NO: 195998 - DNA, 1098 bp, Artificial Sequence
  derived and/or modified sequence
atggccgcccggctgggcgccctggccgccagcggcctgtacagaagacggcagcaccggcagagccccccaccagccactggaaacatgtctgatgccctggccaatgctgtgtgccagcgctgccaggcccgcttcagccctgctgagcgcatcgtgaacagcaatggagagctgtaccacgagcactgctttgtgtgtgcccagtgcttccggcccttccctgagggcctcttctatgaatttgagggcaggaagtactgtgaacatgacttccagatgctgtttgccccctgctgcggcagctgtggggagttcatcatcggccgggtcatcaaggccatgaacaacaactggcaccctggctgcttccgctgtgagctgtgtgatgtggagctggccgacctgggctttgtgaagaatgccggccgccacctgtgccggccctgccacaaccgggagaaggccaagggcctgggcaagtacatctgccagcgctgccacctggtgattgatgagcagcccctgatgttcagaagtgatgcctaccacccagaccacttcaactgcacccactgcggcaaggagctgacagctgaggcccgggagctgaagggggagctgtactgcctgccctgccacgacaagatgggcgtgcccatctgtggggcctgccggcggcccatcgagggccgggtggtgaatgccctgggcaagcagtggcacgtggagcactttgtgtgtgccaagtgtgagaagcccttcctgggccaccgccactatgagaagaagggcctggcctactgtgagacccactacaaccagctgtttggagatgtgtgctacaactgcagccacgtgattgaaggagatgtggtgtctgccctgaacaaggcctggtgtgtgtcctgcttcagctgcagcacctgcaacagcaagctgaccctgaagaacaagtttgtggagtttgacatgaagcctgtgtgcaagcgctgctatgagaagttccccctggagctgaagaagaggctgaagaagctgtctgagctgaccagcaggaaggcccagcccaaggccacagacctgaacagcgcctag

SEQ ID NO: 195999 - DNA, 1098 bp, Artificial Sequence
  derived and/or modified sequence
atggccgcccggctgggcgccctggccgccagcggcctgtaccggaggcgacagcatcgtcaatcaccaccgccagcaacgggaaacatgagcgatgccctggccaatgcggtttgccagaggtgccaggctcgattctccccagcagaaaggattgtgaatagcaatggggagctatatcacgaacactgcttcgtgtgcgcccagtgttttagaccgtttccggaggggctgttctacgagtttgagggccgaaagtactgcgagcacgactttcaaatgctgtttgccccctgctgcggatcctgcggcgaatttatcattggtagggtgattaaagcgatgaataataattggcatcccggttgcttcaggtgcgaattgtgtgacgttgaacttgctgatcttggcttcgtgaagaacgcggggagacatctttgtagaccgtgccacaatcgcgaaaaggcaaaaggcctgggaaaatatatctgtcagcggtgtcatttggtgatagatgaacagcccttgatgttcagatccgacgcgtaccaccccgatcactttaactgcacccattgcggaaaggagttgacagccgaagcacgagagctcaaaggcgaactatattgtctaccgtgtcacgacaaaatgggggtaccaatttgcggcgcatgcaggcggcctatcgagggccgggtggtaaacgccttaggcaaacaatggcatgtcgaacacttcgtgtgcgccaagtgtgagaagccctttttaggtcaccggcactatgagaagaagggcctggcctattgcgaaactcattacaatcagctgtttggcgatgtatgctacaactgctcccacgtaatcgaaggggatgtggttagcgccctcaataaggcctggtgcgtatcgtgcttttcgtgctcaacctgtaattccaagctcaccttgaagaataagttcgtggagtttgacatgaaacctgtctgcaagaggtgttatgagaagtttccattggagctgaaaaagaggctcaagaaactgtcagagctgacttcccgcaaggcgcaacccaaggccacagacctcaactctgcatag

SEQ ID NO: 196000 - DNA, 1098 bp, Artificial Sequence
  derived and/or modified sequence
atggccgctagactgggagcgctagctgccagcggactgtatcggagaagacagcaccgacagagtcctccgcctgccactggaaatatgtcagacgcgctagccaatgcggtttgtcagcgatgccaggctagattcagccctgcagaacgtatcgtgaattcaaacggtgagctctatcacgagcactgctttgtctgcgcacaatgttttcgtcccttccctgaaggtttattctacgagttcgagggcagaaagtactgtgagcatgactttcagatgttgttcgccccttgctgcgggtcctgcggggagttcattataggtcgggtcattaaagccatgaacaataattggcatcccggatgctttcgctgcgagctgtgtgatgtcgagctcgcagatctcgggtttgtgaagaacgcagggagacatctgtgtcgcccatgtcataacagagagaaggcaaagggtctggggaagtacatctgccagaggtgtcacctggtgattgacgagcaacctttaatgttcagatccgatgcatatcatccagaccacttcaactgtacccactgcgggaaagaactgacagcagaggcacgggagctaaagggagaactctattgccttccttgccacgacaagatgggtgtaccaatctgtggcgcatgcaggcgacccatagaggggagggttgttaacgccctgggaaagcaatggcacgtggagcacttcgtctgcgcaaaatgtgaaaagcccttcctcggccataggcactacgagaagaaaggtctggcatactgcgagacccactataaccagctgtttggtgatgtttgttacaattgcagccacgtgatagaaggggacgtcgtcagtgctctgaataaggcttggtgtgtgagctgtttctcatgcagcacctgtaatagcaagttaaccctcaaaaataaattcgtggagtttgatatgaaaccagtttgcaagcgctgctacgagaaatttccacttgagctgaaaaagcgcctgaagaagctttccgaactgacatctcggaaggctcagccaaaagccaccgacctgaattctgcctag

SEQ ID NO: 196001 - protein, 236 aa, Artificial Sequence
  derived and/or modified sequence
MYHGMNPSNGDGFLEQQQQQQQPQSPQRLLAVILWFQLALCFGPAQLTGGFDDLQVCADPGIPENGFRTPSGGVFFEGSVARFHCQDGFKLKGATKRLCLKHFNGTLGWIPSDNSICVQEDCRIPQIEDAEIHNKTYRHGEKLIITCHEGFKIRYPDLHNMVSLCRDDGTWNNLPICQGCLRPLAPQHTPAQGTRTQAQGSQKPVTASQALLSCSKVCIHLPGAKRAPTLLRTTLT

SEQ ID NO: 196002 - protein, 106 aa, Artificial Sequence
  derived and/or modified sequence
MYHGMNPSNGDGFLEQQQQQQQPQSPQRLLAVILWFQLALCFGPAQLTGVHLTRDLLGFEGCPECPPPPGFKEESQEFAQQVTPLRSLTHANPWSSGPLCIPKSWS

SEQ ID NO: 196003 - protein, 490 aa, Artificial Sequence
  derived and/or modified sequence
MYHGMNPSNGDGFLEQQQQQQQPQSPQRLLAVILWFQLALCFGPAQLTGGFDDLQVCADPGIPENGFRTPSGGVFFEGSVARFHCQDGFKLKGATKRLCLKHFNGTLGWIPSDNSICVQEDCRIPQIEDAEIHNKTYRHGEKLIITCHEGFKIRYPDLHNMVSLCRDDGTWNNLPICQGCLRPLASSNGYVNISELQTSFPVGTVISYRCFPGFKLDGSAYLECLQNLIWSSSPPRCLALEVCPLPPMVSHGDFVCHPRPCERYNHGTVVEFYCDPGYSLTSDYKYITCQYGEWFPSYQVYCIKSEQTWPSTHETLLTTWKIVAFTATSVLLVLLLVILARMFQTKFKAHFPPRGPPRSSSSDPDFVVVDGVPVMLPSYDEAVSGGLSALGPGYMASVGQGCPLPVDDQSPPAYPGSGDTDTGPGESETCDSVSGSSELLQSLYSPPRCQESTHPASDNPDIIASTAEEVASTSPGIDIADEIPLMEEDP

SEQ ID NO: 196004 - protein, 330 aa, Artificial Sequence
  derived and/or modified sequence
MVSLCRDDGTWNNLPICQGCLRPLASSNGYVNISELQTSFPVGTVISYRCFPGFKLDGSAYLECLQNLIWSSSPPRCLALEVCPLPPMVSHGDFVCHPRPCERYNHGTVVEFYCDPGYSLTSDYKYITCQYGEWFPSYQVYCIKSEQTWPSTHETLLTTWKIVAFTATSVLLVLLLVILARMFQTKFKAHFPPRGPPRSSSSDPDFVVVDGVPVMLPSYDEAVSGGLSALGPGYMASVGQGCPLPVDDQSPPAYPGSGDTDTGPGESETCDSVSGSSELLQSLYSPPRCQESTHPASDNPDIIASTAEEVASTSPGIDIADEIPLMEEDP

SEQ ID NO: 196005 - DNA, 1473 bp, Artificial Sequence
  derived and/or modified sequence
atgtaccacggcatgaaccccagcaacggcgacggcttcctggagcagcagcagcagcagcagcagccccagagcccccagagactgctggccgtgatcctgtggttccagctggccctgtgcttcggccccgcccagctgaccggcggcttcgacgacctgcaggtgtgcgccgaccccggcatccccgagaacggcttcagaacccccagcggcggcgtgttcttcgagggcagcgtggccagattccactgccaggacggcttcaagctgaagggcgccaccaagagactgtgcctgaagcacttcaacggcaccctgggctggatccccagcgacaacagcatctgcgtgcaggaggactgcagaatcccccagatcgaggacgccgagatccacaacaagacctacagacacggcgagaagctgatcatcacctgccacgagggcttcaagatcagataccccgacctgcacaacatggtgagcctgtgcagagacgacggcacctggaacaacctgcccatctgccagggctgcctgagacccctggccagcagcaacggctacgtgaacatcagcgagctgcagaccagcttccccgtgggcaccgtgatcagctacagatgcttccccggcttcaagctggacggcagcgcctacctggagtgcctgcagaacctgatctggagcagcagcccccccagatgcctggccctggaggtgtgccccctgccccccatggtgagccacggcgacttcgtgtgccaccccagaccctgcgagagatacaaccacggcaccgtggtggagttctactgcgaccccggctacagcctgaccagcgactacaagtacatcacctgccagtacggcgagtggttccccagctaccaggtgtactgcatcaagagcgagcagacctggcccagcacccacgagaccctgctgaccacctggaagatcgtggccttcaccgccaccagcgtgctgctggtgctgctgctggtgatcctggccagaatgttccagaccaagttcaaggcccacttcccccccagaggcccccccagaagcagcagcagcgaccccgacttcgtggtggtggacggcgtgcccgtgatgctgcccagctacgacgaggccgtgagcggcggcctgagcgccctgggccccggctacatggccagcgtgggccagggctgccccctgcccgtggacgaccagagcccccccgcctaccccggcagcggcgacaccgacaccggccccggcgagagcgagacctgcgacagcgtgagcggcagcagcgagctgctgcagagcctgtacagcccccccagatgccaggagagcacccaccccgccagcgacaaccccgacatcatcgccagcaccgccgaggaggtggccagcaccagccccggcatcgacatcgccgacgagatccccctgatggaggaggacccctag

SEQ ID NO: 196006 - DNA, 1473 bp, Artificial Sequence
  derived and/or modified sequence
atgtatcacggcatgaacccctctaacggcgacggcttcctagaacagcaacagcagcagcaacagccacagagtcctcagcgcctgcttgccgtaatcctgtggtttcagctagcactctgttttggccctgctcagcttaccgggggctttgatgatctgcaggtttgcgccgaccctggtatccctgagaatggattccgcaccccgagcgggggtgtattcttcgaagggtcagtggcccgctttcactgccaggatggatttaagcttaagggagccactaaacggttgtgcctgaaacattttaacggaacactcggatggatccccagcgacaattccatatgtgttcaggaggactgccggatccctcaaatcgaggacgcagaaatccataacaaaacgtatcggcacggtgagaaacttatcatcacttgccacgaaggcttcaaaatcaggtatcctgatctacacaacatggttagcctatgcagggatgatggcacgtggaacaacctacccatttgtcagggatgcctgcggcctctggcatccagcaacggatatgttaacatttctgaattacagacttcgtttcccgtgggcacggtaatttcatacaggtgttttcctgggttcaagctagacggtagtgcctacctagaatgtctgcagaacctcatatggtcctcgtcccctccaaggtgtctggcattagaggtgtgcccactccccccaatggtgtcccacggcgatttcgtgtgtcaccctagaccctgcgagcggtacaatcatggtactgtggtagaattctattgcgatcccgggtatagcttaacatccgattacaaatatatcacctgtcagtacggtgagtggttcccttcctatcaggtttactgtatcaagtccgagcagacatggccaagcacccacgagactctgctaaccacttggaaaatcgtcgcctttaccgcaacctccgtgctgctagtcctgcttttagtgatcctggctcgaatgttccagaccaagttcaaggcacacttcccaccaagaggtccccccaggtcttcaagctctgatccggatttcgtcgtggtcgatggtgtccccgtgatgctaccctcctacgatgaggcagtgagtgggggcctcagtgcgctcgggcctggatacatggcctcggttggccaaggctgtcccctgccagtggacgatcagtcccccccagcttacccaggcagcggcgatacagacactggtccaggtgagagcgagacatgcgattctgtcagcggttcctcggagctcctccagtctctgtacagcccacctagatgccaggaatcaactcatccagcaagtgataaccctgacataattgcttccactgcagaagaggtggcctcgacaagccctgggattgacattgcagacgaaatcccattaatggaagaggatccatag

SEQ ID NO: 196007 - DNA, 1473 bp, Artificial Sequence
  derived and/or modified sequence
atgtatcatggaatgaatccgtcaaacggggatggattcctcgaacagcagcaacaacagcagcagccccagtccccccagcggttgcttgctgtaatactgtggtttcagctggccctttgcttcggaccagcccagctcacgggcggtttcgacgatttacaagtgtgcgctgacccagggatcccagaaaatggcttccgaacacctagcgggggggtgtttttcgaagggtccgtagcccggttccattgtcaggatggattcaagttgaagggggccactaaacggctttgtcttaagcactttaatgggacattagggtggattccatcagataactctatatgtgtccaagaagattgtcggattccccagatcgaggacgctgagatccataataaaacctacaggcatggggagaagctcataatcacctgccatgagggcttcaagatccgatacccagacctccacaatatggtgtccctgtgccgggacgacggtacatggaacaatctgccaatctgtcaagggtgcctgcgccctctggcatcctcgaacggttatgtgaacatctcagaactgcaaacaagctttccagtcggcacagtgatctcgtacagatgtttcccaggatttaagctcgacggctcagcttacctggagtgcttgcaaaatttgatttggagttcatcccctccccgttgcttagccctggaagtctgccccctgcctccgatggtctcccacggcgacttcgtctgtcacccgcgcccctgtgagcgatacaatcacggcacggtggtagaattctactgcgatccaggatactccctgacgagcgattacaaatatatcacgtgccaatacggtgaatggtttccttcctatcaggtctactgcatcaaatctgagcaaacatggccaagtacccacgaaaccctgcttactacgtggaagatagtggctttcaccgctactagcgttctgctggtattactcctggtcattcttgcaaggatgttccagacgaagtttaaggcacacttccctcctcgaggccctcccagatcaagttcatctgatcctgatttcgtcgtagtcgatggggtcccagtcatgctgccatcttatgacgaggcggtctctggtggtctgagcgctctgggtcctggctacatggctagtgtgggccagggatgccctctgcctgtcgatgaccaatctcccccagcatatccaggctcaggcgatacagacaccggacctggggaaagcgagacgtgcgacagtgtaagcgggagttccgaactgctgcagagcctgtatagcccacccagatgtcaagagtcaacccatccggcttctgacaatcctgacatcatagcctcaaccgctgaagaggtcgcgtcgacctccccgggaatcgacatcgccgatgaaattccgctcatggaagaggatccttag

SEQ ID NO: 196008 - DNA, 1473 bp, Artificial Sequence
  derived and/or modified sequence
atgtaccacggcatgaaccccagcaatggagatggcttcctggagcagcagcagcagcagcagcagccccagagcccccagaggctgctggccgtcatcctgtggttccagctggccctgtgcttcggccctgcccagctgaccggcggctttgatgacctgcaggtgtgtgccgaccccggcatcccagaaaatggcttccgcaccccatctggaggagtcttctttgagggctctgtggcccgcttccactgccaggacggcttcaagctgaagggggccaccaagaggctgtgcctgaagcacttcaacggcaccctgggctggatccccagcgacaacagcatctgtgtgcaggaggactgccgcatcccccagattgaagatgctgagatccacaacaagacctacagacatggagagaagctgatcatcacctgccacgagggcttcaagatccgctacccagacctgcacaacatggtgtccctgtgcagagatgatggcacctggaacaacctgcccatctgccagggctgcctgcggcccctggccagcagcaatggctacgtgaacatcagcgagctgcagaccagcttccctgtgggcaccgtcatctcctaccgctgcttccctggcttcaagctggatggcagcgcctacctggagtgcctgcagaacctgatctggagcagcagccccccacgctgcctggccctggaggtgtgccccctgccccccatggtgtcccatggagactttgtgtgccacccccggccctgtgagcgctacaaccacggcaccgtggtggagttctactgtgaccccggctacagcctgaccagtgactacaagtacatcacctgccagtatggagagtggttccccagctaccaggtgtactgcatcaagtctgagcagacctggcccagcacccatgagaccctgctgaccacctggaagatcgtggccttcaccgccacctctgtgctgctggtgctgctgctggtgatcctggccaggatgttccagaccaagttcaaggcccacttccccccccggggcccccccaggagcagcagcagtgaccctgactttgtggtggtggatggagtgcctgtgatgctgcccagctatgatgaggccgtgtctgggggcctgagcgccctgggccctggctacatggcctctgtgggccagggctgccccctgcctgtggatgaccagagccccccagcctacccaggcagcggggacacagacaccggccctggagagagcgagacctgtgacagcgtgtctggcagcagcgagctgctgcagagcctgtacagccccccacgctgccaggagagcacccacccagccagtgacaacccagacatcatcgccagcacagctgaggaggtggccagcaccagccctggcattgatattgctgatgagatccccctgatggaggaggacccctag

SEQ ID NO: 196009 - DNA, 1473 bp, Artificial Sequence
  derived and/or modified sequence
atgtaccacggcatgaaccccagcaacggcgacggcttcctggagcaacagcagcagcaacagcagccccagtctccccagcggttactggccgtgatcctgtggttccagttggccctgtgtttcggtcccgcgcagctgacagggggatttgatgacctgcaggtgtgtgcagatcccggaatcccggaaaacggctttcgcacaccaagcggtggggtgttttttgaaggttccgttgccagatttcactgccaggacggcttcaaattgaagggagccactaagaggctttgcctgaaacatttcaatggcacacttggctggattccgtccgacaactcgatctgtgtacaggaagactgtcgcatccctcaaattgaggacgctgagatacacaataaaacgtatagacatggtgagaagctgatcatcacttgccacgaagggttcaaaatccgctaccctgatctgcacaatatggtttccttgtgtcgggacgacggcacgtggaacaatctgccgatctgccaaggatgtctccgccccctggcaagttctaacgggtatgttaacatttctgaactgcagacttcattccccgtgggcactgtgattagctacagatgttttcctggctttaagctggatggatcagcgtacctggagtgtctccaaaacttaatatggagctcctctccaccgcggtgcctcgctctagaggtctgtccactgccaccgatggtatcacatggagacttcgtatgtcatccacgcccatgtgagcggtataaccatggcaccgtggtagagttttattgtgatcccggttattctctcacaagtgactacaagtatatcacttgtcaatacggagagtggttcccatcctatcaggtctactgtattaagagcgagcagacctggcccagtacccacgaaactctgttaacaacctggaaaatagttgcttttaccgcgacaagtgtgctactcgtgttactgttagtgatcctggcgaggatgttccagactaagtttaaggcacatttcccaccaagaggcccgccacgtagcagctcatccgaccctgattttgtggtggtggacggagtccctgtgatgctgcccagttatgatgaagcggtgtctgggggcctgtcagccctggggcctggctatatggcctcagtgggccagggttgcccgctccccgtcgatgatcagtctccccccgcataccccggcagtggggacaccgacacaggacctggcgagtcagaaacatgcgatagtgtgtctggctcgagcgagctcctacagagcttatattcgcccccgcgctgtcaggaaagtacacatccagcatccgataatccagacatcatcgcttccaccgctgaggaggtagcaagcacttcacccggcatcgatatcgctgacgaaatccctctgatggaagaggacccctag

SEQ ID NO: 196010 - DNA, 1473 bp, Artificial Sequence
  derived and/or modified sequence
atgtaccacggcatgaaccccagcaacggcgacggcttcctggagcagcagcagcagcagcagcagccccagtccccacagaggctgcttgccgtcatcctttggttccagctcgcgttgtgcttcgggcctgcgcagttgaccggcggttttgatgacctacaggtctgcgccgatcctgggatacccgaaaacggtttccgaacaccttcaggaggggtgttttttgaggggtctgttgcacggtttcattgtcaggacgggttcaaactcaaaggcgctaccaaacggttgtgcctgaaacattttaatggaactctgggctggattcctagcgacaatagcatctgcgtgcaagaggactgtcgcatccctcagatcgaagatgccgaaatccacaataaaacgtatagacacggggaaaagctcataattacatgtcacgagggcttcaaaattagatatccagacctccacaatatggtgtccctctgtcgcgatgacggaacttggaataacctgcctatttgccaagggtgcctgcgcccactggcctcctctaatgggtacgtcaacatatccgagctgcaaacttcatttccggtgggtacagtgatctcataccgctgcttcccaggttttaagctagatggctcggcatacttggaatgtcttcagaaccttatctggtcctctagccctccccggtgtttggccctggaggtgtgtccattgccccccatggtttcccacggcgacttcgtgtgtcaccccaggccctgtgagcggtataatcacggtactgtggtagaattttactgcgatccgggatattccttaacctctgattacaaatatatcacttgccagtatggagagtggtttccctcctatcaggtctactgtattaagagcgagcagacttggccatcaacacacgagaccttgctcaccacatggaaaatcgtcgcatttacagctacatccgtgttacttgtgcttctgcttgtcattctcgcccgaatgttccagactaagtttaaagcccacttcccaccccggggccctcctcgttcctcttctagcgatccagattttgttgtggttgatggggtgcccgtcatgcttccatcctacgacgaggccgtgtctgggggactgtctgcccttggcccgggatacatggcctctgtgggccaggggtgtcctcttccagtcgacgaccagtcgccccccgcttatcctggttcaggagatacggacaccggacccggggaaagtgagacatgtgattccgttagcggctcctcagaactgcttcagtctctctacagtccacctagatgtcaggagtcaacccaccccgccagtgacaaccccgacatcatcgccagcacagccgaagaggtggcctccacgtctcctggcatcgacatagccgatgagattccgctgatggaagaagacccctag

SEQ ID NO: 196011 - DNA, 1473 bp, Artificial Sequence
  derived and/or modified sequence
atgtatcacggcatgaacccctcaaatggcgatggtttcttggagcagcagcaacagcagcagcaaccccaatcaccccagcgcctcctggcggtgatcctctggttccagctcgccctttgcttcgggcctgcacaactcaccgggggatttgacgacctgcaggtttgcgccgatcccggtatcccagagaatggctttcgcaccccttcaggaggcgtattcttcgagggtagcgtcgctcgctttcattgtcaggatggattcaagctaaagggggcaaccaagcggctgtgtctgaaacacttcaacggcaccttggggtggatcccttccgacaattcgatctgcgtgcaagaggattgtagaattcctcaaatcgaggatgctgagatccacaacaagacgtaccgccacggagagaagctaatcattacctgtcacgaaggctttaaaattcggtacccggacctccataatatggtcagcctgtgcagagatgacggaacttggaacaacctgccaatttgccagggctgtctaaggccactggcctcatcgaatggatatgtgaacatcagtgaacttcagacatcgttccccgtaggtaccgtcatttcttaccgatgcttcccgggattcaaattggacggctcggcgtatttagagtgcctgcagaacctcatctggtcaagcagtccacccagatgtctcgccctggaagtatgcccattgccccctatggtgtcacacggcgactttgtctgccatcctagaccctgcgagcggtacaatcacggaaccgtagtggagttttattgcgatccgggatatagcttgacaagcgactataaatatatcacctgccaatatggcgagtggtttcccagttatcaggtctactgcatcaagagcgagcaaacatggccaagtacacacgagaccctgctaacaacctggaaaattgtagcatttacagccacatcagtgctgctggtattactgctggtaattctcgctcgaatgtttcagaccaagtttaaggcgcacttccctccaagaggccctccccgatcttcctcctcagatccggactttgtggttgtggatggcgtgccagtcatgctcccttcctacgatgaggccgtctcagggggactgtctgcacttggccctggatacatggcaagcgtcggacagggatgcccgctccccgtcgatgaccagagccctccagcctatcccggatccggcgacactgataccggaccaggagaatcagagacgtgtgattccgtctccggctcctctgagctcctgcagagtctgtattcgccaccacgatgtcaggagagcacgcaccccgcttcagataaccccgacatcattgcttccaccgccgaagaggtcgcatccacctcaccaggtattgacattgcggacgagatacctctgatggaagaagatccgtag

SEQ ID NO: 196012 - DNA, 1473 bp, Artificial Sequence
  derived and/or modified sequence
atgtatcacggcatgaatccatcgaatggggacggctttctagaacagcagcaacagcagcagcagccacaatctccccaacgcctgttagccgtgatcctgtggtttcaacttgcattatgtttcgggccagcgcagctcaccggcggttttgacgatctgcaagtctgcgctgaccctggtatacccgaaaatgggttccgcaccccttcggggggtgtcttcttcgaagggtcagtagctcgctttcactgtcaagatgggttcaaactgaagggcgcaactaagcgcttatgtctgaaacactttaacgggacactggggtggatcccctctgataactcaatatgtgttcaggaagactgtcggattccccagatcgaggatgccgaaattcacaacaaaacatacagacacggggagaaactcataatcacctgtcacgagggattcaaaatccggtatccagatctgcataatatggtgtccttgtgccgggacgacggcacctggaataacctaccgatatgccagggctgtctgcgccctcttgcctctagtaatggatatgtgaatatctcagagctacaaacatcatttcccgtcggaacagttatcagctacagatgttttcctgggtttaaactggacggctcagcttacctggaatgtctgcaaaatctgatttggtcatcctcccctccgaggtgcctcgcgctggaagtatgtcctctacctccgatggtcagtcacggtgattttgtctgtcaccccagaccttgcgaaagatataatcacggcactgtggtggagttctattgcgatcccggatatagccttacttctgactacaaatacatcacatgccagtatggcgaatggtttcctagttatcaggtatattgcatcaagtctgagcaaacgtggcccagcactcacgaaacacttctgacaacatggaagatcgtggcttttacggccacaagtgtgttgctcgtgctgctcctagtgatccttgcaaggatgtttcagaccaagtttaaagcgcacttccccccaagaggtccgcctcgcagctcgtcatccgatccagattttgtcgtggtggatggagtccccgtgatgctgccgagttacgacgaggccgttagcggcggactttcagcccttgggcctggctacatggcttctgtcggccaggggtgcccactgccagtggacgatcagagtcctcctgcgtaccctggcagcggagatacggataccggcccaggcgagtccgagacttgcgactctgtgtcaggcagttccgagcttcttcagtcattatacagtcccccacgctgccaggaaagtacacaccctgccagtgacaaccccgatatcattgcttcaacggcagaggaagtcgcaagcacttccccgggaatcgatatcgctgatgagatcccattgatggaagaagatccttag

SEQ ID NO: 196013 - DNA, 3480 bp, Artificial Sequence
  derived and/or modified sequence
caggtaagaccgacagtcccggaagggtcttccattccgaggaggcgcgcgcaggccggggagggggagttggtgcctggtgcagctccccaagggagaattttttttttttttttgacagcgcagagaaatctcactggggactggggcagtaggatcgatcccaatcccgaggaaaaccagagaagtagctgggggagacggtgccacattgtgagattcccagagtgaaatgtataggcccagggaaaagtgtcttcgcggccccgagacgcggggaggctctagactttcctgtggtgggcacagctgctgaatcccggggaccggcgcggagccaatgtgcgctaacccctgccctccctcctgtcctccatcccccagcacgcgcagcatcccacggcggctgttactcagtgcacccggctcgggggaaggcgggggacctcgccgtgggaaagggggcgggggccgcgcgggggaggaaccaggatggagcctgggaagccgaggcgccgggtcccagagcggaggagggggagcgtggcccccgagcccggacagactggcttattgtggtgttccgcttctggttgcagactcttgcaagctggatgccctctgtggatgaaagatgtatcatggaatgaacccgagcaatggagatggatttctagagcagcagcagcagcagcagcaacctcagtccccccagagactcttggccgtgatcctgtggtttcagctggcgctgtgcttcggccctgcacagctcacgggcgggttcgatgaccttcaagtgtgtgctgaccccggcattcccgagaatggcttcaggacccccagcggaggggttttctttgaaggctctgtagcccgatttcactgccaagacggattcaagctgaagggcgctacaaagagactgtgtttgaagcattttaatggaaccctaggctggatcccaagtgataattccatctgtgtgcaagaagattgccgtatccctcaaatcgaagatgctgagattcataacaagacatatagacatggagagaagctaatcatcacttgtcatgaaggattcaagatccggtaccccgacctacacaatatggtttcattatgtcgcgatgatggaacgtggaataatctgcccatctgtcaaggctgcctgagacctctagcctcttctaatggctatgtaaacatctctgagctccagacctccttcccggtggggactgtgatctcctatcgctgctttcccggatttaaacttgatgggtctgcgtatcttgagtgcttacaaaaccttatctggtcgtccagcccaccccggtgccttgctctggaagtctgtccactacctccaatggtgagtcacggagatttcgtctgccacccgcggccttgtgagcgctacaaccacggaactgtggtggagttttactgcgatcctggctacagcctcaccagcgactacaagtacatcacctgccagtatggagagtggtttccttcttatcaagtctactgcatcaaatcagagcaaacgtggcccagcacccatgagaccctcctgaccacgtggaagattgtggcgttcacggcaaccagtgtgctgctggtgctgctgctcgtcatcctggccaggatgttccagaccaagttcaaggcccactttccccccagggggcctccccggagttccagcagtgaccctgactttgtggtggtagacggcgtgcccgtcatgctcccgtcctatgacgaagctgtgagtggcggcttgagtgccttaggccccgggtacatggcctctgtgggccagggctgccccttacccgtggacgaccagagccccccagcataccccggctcaggggacacggacacaggcccaggggagtcagaaacctgtgacagcgtctcaggctcttctgagctgctccaaagtctgtattcacctcccaggtgccaagagagcacccaccctgcttcggacaaccctgacataattgccagcacggcagaggaggtggcatccaccagcccaggcatcgacattgcagatgagattcctctaatggaagaagatccctaatatgggtcaagatccagatgactctcctgctccttcggggaaaggaccttgtatcttggagtgaggtcacagaaggatagagcctgggggcaaaatgtctaacttgtctacatggggaccacagttcacattatgcatctcaggctccacagtgaggctgacaaactgcaatggcagtgcttttaaatgagatttgaggattcaccaagacccatggggaaccggggcagcagggaagccctcgcgtggtcttggatgaggggtgttaaatgtgtatcgtgctgtggaacatgggacaattccacgcacatcccaccgaatcatcacgcatcccattgactggcaagtactccccgccccctctgaaagcatgtcacatcatgtaaatttgcttctaacatctgcttcaaactgtctctggactccaaatttggatgggtcagcctctgcagaaagtttgtgttgagatgctggaagaacagcagagcctcctgcaccctcagcaagggaccagctcccaaaggaaaggtccttgtgtgacatttggagaatcttccttcatccagacaactctactcgaagcaagacgaaagcaggatgtggcagttgcagtgagaaaggaaaggaaagatgggcagactctgctttctggaaatttcttcacaaagtagagctcatgaactctgtgctgtcttctggtaacatatcatcagtgtttgtattcatggtgtggcacatggatccatggcattgggtaaatctggtggtttttacacatggtcagaatgtgttcaaatacatctcatgatggagacagtaaccaaggtaatgttttgtttcagcattttaaaaagactccacttaacatttatctcagaatcatgagcctctctctagttgacaattgtcattgttcccccagccccaaattgaaccatacatttattttccaaaacagaaattgtttctgtaaacatatccgaccttcaaaagaagtgtgaggttggatttttcccccttttatttgtcctaagattccaggaggctggcctcccagcccagatagctcagccacctcacctgcctatcattcctgcattcctactttgagggtctcatcatgcccactgggtgttgttcctaagaaactgattgattaaaaaatttcccaaagtgtcctgaagtgtctcttcaaatacatgttgatctgtggagttgattcctttccttctcttggttttagacaaatgtaaacaaagctctgatccttaaaattgctatgctgatagagtggtgagggctggaagcttgatcaagtcctgtttcttcttgacacagactgattaaaaattaaaagaaaatgacagtttgaa

SEQ ID NO: 196014 - DNA, 3025 bp, Artificial Sequence
  derived and/or modified sequence
gggagctggagccgagcgccgccgccgaagcttccgtctcgctcgctcgcgcagcggcggcagcagaggtcgcgcacagatgcgggttagactggcggggggaggaggcggaggagggaaggaagctgcatgcatgagacccacagactcttgcaagctggatgccctctgtggatgaaagatgtatcatggaatgaacccgagcaatggagatggatttctagagcagcagcagcagcagcagcaacctcagtccccccagagactcttggccgtgatcctgtggtttcagctggcgctgtgcttcggccctgcacagctcacgggcgggttcgatgaccttcaagtgtgtgctgaccccggcattcccgagaatggcttcaggacccccagcggaggggttttctttgaaggctctgtagcccgatttcactgccaagacggattcaagctgaagggcgctacaaagagactgtgtttgaagcattttaatggaaccctaggctggatcccaagtgataattccatctgtgtgcaagaagattgccgtatccctcaaatcgaagatgctgagattcataacaagacatatagacatggagagaagctaatcatcacttgtcatgaaggattcaagatccggtaccccgacctacacaatatggtttcattatgtcgcgatgatggaacgtggaataatctgcccatctgtcaaggctgcctgagacctctagcctcttctaatggctatgtaaacatctctgagctccagacctccttcccggtggggactgtgatctcctatcgctgctttcccggatttaaacttgatgggtctgcgtatcttgagtgcttacaaaaccttatctggtcgtccagcccaccccggtgccttgctctggaagtctgtccactacctccaatggtgagtcacggagatttcgtctgccacccgcggccttgtgagcgctacaaccacggaactgtggtggagttttactgcgatcctggctacagcctcaccagcgactacaagtacatcacctgccagtatggagagtggtttccttcttatcaagtctactgcatcaaatcagagcaaacgtggcccagcacccatgagaccctcctgaccacgtggaagattgtggcgttcacggcaaccagtgtgctgctggtgctgctgctcgtcatcctggccaggatgttccagaccaagttcaaggcccactttccccccagggggcctccccggagttccagcagtgaccctgactttgtggtggtagacggcgtgcccgtcatgctcccgtcctatgacgaagctgtgagtggcggcttgagtgccttaggccccgggtacatggcctctgtgggccagggctgccccttacccgtggacgaccagagccccccagcataccccggctcaggggacacggacacaggcccaggggagtcagaaacctgtgacagcgtctcaggctcttctgagctgctccaaagtctgtattcacctcccaggtgccaagagagcacccaccctgcttcggacaaccctgacataattgccagcacggcagaggaggtggcatccaccagcccaggcatcgacattgcagatgagattcctctaatggaagaagatccctaatatgggtcaagatccagatgactctcctgctccttcggggaaaggaccttgtatcttggagtgaggtcacagaaggatagagcctgggggcaaaatgtctaacttgtctacatggggaccacagttcacattatgcatctcaggctccacagtgaggctgacaaactgcaatggcagtgcttttaaatgagatttgaggattcaccaagacccatggggaaccggggcagcagggaagccctcgcgtggtcttggatgaggggtgttaaatgtgtatcgtgctgtggaacatgggacaattccacgcacatcccaccgaatcatcacgcatcccattgactggcaagtactccccgccccctctgaaagcatgtcacatcatgtaaatttgcttctaacatctgcttcaaactgtctctggactccaaatttggatgggtcagcctctgcagaaagtttgtgttgagatgctggaagaacagcagagcctcctgcaccctcagcaagggaccagctcccaaaggaaaggtccttgtgtgacatttggagaatcttccttcatccagacaactctactcgaagcaagacgaaagcaggatgtggcagttgcagtgagaaaggaaaggaaagatgggcagactctgctttctggaaatttcttcacaaagtagagctcatgaactctgtgctgtcttctggtaacatatcatcagtgtttgtattcatggtgtggcacatggatccatggcattgggtaaatctggtggtttttacacatggtcagaatgtgttcaaatacatctcatgatggagacagtaaccaaggtaatgttttgtttcagcattttaaaaagactccacttaacatttatctcagaatcatgagcctctctctagttgacaattgtcattgttcccccagccccaaattgaaccatacatttattttccaaaacagaaattgtttctgtaaacatatccgaccttcaaaagaagtgtgaggttggatttttcccccttttatttgtcctaagattccaggaggctggcctcccagcccagatagctcagccacctcacctgcctatcattcctgcattcctactttgagggtctcatcatgcccactgggtgttgttcctaagaaactgattgattaaaaaatttcccaaagtgtcctgaagtgtctcttcaaatacatgttgatctgtggagttgattcctttccttctcttggttttagacaaatgtaaacaaagctctgatccttaaaattgctatgctgatagagtggtgagggctggaagcttgatcaagtcctgtttcttcttgacacagactgattaaaaattaaaagaaaatgacagtttg

SEQ ID NO: 196015 - DNA, 1775 bp, Artificial Sequence
  derived and/or modified sequence
acagatgcgggttagactggcggggggaggaggcggaggagggaaggaagctgcatgcatgagacccacagactcttgcaagctggatgccctctgtggatgaaagatgtatcatggaatgaacccgagcaatggagatggatttctagagcagcagcagcagcagcagcaacctcagtccccccagagactcttggccgtgatcctgtggtttcagctggcgctgtgcttcggccctgcacagctcacgggcgggttcgatgaccttcaagtgtgtgctgaccccggcattcccgagaatggcttcaggacccccagcggaggggttttctttgaaggctctgtagcccgatttcactgccaagacggattcaagctgaagggcgctacaaagagactgtgtttgaagcattttaatggaaccctaggctggatcccaagtgataattccatctgtgtgcaagaagctgcttctgcaagactggagcctgcatgaccccaagcatgggtgaaaatgtctatggcccagggaacagaggaggtgacctatatggtggagaggagaccctagaattggcaaaggactgaaaatacaccccgtgggcgcagggctgctgacctaattgccgtatccctcaaatcgaagatgctgagattcataacaagacatatagacatggagagaagctaatcatcacttgtcatgaaggattcaagatccggtaccccgacctacacaatatggtttcattatgtcgcgatgatggaacgtggaataatctgcccatctgtcaaggctgcctgagacctctagcctcttctaatggctatgtaaacatctctgagctccagacctccttcccggtggggactgtgatctcctatcgctgctttcccggatttaaacttgatgggtctgcgtatcttgagtgcttacaaaaccttatctggtcgtccagcccaccccggtgccttgctctggaagtctgtccactacctccaatggtgagtcacggagatttcgtctgccacccgcggccttgtgagcgctacaaccacggaactgtggtggagttttactgcgatcctggctacagcctcaccagcgactacaagtacatcacctgccagtatggagagtggtttccttcttatcaagtctactgcatcaaatcagagcaaacgtggcccagcacccatgagaccctcctgaccacgtggaagattgtggcgttcacggcaaccagtgtgctgctggtgctgctgctcgtcatcctggccaggatgttccagaccaagttcaaggcccactttccccccagggggcctccccggagttccagcagtgaccctgactttgtggtggtagacggcgtgcccgtcatgctcccgtcctatgacgaagctgtgagtggcggcttgagtgccttaggccccgggtacatggcctctgtgggccagggctgccccttacccgtggacgaccagagccccccagcataccccggctcaggggacacggacacaggcccaggggagtcagaaacctgtgacagcgtctcaggctcttctgagctgctccaaagtctgtattcacctcccaggtgccaagagagcacccaccctgcttcggacaaccctgacataattgccagcacggcagaggaggtggcatccaccagcccaggcatcgacattgcagatgagattcctctaatggaagaagatccctaatatgggtcaagatccagatgactctcctgctccttcgggga

SEQ ID NO: 196016 - protein, 446 aa, Artificial Sequence
  derived and/or modified sequence
MEAEAADAPPGGVESALSCFSFNQDCTSLATGTKAGYKLFSLSSVEQLDQVHGSNEIPDVYIVERLFSSSLVVVVSHTKPRQMNVYHFKKGTEICNYSYSSNILSIRLNRQRLLVCLEESIYIHNIKDMKLLKTLLDIPANPTGLCALSINHSNSYLAYPGSLTSGEIVLYDGNSLKTVCTIAAHEGTLAAITFNASGSKLASASEKGTVIRVFSVPDGQKLYEFRRGMKRYVTISSLVFSMDSQFLCASSNTETVHIFKLEQVTNSRPEEPSTWSGYMGKMFMAATNYLPTQVSDMMHQDRAFATARLNFSGQRNICTLSTIQKLPRLLVASSSGHLYMYNLDPQDGGECVLIKTHSLLGSGTTEENKENDLRPSLPQSYAATVARPSASSASTVPGYSEDGGALRGEVIPEHEFATGPVCLDDENEFPPIILCRGNQKGKTKQS

SEQ ID NO: 196017 - protein, 364 aa, Artificial Sequence
  derived and/or modified sequence
MNVYHFKKGTEICNYSYSSNILSIRLNRQRLLVCLEESIYIHNIKDMKLLKTLLDIPANPTGLCALSINHSNSYLAYPGSLTSGEIVLYDGNSLKTVCTIAAHEGTLAAITFNASGSKLASASEKGTVIRVFSVPDGQKLYEFRRGMKRYVTISSLVFSMDSQFLCASSNTETVHIFKLEQVTNSRPEEPSTWSGYMGKMFMAATNYLPTQVSDMMHQDRAFATARLNFSGQRNICTLSTIQKLPRLLVASSSGHLYMYNLDPQDGGECVLIKTHSLLGSGTTEENKENDLRPSLPQSYAATVARPSASSASTVPGYSEDGGALRGEVIPEHEFATGPVCLDDENEFPPIILCRGNQKGKTKQS

SEQ ID NO: 196018 - DNA, 1341 bp, Artificial Sequence
  derived and/or modified sequence
atggaggccgaggccgccgacgccccccccggcggcgtggagagcgccctgagctgcttcagcttcaaccaggactgcaccagcctggccaccggcaccaaggccggctacaagctgttcagcctgagcagcgtggagcagctggaccaggtgcacggcagcaacgagatccccgacgtgtacatcgtggagagactgttcagcagcagcctggtggtggtggtgagccacaccaagcccagacagatgaacgtgtaccacttcaagaagggcaccgagatctgcaactacagctacagcagcaacatcctgagcatcagactgaacagacagagactgctggtgtgcctggaggagagcatctacatccacaacatcaaggacatgaagctgctgaagaccctgctggacatccccgccaaccccaccggcctgtgcgccctgagcatcaaccacagcaacagctacctggcctaccccggcagcctgaccagcggcgagatcgtgctgtacgacggcaacagcctgaagaccgtgtgcaccatcgccgcccacgagggcaccctggccgccatcaccttcaacgccagcggcagcaagctggccagcgccagcgagaagggcaccgtgatcagagtgttcagcgtgcccgacggccagaagctgtacgagttcagaagaggcatgaagagatacgtgaccatcagcagcctggtgttcagcatggacagccagttcctgtgcgccagcagcaacaccgagaccgtgcacatcttcaagctggagcaggtgaccaacagcagacccgaggagcccagcacctggagcggctacatgggcaagatgttcatggccgccaccaactacctgcccacccaggtgagcgacatgatgcaccaggacagagccttcgccaccgccagactgaacttcagcggccagagaaacatctgcaccctgagcaccatccagaagctgcccagactgctggtggccagcagcagcggccacctgtacatgtacaacctggacccccaggacggcggcgagtgcgtgctgatcaagacccacagcctgctgggcagcggcaccaccgaggagaacaaggagaacgacctgagacccagcctgccccagagctacgccgccaccgtggccagacccagcgccagcagcgccagcaccgtgcccggctacagcgaggacggcggcgccctgagaggcgaggtgatccccgagcacgagttcgccaccggccccgtgtgcctggacgacgagaacgagttcccccccatcatcctgtgcagaggcaaccagaagggcaagaccaagcagagctag

SEQ ID NO: 196019 - DNA, 1341 bp, Artificial Sequence
  derived and/or modified sequence
atggaggcggaggcagcggacgcgcctccggggggagtcgagtcagctctgagttgtttctcatttaatcaggactgtacatccctcgccactgggacgaaggctggctacaaattgttctctctgagttctgtggagcagctggaccaggttcatggcagcaacgaaatcccagatgtctacatagtggagagactgttttccagttcgctcgtcgtcgtggtatcacatactaaacctcgccaaatgaatgtctaccactttaagaagggaaccgaaatctgtaattatagttattcatccaatatcctgtcgatccgtctgaaccggcagcggctgttggtgtgtctcgaggaaagcatatatattcacaatattaaggacatgaagctgcttaagactctcctggacattccagctaatcccacagggctctgcgcacttagtattaaccactctaactcttacctagcctaccccggatccctgactagtggtgaaattgtgctgtatgatgggaattctctgaaaacagtctgcaccattgcagcccatgaaggcactctggccgccatcacgttcaacgcgagtggcagcaaactggcttctgcttcggaaaaagggacggtgatcagggttttttctgtccctgacggtcaaaagctttacgagttcagacgaggcatgaagcgatacgttactatctcttctctcgtgttctcgatggatagccaatttctttgcgcatcctctaacacagagactgttcatatttttaagttggagcaagtgactaacagtcggccagaggaaccaagcacgtggtccggttatatgggaaaaatgtttatggcggcaaccaactacctgcccacacaagtgtccgacatgatgcatcaggacagggcctttgctaccgctagactgaacttcagtgggcagcggaacatatgtacactctcaaccattcagaagctaccccggcttctcgtggcgtccagctcaggtcatctgtatatgtataacctggatccacaagatggcggtgaatgcgtactgatcaagacccatagcttgctggggtctggcactacagaggaaaacaaggaaaacgatctcagaccgtcattgccccagtcgtacgcggccactgttgcgagaccttcggcgtctagcgcctctacagtgccagggtacagtgaggatggaggagccctcagaggtgaagttatccctgaacacgagtttgcgaccggtccggtgtgccttgacgacgagaatgaatttccccctattatcctgtgtagggggaatcagaaaggaaagacaaagcagagttag

SEQ ID NO: 196020 - DNA, 1341 bp, Artificial Sequence
  derived and/or modified sequence
atggaggccgaggccgcagatgcccctcctgggggcgtggagagcgccctgagctgcttctccttcaaccaggactgcaccagcctggccaccggcaccaaggccggctacaagctgttcagcctgagctctgtggagcagctggaccaggtgcacggcagcaatgagatcccagatgtgtacatcgtggagcggctcttcagcagcagcctggtggtggtggtgagccacaccaagccccggcagatgaatgtgtaccacttcaagaagggcacagagatctgcaactacagctacagcagcaacatcctgagcatccggctgaaccggcagaggctgctggtgtgcctggaggagagcatctacatccacaacatcaaggacatgaagctgctgaagaccctgctggacatcccagccaaccccaccggcctgtgtgccctgagcatcaaccacagcaacagctacctggcctacccaggcagcctgaccagcggggagatcgtgctgtatgatggcaacagcctgaagacagtgtgcaccatcgccgcccacgagggcaccctggccgccatcaccttcaatgccagcggcagcaagctggccagcgccagcgagaagggcaccgtcatccgggtcttctctgtgcctgatggccagaagctgtatgagttccggcggggcatgaagcgctacgtgaccatcagcagcctggtgttctccatggacagccagttcctgtgtgccagcagcaacacagaaacagtgcacatcttcaagctggagcaggtgaccaacagcaggcctgaggagcccagcacctggagcggctacatgggcaagatgttcatggccgccaccaactacctgcccacccaggtgtctgacatgatgcaccaggaccgggcctttgccacagcccggctgaacttcagcggccagaggaacatctgcaccctgagcaccatccagaagctgccccggctgctggtggccagcagcagcggccacctgtacatgtacaacctggacccccaggatggaggagaatgtgtgctgatcaagacccacagcctgctgggcagcggcaccacagaggagaacaaggaaaatgacctgcggcccagcctgccccagagctatgctgccaccgtggcccggcccagcgccagcagcgccagcacagtgcccggctacagtgaagatggaggagccctgcggggggaggtgattcctgagcacgagtttgccaccggccctgtgtgcctggatgatgaaaatgagttcccccccatcatcctgtgccggggcaaccagaagggcaagaccaagcagagctag

SEQ ID NO: 196021 - DNA, 1341 bp, Artificial Sequence
  derived and/or modified sequence
atggaggccgaggccgccgacgccccccccggcggcgtggagagcgccctgagctgtttctcattcaatcaggattgcacttctctggccacagggaccaaggccggatacaagttgtttagcctgtcctccgtcgagcagctcgatcaggtgcacgggtctaacgaaattcccgacgtgtatatagtagagcgtctgttttcctcctccctggtggtcgtggtttcgcatacgaaaccccgacagatgaacgtctatcactttaagaaagggactgaaatctgtaattattcctacagctcaaacatcctgtccatccgtctgaaccgccagcggctgttagtgtgcctggaagaatcaatctatatccataatatcaaagatatgaagctacttaaaaccctgctggatatccctgcgaaccctactgggctgtgtgccctgagtataaatcatagcaatagttacctcgcttatccgggcagcttgacctccggggagattgttctgtacgatggcaacagccttaagacagtctgtactatcgctgctcatgagggtaccctggccgctatcacatttaatgccagtggatctaagctcgcaagcgcttctgaaaaaggcactgtcatccgggtgttctccgtgcccgatggccagaaattatacgagttcagaaggggtatgaaaaggtacgtaacgatctcttctttggtcttttctatggacagccagttcttgtgtgccagcagcaacactgaaacagtgcatatcttcaagctcgaacaggtgactaactcaaggcccgaagaaccttccacatggagcggatacatgggcaaaatgttcatggccgctaccaactatctgcccacacaggtgtcagatatgatgcaccaggacagggcctttgccacagctagattgaatttctctggtcagaggaatatctgcacactctcgaccatccaaaagttgcccaggctccttgtggccagttcctctggccacctgtatatgtacaacctcgatcctcaggacggcggtgagtgtgtcctgatcaagactcacagtctgcttggttctggcacaactgaggagaataaggagaatgatcttcgtcctagcctgccacagtcctatgccgccactgtggctagaccatcagcttcctctgcctctacagttcctggctattccgaggacggcggggcgcttcggggcgaagtgataccggagcatgagtttgcaacagggccagtgtgcctggacgacgagaacgagttcccgccaatcattctatgtaggggcaaccagaaggggaaaacgaagcagagctag

SEQ ID NO: 196022 - DNA, 1341 bp, Artificial Sequence
  derived and/or modified sequence
atggaagctgaagcagcggatgctccacctggaggtgttgagtccgctctgtcttgtttcagctttaatcaggattgtaccagtttagccactggaaccaaggcaggctataagctgttcagcctatcatcggtggaacagcttgatcaggtacacggctcaaacgagatacctgatgtgtacattgttgagagactgttcagcagttccctcgtcgtggtggtatcacataccaaaccaaggcagatgaacgtgtatcactttaagaagggcacagagatctgtaactactcatatagctccaatatcctgagtatccggctcaacaggcagcgtctgctcgtgtgtctggaagagtcaatctatatccataatataaaagacatgaaactcctcaagacgttgttagatatcccggcaaatccaacaggtttatgcgcactgtccatcaaccactcaaatagttacctagcttaccccggttccttaacctcaggggagattgtgctctacgatggcaactctctgaagacagtgtgtaccatcgcggctcacgagggcacgctcgctgccattacgttcaacgcttcaggatctaagctggccagcgcgagtgaaaaggggacagtcattcgcgttttctcagtaccagatgggcagaagctttatgagttcaggagaggcatgaagcgctatgtgacaatctccagcctagtgttttccatggacagccaatttctttgcgcttctagcaacaccgagaccgtgcacatcttcaagctagagcaggtgacaaattccaggccagaggaaccgtcaacttggagcggttacatggggaagatgtttatggctgccactaattatctccccacacaggtgagcgatatgatgcatcaggacagagcctttgcgacagccaggctgaatttcagcggacaaagaaatatctgtacactaagtacgattcagaaattacctcggctactggtggcatccagtagcggacatttatatatgtataatctcgatccacaggatggcggagagtgcgtcttaattaaaactcattccctactgggatccggtacaactgaggaaaataaagaaaacgatctgcggccttctctgccgcaaagctacgccgcaaccgtagcgagacccagtgcctcctctgcctcaaccgtacccggttactccgaggacgggggtgccctacgaggggaagtgattcctgagcatgagttcgccacaggtccagtgtgtctggatgacgaaaacgaattccctccgattatactgtgcagaggtaaccaaaaggggaaaaccaagcagtcttag

SEQ ID NO: 196023 - DNA, 1923 bp, Artificial Sequence
  derived and/or modified sequence
accggcgacccggcccgtggagccggcgcgggcgggctgctgaggtggctgtcgccggctccgagctgcggcttcccgggccgagcccccgatggaggccgaggccgcggacgctcccccgggcggggttgagtcggcgctcagctgcttctctttcaaccaggactgcacatccctagcaactggaactaaagccgggtataagctgttttctctgagttctgtggagcagctggatcaagtccacggaagcaatgaaatcccggacgtctacatcgtggagcgcctcttctccagcagcctggtggtggtagtcagtcacacaaaaccacggcagatgaacgtgtatcacttcaagaaaggcacagagatctgtaattacagctactccagcaacatcttgtccataaggctgaaccggcaaaggctgctggtttgcctagaagagtccatttatattcacaacattaaagacatgaagctgttgaagaccctcctggatattcctgcaaacccaacaggtctatgtgctctctctatcaaccattccaattcttacctggcctatcctggaagcctgacttcaggggagattgtgctttatgatggaaactccctgaaaacagtctgcactattgctgcccatgagggaacactagctgccatcaccttcaatgcctcaggctccaaactagcaagtgcgtctgaaaaaggcacagtcatccgggtgttctctgtccctgatgggcaaaagctctatgagttccggagagggatgaaaaggtatgtgacaatcagctctctagtgttcagtatggattcacaattcctctgcgcctccagtaacaccgagacggtacacatcttcaagctggaacaggtcaccaacagtcgaccagaagagccttcgacctggagtggctacatgggaaagatgtttatggctgctaccaactacctccctacccaggtgtcagacatgatgcatcaggacagggcttttgccactgcacgcttgaacttctccggacagaggaacatctgtaccctctcaacgatccagaagttgccacggctgctagttgcgtcatccagtggacacctttatatgtacaatttggatcctcaggatggaggagagtgtgtcttaatcaaaacccacagcttgcttggctcaggaacaacagaagagaataaagaaaatgacctcagaccttccttacctcagtcttatgcagcgaccgtagccagaccaagtgcatcttcagcctccacggtgccaggttattctgaggacggcggggcgctgcgaggagaagttattcctgaacatgagtttgcgacgggaccagtgtgtcttgatgatgagaatgagtttcctcctataatcttgtgccgtggaaatcagaagggcaaaacgaagcagtcatgatgagaagcacacctcagaaatcaggacatcccccctatcaggtggttttggagaaaacaaggaaggcggaagaatggagtgcaattgtgtgagcagaaaggggggcaggaatcccgggtgctccactgcttaaaccacaggacctggttaactcctcaccaagcttcccacgaccctggttgccaatgggcgcgggagacattgtatacacatcatgctatttaaaatacgttcaaactatagtgtaaatgctaattaaccatattggtatataaccggaattttatattaaaaggggcctcctttttaaatatatgccgtgtaaaaaatgtacttataggaacatctctttgaattgtatttcttgtatattacatacttagagagagactcttttagccaggcaaagtcttttttggctgtggctggaataaatcatttattacttgggagtcccattttggacactaataataaaatcatggcaatgc

SEQ ID NO: 196024 - DNA, 1575 bp, Artificial Sequence
  derived and/or modified sequence
gggctgctgaggtggctgtcgccggctccgagctgcggcttcccgggccgagcccccgatggaggccgaggccgcggacgctcccccgggcggggttgagtcggcgctcagctgcttctctttcaaccaggactgcacatgaaatcccggacgtctacatcgtggagcgcctcttctccagcagcctggtggtggtagtcagtcacacaaaaccacggcagatgaacgtgtatcacttcaagaaaggcacagagatctgtaattacagctactccagcaacatcttgtccataaggctgaaccggcaaaggctgctggtttgcctagaagagtccatttatattcacaacattaaagacatgaagctgttgaagaccctcctggatattcctgcaaacccaacaggtctatgtgctctctctatcaaccattccaattcttacctggcctatcctggaagcctgacttcaggggagattgtgctttatgatggaaactccctgaaaacagtctgcactattgctgcccatgagggaacactagctgccatcaccttcaatgcctcaggctccaaactagcaagtgcgtctgaaaaaggcacagtcatccgggtgttctctgtccctgatgggcaaaagctctatgagttccggagagggatgaaaaggtatgtgacaatcagctctctagtgttcagtatggattcacaattcctctgcgcctccagtaacaccgagacggtacacatcttcaagctggaacaggtcaccaacagtcgaccagaagagccttcgacctggagtggctacatgggaaagatgtttatggctgctaccaactacctccctacccaggtgtcagacatgatgcatcaggacagggcttttgccactgcacgcttgaacttctccggacagaggaacatctgtaccctctcaacgatccagaagttgccacggctgctagttgcgtcatccagtggacacctttatatgtacaatttggatcctcaggatggaggagagtgtgtcttaatcaaaacccacagcttgcttggctcaggaacaacagaagagaataaagaaaatgacctcagaccttccttacctcagtcttatgcagcgaccgtagccagaccaagtgcatcttcagcctccacggtgccaggttattctgaggacggcggggcgctgcgaggagaagttattcctgaacatgagtttgcgacgggaccagtgtgtcttgatgatgagaatgagtttcctcctataatcttgtgccgtggaaatcagaagggcaaaacgaagcagtcatgatgagaagcacacctcagaaatcaggacatcccccctatcaggtggttttggagaaaacaaggaaggcggaagaatggagtgcaattgtgtgagcagaaaggggggcaggaatcccgggtgctccactgcttaaaccacaggacctggttaactcctcaccaagcttcccacgaccctggttgccaatgggcgcgggagacattgtatacacatcatgctatttaaaatacgttcaaactatagtgtaaatgctaattaa

SEQ ID NO: 196025 - protein, 648 aa, Artificial Sequence
  derived and/or modified sequence
MMTTLQNKEECGKGPKRIFAPPAQKSYSLLPCSPNSPKEETPGISSPETEARISLPKASLKKKEEKATMKNVPSREQEKKRKAQINKQAEKKEKEKSSLTNAEFEEIVQIVLQKSLQECLGMGSGLDFAETSCAQPVVSTQSDKEPGITASATDTDNANGEEVPHTQEISVSWEGEAAPEIRTSKLGQPDPAPSKKKSNRLTLSKRKKEAHEKVEKTQGGHEHRQEDRLKKTVQDHSQIRDQQKGEISGFGQCLVWVQCSFPNCGKWRRLCGNIDPSVLPDNWSCDQNTDVQYNRCDIPEETWTGLESDVAYASYIPGSIIWAKQYGYPWWPGMIESDPDLGEYFLFTSHLDSLPSKYHVTFFGETVSRAWIPVNMLKNFQELSLELSVMKKRRNDCSQKLGVALMMAQEAEQISIQERVNLFGFWSRFNGSNSNGERKDLQLSGLNSPGSCLEKKEKEEELEKEEGEKTDPILPIRKRVKIQTQKTKPRGLGGDAGTADGRGRTLQRKIMKRSLGRKSTAPPAPRMGRKEGQGNSDSDQPGPKKKFKAPQSKALAASFSEGKEVRTVPKNLGLSACKGACPSSAKEEPRHREPLTQEAGSVPLEDEASSDLDLEQLMEDVGRELGQSGELQHSNSDGEDFPVALFGK

SEQ ID NO: 196026 - DNA, 1947 bp, Artificial Sequence
  derived and/or modified sequence
atgatgaccaccctgcagaacaaggaggagtgcggcaagggccccaagagaatcttcgccccccccgcccagaagagctacagcctgctgccctgcagccccaacagccccaaggaggagacccccggcatcagcagccccgagaccgaggccagaatcagcctgcccaaggccagcctgaagaagaaggaggagaaggccaccatgaagaacgtgcccagcagagagcaggagaagaagagaaaggcccagatcaacaagcaggccgagaagaaggagaaggagaagagcagcctgaccaacgccgagttcgaggagatcgtgcagatcgtgctgcagaagagcctgcaggagtgcctgggcatgggcagcggcctggacttcgccgagaccagctgcgcccagcccgtggtgagcacccagagcgacaaggagcccggcatcaccgccagcgccaccgacaccgacaacgccaacggcgaggaggtgccccacacccaggagatcagcgtgagctgggagggcgaggccgcccccgagatcagaaccagcaagctgggccagcccgaccccgcccccagcaagaagaagagcaacagactgaccctgagcaagagaaagaaggaggcccacgagaaggtggagaagacccagggcggccacgagcacagacaggaggacagactgaagaagaccgtgcaggaccacagccagatcagagaccagcagaagggcgagatcagcggcttcggccagtgcctggtgtgggtgcagtgcagcttccccaactgcggcaagtggagaagactgtgcggcaacatcgaccccagcgtgctgcccgacaactggagctgcgaccagaacaccgacgtgcagtacaacagatgcgacatccccgaggagacctggaccggcctggagagcgacgtggcctacgccagctacatccccggcagcatcatctgggccaagcagtacggctacccctggtggcccggcatgatcgagagcgaccccgacctgggcgagtacttcctgttcaccagccacctggacagcctgcccagcaagtaccacgtgaccttcttcggcgagaccgtgagcagagcctggatccccgtgaacatgctgaagaacttccaggagctgagcctggagctgagcgtgatgaagaagagaagaaacgactgcagccagaagctgggcgtggccctgatgatggcccaggaggccgagcagatcagcatccaggagagagtgaacctgttcggcttctggagcagattcaacggcagcaacagcaacggcgagagaaaggacctgcagctgagcggcctgaacagccccggcagctgcctggagaagaaggagaaggaggaggagctggagaaggaggagggcgagaagaccgaccccatcctgcccatcagaaagagagtgaagatccagacccagaagaccaagcccagaggcctgggcggcgacgccggcaccgccgacggcagaggcagaaccctgcagagaaagatcatgaagagaagcctgggcagaaagagcaccgccccccccgcccccagaatgggcagaaaggagggccagggcaacagcgacagcgaccagcccggccccaagaagaagttcaaggccccccagagcaaggccctggccgccagcttcagcgagggcaaggaggtgagaaccgtgcccaagaacctgggcctgagcgcctgcaagggcgcctgccccagcagcgccaaggaggagcccagacacagagagcccctgacccaggaggccggcagcgtgcccctggaggacgaggccagcagcgacctggacctggagcagctgatggaggacgtgggcagagagctgggccagagcggcgagctgcagcacagcaacagcgacggcgaggacttccccgtggccctgttcggcaagtag

SEQ ID NO: 196027 - DNA, 1947 bp, Artificial Sequence
  derived and/or modified sequence
atgatgactactcttcagaataaggaagaatgtggcaagggcccgaagaggatcttcgcccctcctgcccaaaagtcatactccctgctcccttgctctcctaattctcccaaagaggagaccccaggaatctcctcccccgagaccgaagcccgaatttcactccctaaagctagcctgaaaaaaaaggaggaaaaagctacaatgaagaatgtcccctcccgcgaacaggagaagaaacgaaaagcacaaatcaataaacaggccgaaaaaaaggaaaaagaaaagagctccctaaccaacgccgagtttgaggagatcgttcagatcgttctacagaagtctctccaggaatgcctgggcatggggtccggcctagactttgctgaaacgtcatgcgcgcaacctgttgtcagcactcagagcgacaaggagccgggtatcacagccagtgcaacagataccgacaatgccaatggcgaggaggtgccacatacacaggaaatctccgtgagctgggaaggggaggccgcacctgaaatcaggacatccaaactggggcagcccgatcccgcgcccagtaagaaaaagtctaataggctcaccttgtctaagaggaaaaaggaagctcacgaaaaagtggaaaagacgcagggcggccatgaacaccggcaggaggaccggctcaaaaagactgtgcaggaccatagccagattcgagaccagcagaagggagaaatttccggctttggccaatgcctagtgtgggtacagtgttcgttcccgaattgcgggaaatggaggcggttgtgcggcaacatagatccttccgtgctccccgataactggtcgtgtgatcagaacaccgatgttcaatacaataggtgtgacatccccgaagagacttggacaggactggagtcagacgtggcatatgccagttacataccggggagtatcatctgggctaagcaatatggttatccctggtggcccggaatgattgagtcagatcccgatctcggagagtattttcttttcacaagccacctggatagtctgcctagtaaatatcatgtcactttcttcggcgagaccgtgtctcgagcctggatacccgtcaatatgttgaaaaattttcaggaattatctttagagctttccgtgatgaagaaacgccgtaacgactgctcccagaaacttggcgtggcactgatgatggcccaggaagccgagcaaatatctatacaggagagggtgaacctgtttggattttggtcccgcttcaacggcagcaattccaatggcgagaggaaggatctccagttaagcgggttgaacagtccaggatcatgcttggagaagaaggaaaaggaggaggaactggaaaaagaggagggagagaagaccgatcccatcctgcctatccgcaagcgagtgaagatacagacccaaaaaactaagcctagaggattgggaggcgatgccggtaccgcggacggccgtggtagaaccctgcaacggaagatcatgaagaggtctctgggccggaagtccacagcccctcccgctccacggatgggtcgtaaggaggggcaaggtaactcagattcagaccagcctggacctaaaaaaaagtttaaagcgccacagtcaaaagccttggccgcatcgttttcggaagggaaggaggtgaggactgttcctaagaacttgggcttatctgcatgcaagggcgcatgtcctagctccgcaaaagaggaaccccgacacagagagcccctgacccaggaagccggttctgtgccccttgaagacgaggccagttctgatttagatctggaacaacttatggaggacgtcggcagagagctcgggcaaagcggagagctgcaacattccaattcggatggcgaggattttcctgttgctttgtttggaaaatag

SEQ ID NO: 196028 - DNA, 1947 bp, Artificial Sequence
  derived and/or modified sequence
atgatgaccaccctgcagaacaaggaggagtgtgggaagggccccaagaggatctttgcccccccagcccagaagagctacagcctgctgccctgcagccccaacagccccaaggaggagaccccaggcatcagcagccctgagacagaggcccgcatcagcctgcccaaggccagcctgaagaagaaggaggagaaggccaccatgaagaatgtgcccagccgggagcaggagaagaagaggaaggcccagatcaacaagcaggccgagaagaaggagaaggagaagagcagcctgaccaatgctgagtttgaggagatcgtgcagatcgtgctgcagaagagcctgcaggagtgcctgggcatgggcagcggcctggactttgctgagaccagctgtgcccagcctgtggtgtccacccagagcgacaaggagcccggcatcacagccagcgccacagacacagacaatgccaatggagaggaggtgccccacacccaggagatctctgtgtcctgggagggggaggccgcccctgagatccgcaccagcaagctgggccagcctgaccctgcccccagcaagaagaagagcaaccggctgaccctgagcaagaggaagaaggaggcccacgagaaggtggagaagacccagggcggccacgagcaccggcaggaggaccggctgaagaagacagtgcaggaccacagccagatccgggaccagcagaagggggagatcagcggcttcggccagtgcctggtgtgggtgcagtgcagcttccccaactgtgggaagtggaggcggctgtgtggcaacatcgaccccagcgtgctgcctgacaactggagctgtgaccagaacacagatgtgcagtacaacagatgtgacatccctgaggagacctggacaggcctggagagtgatgtggcctatgccagctacatccctggcagcatcatctgggccaagcagtatggctacccctggtggccaggcatgattgaaagtgaccctgacctgggggagtacttcctgttcaccagccacctggacagcctgcccagcaagtaccacgtgaccttctttggagagaccgtgtcccgggcctggatccctgtgaacatgctgaagaacttccaggagctgagcctggagctgtctgtgatgaagaagagaagaaatgactgcagccagaagctgggcgtggccctgatgatggcccaggaggccgagcagatcagcatccaggagcgggtgaacctgtttggcttctggagccgcttcaacggcagcaacagcaatggagagaggaaggacctgcagctgagcggcctgaacagccctggcagctgcctggagaagaaggagaaggaggaggagctggagaaggaggagggggagaagacagaccccatcctgcccatcaggaagagggtgaagatccagacccagaagaccaagccccggggcctgggcggagatgctggaacagcagatggccggggccgcaccctgcagaggaagatcatgaagaggagcctgggcaggaagagcacagcccccccagcccccaggatgggcaggaaggagggccagggcaacagcgacagcgaccagcccggccccaagaagaagttcaaggccccccagagcaaggccctggccgccagcttcagcgagggcaaggaggtgaggacagtgcccaagaacctgggcctgagcgcctgcaagggggcctgccccagcagcgccaaggaggagcccaggcaccgggagcccctgacccaggaggccggctctgtgcccctggaggatgaggccagcagtgacctggacctggagcagctgatggaggatgtgggccgggagctgggccagagcggggagctgcagcacagcaacagtgatggagaggacttccctgtggccctgtttgggaagtag

SEQ ID NO: 196029 - DNA, 1947 bp, Artificial Sequence
  derived and/or modified sequence
atgatgaccaccctgcagaacaaggaggagtgcggcaagggccccaagcgcattttcgcaccaccagctcagaagtcctactcattgctcccctgttcgcccaattccccgaaagaagagacacccggtatttcgtcacccgagacagaagctcgcatctccctgccgaaggcctcgctcaagaaaaaggaagaaaaggccacgatgaaaaacgtgccgagccgggagcaggagaaaaaacggaaagcccagatcaataagcaagccgaaaaaaaggaaaaggagaaaagttccctgacaaatgccgagtttgaagaaattgtgcagatcgtactgcaaaagagtcttcaggaatgtttgggaatgggttccggcttagatttcgccgaaaccagttgcgctcaacccgtcgtgtcaacgcaatctgacaaggagccggggattacagctagcgccaccgatacagacaacgccaacggggaagaagtgccccacacccaggaaatctcagtatcctgggagggcgaggctgccccagagattcgcacttccaagctggggcagccagacccggctccgtctaaaaaaaagagcaacaggcttaccctctccaaacgcaagaaggaggcccatgagaaggtggaaaaaacgcaggggggccatgaacacaggcaggaagacagactgaagaagaccgttcaggaccacagccaaatcagggatcaacagaagggagagatcagcggtttcgggcaatgccttgtgtgggtgcagtgctcattccctaactgtggtaagtggagaaggctttgcggaaacattgatccctccgttttgcccgacaattggagctgcgaccaaaacacagatgtccaatacaacagatgtgacatccccgaggaaacctggactggcctggagagtgacgtagcttacgcgtcttatatccccggttccattatctgggcaaaacagtatgggtatccttggtggccgggcatgatcgaaagcgaccctgatctcggtgaatatttcctatttaccagccaccttgactctttaccgtccaaataccatgttaccttcttcggggaaacagtgtcacgcgcttggatccccgtgaacatgttaaagaactttcaagagctgagtctcgagctgtccgtcatgaaaaagagacggaacgactgctctcagaaattgggggtcgcactaatgatggcacaggaggctgaacagatctccatccaggagagggtaaacctctttggcttttggagccggtttaacgggtctaacagtaacggcgagcgaaaggacttacagctgtctggactgaactcaccaggaagctgtctagaaaaaaaggagaaggaagaggaactggaaaaggaggagggggagaagacggaccctattctgcctatacggaagcgagtaaagatccagacgcaaaagacgaaaccgcgtggcctgggaggtgatgcgggtacagccgatggccgaggacgcacgctgcagcgtaagattatgaagaggagcctcggccgcaaatccaccgcccctccagcaccacgcatggggcgtaaggagggccaaggaaactccgattccgaccaacccggcccaaaaaagaagtttaaggccccacagtcgaaagcactcgctgcatcattctccgagggcaaagaggttcggacagttccaaaaaatctgggtctgtcagcgtgcaagggggcttgccccagcagtgcgaaggaggagccccgtcaccgtgaacctctgacacaggaggctggcagtgtccctcttgaagacgaggcgtctagtgatcttgatctggagcagctgatggaagacgtgggaagggaactaggccaatcaggagagttgcagcatagcaattctgacggtgaggattttccagtggccctgtttggtaagtag

SEQ ID NO: 196030 - DNA, 1947 bp, Artificial Sequence
  derived and/or modified sequence
atgatgactactctgcagaacaaggaagaatgcggcaagggaccgaaaagaatattcgcacccccagcccagaaaagctacagcctgctaccttgttcacccaactcacccaaagaggagaccccaggtatttccagcccagagacagaagcgaggataagcctccccaaagcctctctcaaaaagaaagaagagaaagcgaccatgaagaacgtgccaagccgtgagcaggagaagaagaggaaagcacagatcaacaaacaggccgagaagaaagagaaggaaaagagttctctgacaaacgccgaattcgaagaaatcgtacagatcgtcctgcaaaaatccctacaggaatgcctgggcatggggtcgggtctggatttcgcggaaacatcatgcgcacagccagtggtgtcaacccagtcagacaaggagccaggcattacggcatccgcaaccgacactgataatgcgaatggcgaggaggttccacacacacaggaaatcagcgtctcgtgggagggggaagcggctccagagatccgcacctcaaaactgggccaaccagaccccgctccttccaaaaagaaaagcaatcgattgactttatctaagcgtaagaaggaggctcatgagaaggttgagaaaactcagggcggtcatgaacacagacaggaggacaggctgaagaagacagtgcaggatcacagccagattagggaccagcagaaaggcgaaatctccgggtttggacagtgcctggtctgggtgcagtgcagctttcccaattgcgggaaatggcgccgtttatgcgggaatattgatccttccgtccttcccgacaattggtcctgtgaccagaacactgacgtgcagtacaacaggtgcgacatcccggaggaaacttggaccggtttggaatcagacgtggcttacgcctcttacataccgggtagtatcatctgggccaaacagtatggctacccttggtggcctggcatgatagaatctgaccctgatttgggtgaatattttctctttacaagtcacctggactctctgccgtcaaagtatcatgttacattctttggtgagactgtctctcgcgcttggatcccagtgaatatgctgaaaaattttcaggagctgagcctggagctatctgtaatgaaaaagcgcagaaacgactgctcacagaagctgggcgtagctcttatgatggcccaagaggcagagcaaatttccatccaagagagagttaatctgttcggattctggtcaagatttaacggcagtaattccaacggagagcggaaggatttacagctatcagggcttaattctccgggaagttgcctcgagaagaaagagaaggaagaagaactcgagaaagaagagggtgagaagaccgaccctatcctgcccattaggaaacgggtcaaaatccaaacccaaaagactaagcccagagggctgggtggcgacgctggaacagccgatggacgtggaaggacccttcagcgtaagatcatgaagagaagcttgggaaggaagtccacagcgccaccggcaccccgtatggggaggaaggaggggcaaggtaacagcgatagtgatcaacccggacctaaaaagaagtttaaggctccccaaagcaaagcactggcagccagcttctcagaaggaaaggaagtaaggacagtgccaaaaaacctgggcctttcagcttgcaagggggcttgtccttcctccgctaaagaggaaccaagacatcgcgaacccttgactcaggaagccggtagtgtacctttggaagacgaggccagctcagacctggacttagagcagcttatggaggatgttggtcgagaattgggacagtcaggggagctgcagcactcaaattccgacggggaagattttcccgtggcccttttcggcaaatag

SEQ ID NO: 196031 - DNA, 2356 bp, Artificial Sequence
  derived and/or modified sequence
cgccgttttcccggggagatgcgccgcccggtctccctgccagcggagtgctgggccgaggacagggcggcaggggtgacagtggggtccaggagagtctcaaaatcctaagctttcagtatttgttattgtgaaagaagttaattcacctgaaacagaggaggggcaacctgagttatcagaaagtgacttcctggccttcccttctttactgatcagaggcacacaaagcgtagtttctaagctgaatgatgacaacgttgcagaataaagaagaatgtggaaagggaccaaagagaatctttgccccacctgcacaaaaatcttacagcctgttaccttgtagccctaactcccctaaggaggagaccccggggatcagttccccagagacagaggccaggataagcctgccaaaggccagtttaaagaagaaagaggaaaaagcaaccatgaagaatgttccaagcagggaacaggagaaaaaaagaaaggcacaaatcaacaagcaagcagagaagaaagaaaaggaaaaatcaagtcttaccaatgcagaatttgaggagattgtccagattgttctgcagaagtcccttcaggagtgcttggggatgggatctggccttgattttgcagagacttcttgtgcccagcccgtagtatctacccaatcagacaaggagccaggaattactgcttctgctactgatactgataatgctaatggagaggaggtaccacatactcaagagatttcagtgtcttgggaaggtgaagctgcccctgagataaggacatctaagttaggccagccagatcctgcaccctctaagaagaaatccaatagactcaccttaagcaaaagaaagaaggaagctcatgagaaggtggagaaaactcaaggtggacatgagcacagacaggaagaccgactaaagaaaacagttcaggatcattctcagatcagggaccagcaaaaaggagagataagtggttttggtcaatgtctggtctgggtccagtgttccttcccaaactgtgggaaatggaggcggctgtgtgggaacattgacccctcagttctcccagataattggtcctgtgatcagaacacagatgtgcagtataatcgctgtgatattcctgaggagacctggacagggcttgagagtgatgtggcctatgcctcctacatcccaggatccatcatctgggccaagcaatacggttacccctggtggccaggcatgatagaatctgatcctgacttaggggaatattttctttttacttcccatcttgattccctgccgtctaagtaccatgtgacgttttttggagaaacagtttctcgtgcatggatcccagtcaacatgctaaagaacttccaggagctgtccctggagctatcagtcatgaaaaagcgcagaaatgactgcagccagaaactgggggtggccctgatgatggctcaagaggcagaacagatcagcattcaggaacgggttaacttgtttggtttctggagccgattcaacggatctaacagtaatggggaaagaaaagacttacagctctctggtttgaacagcccaggatcctgcttagagaaaaaggagaaagaggaagagttggaaaaggaggaaggagagaaaacagacccaattttgcccattcgtaagcgagtcaaaatacagacccaaaaaaccaagccaagagggcttgggggtgatgcaggcacagcagatggccgaggcaggacactgcagaggaagataatgaagagatctctaggcaggaaatccacagctcctcctgcacccagaatgggaaggaaagaaggccaagggaattcagattctgaccagccaggccctaagaaaaaatttaaagctccccagagcaaggccttggcagccagcttttcagagggaaaagaagttagaacagtgccaaagaacctgggcctatcagcgtgtaagggggcctgcccctcatctgcgaaagaagagcccagacaccgggaacccctgacccaggaggctggaagtgtcccccttgaggacgaagcctccagtgacctggacctggagcaactcatggaagatgttgggagagagctggggcagagcggggagctgcagcacagcaacagtgatggcgaggacttccccgtggcgctgtttgggaagtagctggtgctcctctgctccctctttttctcccttctctggggcgcaggagggagaagttgctaagtgctgggtctgttcattggctatgaggttcaaatgtgtgtggtgcagtttctgtgttaataaagcaggttacagtcgactgggttggctggtctcta

SEQ ID NO: 196032 - protein, 448 aa, Artificial Sequence
  derived and/or modified sequence
MAAPTLGRLVLTHLLVALFGMGSWAAVNGIWVELPVVVKDLPEGWSLPSYLSVVVALGNLGLLVVTLWRQLAPGKGEQVPIQVVQVLSVVGTALLAPLWHHVAPVAGQLHSVAFLTLALVLAMACCTSNVTFLPFLSHLPPPFLRSFFLGQGLSALLPCVLALVQGVGRLECPPAPTNGTSGPPLDFPERFPASTFFWALTALLVTSAAAFRGLLLLLPSLPSVTTGGSGPELQLGSPGAEEEEKEEEEALPLQEPPSQAAGTIPGPDPEAHQLFSAHGAFLLGLMAFTSAVTNGVLPSVQSFSCLPYGRLAYHLAVVLGSAANPLACFLAMGVLCRSLAGLVGLSLLGMLFGAYLMALAILSPCPPLVGTTAGVVLVVLSWVLCLCVFSYVKVAASSLLHGGGRPALLAAGVAIQVGSLLGAGAMFPPTSIYHVFQSRKDCVDPCGP

SEQ ID NO: 196033 - protein, 350 aa, Artificial Sequence
  derived and/or modified sequence
MAAPTLGRLVLTHLLVALFGMGSWAAVNGIWVELPVVVKDLPEGWSLPSYLSVVVALGNLGLLVVTLWRQLAPGKGEQVPIQVVQVLSVVGTALLAPLWHHVAPVAGQLHSVAFLTLALVLAMACCTSNVTFLPFLSHLPPPFLRSFFLGQGLSALLPCVLALVQGVGRLECPPAPTNGTSGPPLDFPERFPASTFFWALTALLVTSAAAFRGLLLLLPSLPSVTTGGSGPELQLGSPGAEEEEKEEEEALPLQEPPSQAAGTIPGPDPEAHQLFSAHGAFLLGLMAFTSAVTNGVLPSVQSFSCLPYGRLAYHLAVVLGSAANPLACFLAMGVLCRCCRGCCVCVCSHM

SEQ ID NO: 196034 - DNA, 2377 bp, Artificial Sequence
  derived and/or modified sequence
gcaaaagcgctagggttgcaagtggcaccagagacgtgcccttgtcccggggtccatttgagggtgagcgtgttggtgccgagctgtttttttgttttgttttgttttgttttgtttttgagaccgaatctcgttctgtcgcccaggctggaatgcagtggtgtgatcttggctcactgcaacctccaccttccgggttcaagtgaatctcctgcctcagcctcctgagtagctgggattactggcacccaccaccacgaccagctaatttttgtatttttagtagagacgggttttcaccatgttggccaggatggtctcaatctcctgacctcaggcgatctgccttcctcagcttcccaaagtgctgggattacaggtgtgagccaccgcacccggccagtgctgagctgttttgacaacttggaccccgggtcctctgtgggtaggaaaatcagctccctctttgctcctctggggcagctgcacctcgggccagctttctgcctgtctgcctgccggcactgctgggtcgctgtacccaaacgcacagccggtgccccgtgctagaaggtcttcagtttccagaagaaccaaagcatctttggacctacctagggaaggacctgcctgtgacctttgccctgtcctggagggtccagctttgggctgaatggcagcacccacgctgggccgtctggtgctgacccacctgctggtggccctttttggcatgggctcctgggctgctgtgaacgggatctgggtggagctgcctgtggtggtaaaagaccttccagagggttggagcctcccctcatacctctctgtggttgtggcgctgggaaacctgggtctgctggtggtgaccctgtggaggcagctggccccgggcaagggcgagcaggtccccatccaggtggtacaggtgctgagtgtagtgggcacagccctgctggcccctctgtggcaccacgtggccccagtggcagggcagctccactctgtggccttcctaactctggccttggtgttggcaatggcctgttgtacctctaatgtcactttcctgcccttcctgagccacctgccacctcctttcttacggtctttcttcctgggtcagggtctcagtgccctactcccctgtgtgctggccctagtgcaaggtgtgggccgcctcgagtgcccaccagcgcccaccaatggcacctctgggcctcccctcgacttccctgagcgttttcctgccagcaccttcttctgggcactgactgcccttctggtcacttcagctgccgccttccggggtctcctgttgctgttgccatcactaccctctgtaaccacagggggctcagggcctgaacttcaactgggatccccaggagcagaggaggaagagaaggaggaagaagaggctttgccattgcaggagccaccgagccaggcagcaggcaccatccctggcccagaccctgaggcccatcagctgttctcagcccatggtgccttcctgctgggcctgatggccttcaccagtgccgtgaccaatggcgtgctgccttctgtgcagagcttttcctgtttgccctatgggcgcctggcctaccacctggctgtggtgctgggcagtgccgccaacccccttgcctgcttcctggccatgggcgtgctgtgcaggtccctggcagggctggttggtctttctctgctgggcatgctctttggggcctacctgatggcactggcaatcctgagcccctgcccacccctggtgggcaccactgcaggggtggtccttgtggtgctgtcgtgggtgctgtgtctgtgtgtgttctcatatgtgaaggtggctgcaagctccctgctgcatggtgggggtcggccggcattgctggcagctggtgtggccatccaagtgggctccctgcttggtgccggtgccatgttccctcccaccagcatctaccacgtgtttcaaagcagaaaggactgtgtagacccctgtggcccctgagcctgggcaggtggggacccaactccaccccacctgtcttcatcgtgaggctgccacagtgcctgactacttgtggcccaggcaggcttcccccaacacaggaacgctcatggacacctgcacactccacagaagacgttggcatgtgaggccagggtgggcaccaaagaccaggcccagagccaggggacaggttggggctgtgggcttggacccagggcctgagacctttgtgggatttgtgcaataaagtgtttttatttaaaaccaaaaacaaaaacaaaagcctaatgaaaaccttataagaaatatataatgaaatcaggaaactggattaaataatttttcatacatata

SEQ ID NO: 196035 - DNA, 2412 bp, Artificial Sequence
  derived and/or modified sequence
agtgtcgcaaaagcgctagggttgcaagtggcaccagagacgtgcccttgtcccggggtccatttgagggtgagcgtgttggtgccgagctgtttttttgttttgttttgttttgttttgtttttgagaccgaatctcgttctgtcgcccaggctggaatgcagtggtgtgatcttggctcactgcaacctccaccttccgggttcaagtgaatctcctgcctcagcctcctgagtagctgggattactggcacccaccaccacgaccagctaatttttgtatttttagtagagacgggttttcaccatgttggccaggatggtctcaatctcctgacctcaggcgatctgccttcctcagcttcccaaagtgctgggattacaggtgtgagccaccgcacccggccagtgctgagctgttttgacaacttggaccccgggtcctctgtgggtaggaaaatcagctccctctttgctcctctggggcagctgcacctcgggccagctttctgcctgtctgcctgccggcactgctgggtcgctgtacccaaacgcacagccggtgccccgtgcctattacctgccagcctgtctgtttccctccagctagaaggtcttcagtttccagaagaaccaaagcatctttggacctacctagggaaggacctgcctgtgacctttgccctgtcctggagggtccagctttgggctgaatggcagcacccacgctgggccgtctggtgctgacccacctgctggtggccctttttggcatgggctcctgggctgctgtgaacgggatctgggtggagctgcctgtggtggtaaaagaccttccagagggttggagcctcccctcatacctctctgtggttgtggcgctgggaaacctgggtctgctggtggtgaccctgtggaggcagctggccccgggcaagggcgagcaggtccccatccaggtggtacaggtgctgagtgtagtgggcacagccctgctggcccctctgtggcaccacgtggccccagtggcagggcagctccactctgtggccttcctaactctggccttggtgttggcaatggcctgttgtacctctaatgtcactttcctgcccttcctgagccacctgccacctcctttcttacggtctttcttcctgggtcagggtctcagtgccctactcccctgtgtgctggccctagtgcaaggtgtgggccgcctcgagtgcccaccagcgcccaccaatggcacctctgggcctcccctcgacttccctgagcgttttcctgccagcaccttcttctgggcactgactgcccttctggtcacttcagctgccgccttccggggtctcctgttgctgttgccatcactaccctctgtaaccacagggggctcagggcctgaacttcaactgggatccccaggagcagaggaggaagagaaggaggaagaagaggctttgccattgcaggagccaccgagccaggcagcaggcaccatccctggcccagaccctgaggcccatcagctgttctcagcccatggtgccttcctgctgggcctgatggccttcaccagtgccgtgaccaatggcgtgctgccttctgtgcagagcttttcctgtttgccctatgggcgcctggcctaccacctggctgtggtgctgggcagtgccgccaacccccttgcctgcttcctggccatgggcgtgctgtgcaggtccctggcagggctggttggtctttctctgctgggcatgctctttggggcctacctgatggcactggcaatcctgagcccctgcccacccctggtgggcaccactgcaggggtggtccttgtggtgctgtcgtgggtgctgtgtctgtgtgtgttctcatatgtgaaggtggctgcaagctccctgctgcatggtgggggtcggccggcattgctggcagctggtgtggccatccaagtgggctccctgcttggtgccggtgccatgttccctcccaccagcatctaccacgtgtttcaaagcagaaaggactgtgtagacccctgtggcccctgagcctgggcaggtggggacccaactccaccccacctgtcttcatcgtgaggctgccacagtgcctgactacttgtggcccaggcaggcttcccccaacacaggaacgctcatggacacctgcacactccacagaagacgttggcatgtgaggccagggtgggcaccaaagaccaggcccagagccaggggacaggttggggctgtgggcttggacccagggcctgagacctttgtgggatttgtgcaataaagtgtttttatttaaaaccaaaaacaaaaacaaaagcctaatgaaaaccttataagaaatatataatgaaatcaggaaactggattaaataatttttcatac

SEQ ID NO: 196036 - DNA, 2989 bp, Artificial Sequence
  derived and/or modified sequence
tcggcctcccaaagtgctgggattacaggcctgagccacggtgcctggcctatctttcattttcaaagcttgtttttgagtggtggcatggggcacacccctgtactgctaatgcaaaggaatattagaatcaccatttgtgaaagaaacttggcagtctgttacaagagcctcagctatgtcatacagtttcacccaataattctatttcaagagacttatccaggaaaaaaaaaaaaaaaaagaccaaaataagaaaagctttgtaatgagcccttgttgcttttacctacccagtgcctctgttcctcttctggtaactgaattcctccttcatctaccaatttatagcagcagggtttgagattctttcactgaattccaaccaatcaaattatctgaaaagtattatttttcttttttcagacagggtctcgctctttcacccaggctggagcacggtggtgtgaccccagttcactgaagcctcaacctcctgggctcaagggatcctcccacctcagcctcctgagtagctgggactataggtgcacatcagcatgcccaactaaattttattttttgtagagatggggtttcgccatgttgcttgggctggtctcgaactcctgggctcctgcgatccgcccatctcagcctcccagagtgctgggactacaggcatgggccattgcacctggcctttaaaatattcttttcttttcaagtgagaaatggtatcctactgatgtcttaatttgcctttctttgatatatacagtcagggagagcatcttttccacatgtctattggccatgtgtatttcccatgaaatatttcataccacccccctcaccattttacaatatgatctttatcaatgtcacagtgataggatatgtctctaacctgtatcttttattttctttctttccttttttttttttttgatacggagttttcctcttgtcgtccagtctggaatgcaatgacatgatctcggctcaccacaatctccgcctcccgggttcaagcaattctcctgcctcagcctcccgagtagctgggattacaggcatgtgccaccatgcccggctaattttgtatttttagtagagacagggtttcgccatgttggtcaggctggtctcgaactcctgacctcaggtgatccacgcccccttagcgtcccaaagtgctgggattacaggcacgaactactatgcctgggattaacctgtatcttttgacttattaacttgtctgtgcttactggagtggcactctgagctgagcctggacagctagaaggtcttcagtttccagaagaaccaaagcatctttggacctacctagggaaggacctgcctgtgacctttgccctgtcctggagggtccagctttgggctgaatggcagcacccacgctgggccgtctggtgctgacccacctgctggtggccctttttggcatgggctcctgggctgctgtgaacgggatctgggtggagctgcctgtggtggtaaaagaccttccagagggttggagcctcccctcatacctctctgtggttgtggcgctgggaaacctgggtctgctggtggtgaccctgtggaggcagctggccccgggcaagggcgagcaggtccccatccaggtggtacaggtgctgagtgtagtgggcacagccctgctggcccctctgtggcaccacgtggccccagtggcagggcagctccactctgtggccttcctaactctggccttggtgttggcaatggcctgttgtacctctaatgtcactttcctgcccttcctgagccacctgccacctcctttcttacggtctttcttcctgggtcagggtctcagtgccctactcccctgtgtgctggccctagtgcaaggtgtgggccgcctcgagtgcccaccagcgcccaccaatggcacctctgggcctcccctcgacttccctgagcgttttcctgccagcaccttcttctgggcactgactgcccttctggtcacttcagctgccgccttccggggtctcctgttgctgttgccatcactaccctctgtaaccacagggggctcagggcctgaacttcaactgggatccccaggagcagaggaggaagagaaggaggaagaagaggctttgccattgcaggagccaccgagccaggcagcaggcaccatccctggcccagaccctgaggcccatcagctgttctcagcccatggtgccttcctgctgggcctgatggccttcaccagtgccgtgaccaatggcgtgctgccttctgtgcagagcttttcctgtttgccctatgggcgcctggcctaccacctggctgtggtgctgggcagtgccgccaacccccttgcctgcttcctggccatgggcgtgctgtgcaggtgctgtcgtgggtgctgtgtctgtgtgtgttctcatatgtgaaggtggctgcaagctccctgctgcatggtgggggtcggccggcattgctggcagctggtgtggccatccaagtgggctccctgcttggtgccggtgccatgttccctcccaccagcatctaccacgtgtttcaaagcagaaaggactgtgtagacccctgtggcccctgagcctgggcaggtggggacccaactccaccccacctgtcttcatcgtgaggctgccacagtgcctgactacttgtggcccaggcaggcttcccccaacacaggaacgctcatggacacctgcacactccacagaagacgttggcatgtgaggccagggtgggcaccaaagaccaggcccagagccaggggacaggttggggctgtgggcttggacccagggcctgagacctttgtgggatttgtgcaataaagtgtttttatttaaaaccaaaaacaaaaacaaaagcctaatgaaaaccttataagaaatatataatgaaatcaggaaactggattaaataatttttcatacat

SEQ ID NO: 196037 - DNA, 1347 bp, Artificial Sequence
  derived and/or modified sequence
atggctgcacccaccctaggccggctagtactgacccatctgctcgttgcgttgttcgggatgggcagctgggccgctgttaacggcatatgggtagagctgcctgtagttgttaaggatctgcctgaaggctggagccttccttcctacctaagtgtagtggtggcactgggcaacttgggactgctagtagtgacgctgtggcgacagcttgccccaggaaaaggcgaacaggttcccattcaggtcgtgcaagttctgtctgttgttggaaccgctttattggctcccctgtggcaccacgtcgcacccgttgcaggccaactgcattcggtcgcttttctaaccctggctctggtgttagctatggcctgctgcaccagcaacgtcaccttcctgcccttcctatctcacctccctcccccttttctgagaagcttcttcctggggcaaggcctcagtgcactcctaccctgcgtcctcgccttggtacagggtgttggccgactggaatgcccaccggcccccaccaacggtacctcaggaccgccactggattttcccgagagatttcccgcttctacatttttttgggccctcaccgctctgttggtgacttcagccgcagccttccggggattgctgctcctcctgcccagtcttccgtcagtcacaactggcggttctgggcctgagttacagctcgggagtccaggtgcggaagaggaagaaaaagaagaagaagaagcactcccactacaggagcccccttcacaagccgccgggacaattccaggacccgacccagaggcccaccaattatttagcgctcatggggcattcctgcttgggctgatggctttcaccagcgccgtgaccaacggggtgttgccttccgtgcaaagcttctcctgcttgccctatggaaggctcgcttaccacctcgctgtggtattaggtagtgcagcaaaccccctggcatgcttccttgctatgggagtcctgtgcagatctttagccgggctcgtggggctaagcctcctgggaatgctcttcggggcatatctaatggccctggcgatcttgagcccctgcccccccctagtcggcacgacagctggcgtggtactggttgtcctgagctgggtgctgtgcctttgtgtcttctcttacgtcaaagtggccgctagttcccttttgcatggaggaggaaggccggccctgctggcagctggagttgccattcaggtgggatcccttcttggtgctggagccatgtttcccccaactagcatataccatgtgtttcagtctcggaaagactgtgtagacccatgtggaccctag

SEQ ID NO: 196038 - DNA, 1347 bp, Artificial Sequence
  derived and/or modified sequence
atggccgcaccaacactcggtcgcctggtgctgactcacctgctggtggccctctttggcatgggatcatgggcagccgtgaacggaatttgggtcgagttgccggtggtggtcaaagatcttcctgagggttggtcactgccttcttatctctctgttgttgttgctctcggaaacctaggattgcttgtggtgacattgtggcgtcaactggctcccggaaagggggaacaggtgcccattcaggttgtgcaagttctcagcgtcgtgggtaccgctctgctggctcctctctggcaccacgtagcccctgtggcaggccagttgcacagtgtggcttttctgaccctcgccttagtgctggccatggcttgctgcacttcaaacgtgaccttccttccgtttctctcccacctgcccccaccctttcttaggtccttctttctaggtcagggtttgtcagcgctcttgccatgcgtgttagccctagtccagggtgtcggccgcctggaatgcccacctgcccctacgaatggcacctctggcccaccactcgatttcccagagcgcttcccagcatctacatttttttgggctcttactgcactactcgtcacttcggctgcggctttccgcggtttgctgctgctgctgccctccctgccgagcgtgacaacaggtgggtccgggcccgagctccagctcgggtcacctggcgccgaagaggaggagaaagaagaagaagaggcactgccactgcaggaacccccaagccaggctgcagggacaattccaggtccagacccagaggcacatcagttgttttccgcccatggcgcatttctccttggactcatggcctttacatctgctgtgaccaatggagtgcttcctagtgtccagtcttttagctgtctgccttatgggcggctggcctatcatttggcagtcgtgctcggttcagcagccaaccccctggcttgtttcttggcaatgggcgttctgtgccgttctttggcgggcttggtagggctgtcacttctgggtatgttattcggcgcatatctcatggcactggctatcctgtctccctgtccacctctggtaggcactaccgccggagttgtgctagttgtactttcatgggttttgtgcttatgcgtattcagctacgtcaaggtagccgcatcaagtctcttgcacgggggaggcagacctgcactcctggcagcgggcgtagccattcaggtggggagcctgcttggagccggagcgatgtttccgcctacgtccatttatcacgtgtttcagagtcgtaaagattgtgtggacccctgcggcccgtag

SEQ ID NO: 196039 - DNA, 1053 bp, Artificial Sequence
  derived and/or modified sequence
atggccgcgcccacgttggggcggctagtgctgacccatcttctggtggcactgtttggcatgggatcttgggccgcagtgaacggaatttgggtggagttaccggtcgttgtaaaggacctacccgaaggctggtctctgccgtcctacctgagcgtggtcgtggccttagggaatctcggacttctggtcgtgaccctttggagacaactggcaccaggcaagggcgagcaagtgccgatccaagtggttcaggtattaagcgtcgtgggtacggctctactggccccactgtggcaccatgttgcaccggtggctggccaactgcactccgtcgcattcctcacccttgccctggtactggccatggcctgctgcactagtaatgtcacattcctaccctttcttagtcacttgccaccgccattcctaagatccttttttctcggacagggactctccgccctgttaccttgcgtgctagctttagtgcagggcgtgggccgccttgaatgtccacctgcccctaccaatggtactagtggcccgccactcgacttcccagaacggttccctgcaagcacgtttttctgggccctcacagccctgttggtgacctcagcggctgccttcagaggcttgttgctcctcctgccatctttgccgtcagtcacaacgggaggatccggcccagaactgcagctcggtagtcccggtgcggaagaggaggaaaaggaggaggaggaggccctgcccctgcaggaacctccttcgcaggctgcaggaaccattccaggtcctgaccctgaggcccaccagctctttagcgctcatggagcattcttgcttggcctcatggccttcacgtcagcagtgactaatggagttcttccctctgtgcagtccttctcgtgtttaccatacggtcggttggcataccatctggcggtggtccttggatccgcagccaaccccttggcttgcttcctggcgatgggggttctgtgccgctgctgtcggggctgctgtgtgtgtgtttgttcccatatgtag

SEQ ID NO: 196040 - DNA, 1347 bp, Artificial Sequence
  derived and/or modified sequence
atggccgcccccaccctgggccgcctggtgctgacccacctgctggtggccctgtttggcatgggctcctgggccgctgtgaatggcatctgggtggagctgcctgtggtggtgaaggacctgcctgagggctggagcctgcccagctacctgtctgtggtggtggccctgggcaacctgggcctgctggtggtgaccctgtggaggcagctggcccctggaaaaggagagcaggtgcccatccaggtggtgcaggtgctgtctgtggtgggcacagccctgctggcccccctgtggcaccacgtggcccctgtggccggccagctgcacagcgtggccttcctgaccctggccctggtgctggccatggcctgctgcaccagcaatgtgaccttcctgcccttcctgagccacctgcccccacccttcctgcggagcttcttcctgggccagggcctgagcgccctgctgccctgtgtgctggccctggtgcagggcgtgggccgcctggagtgccccccagcccccaccaacggcaccagcggcccccccctggacttccctgagcgcttccctgccagcaccttcttctgggccctgacagccctgctggtgaccagcgctgctgccttccggggcctgctgctgctgctgcccagcctgcccagcgtgaccaccggcggcagcggccctgagctgcagctgggcagccctggagctgaggaggaggagaaggaggaggaggaggccctgcccctgcaggagccccccagccaggccgccggcaccatccctggccctgaccctgaggcccaccagctgttcagcgcccacggggccttcctgctgggcctgatggccttcaccagcgctgtgaccaacggggtgctgcccagcgtgcagagcttcagctgcctgccctacggccgcctggcctaccacctggccgtggtgctgggcagcgctgccaaccccctggcctgcttcctggccatgggcgtgctgtgccgcagcctggccggcctggtgggcctgagcctgctgggcatgctgtttggagcctacctgatggccctggccatcctgagcccctgcccccccctggtgggcaccacagctggggtggtgctggtggtgctgtcctgggtgctgtgcctgtgtgtgttctcctatgtgaaggtggccgccagcagcctgctgcatggaggcggccggcctgccctgctggccgccggcgtggccatccaggtgggcagcctgctgggcgctggggccatgttcccccccaccagcatctaccacgtgttccagagcaggaaggactgtgtggacccctgtggcccctag

SEQ ID NO: 196041 - DNA, 1053 bp, Artificial Sequence
  derived and/or modified sequence
atggccgcccccaccctgggccgcctggtgctgacccacctgctggtggccctgtttggcatgggctcctgggccgctgtgaatggcatctgggtggagctgcctgtggtggtgaaggacctgcctgagggctggagcctgcccagctacctgtctgtggtggtggccctgggcaacctgggcctgctggtggtgaccctgtggaggcagctggcccctggaaaaggagagcaggtgcccatccaggtggtgcaggtgctgtctgtggtgggcacagccctgctggcccccctgtggcaccacgtggcccctgtggccggccagctgcacagcgtggccttcctgaccctggccctggtgctggccatggcctgctgcaccagcaatgtgaccttcctgcccttcctgagccacctgcccccacccttcctgcggagcttcttcctgggccagggcctgagcgccctgctgccctgtgtgctggccctggtgcagggcgtgggccgcctggagtgccccccagcccccaccaacggcaccagcggcccccccctggacttccctgagcgcttccctgccagcaccttcttctgggccctgacagccctgctggtgaccagcgctgctgccttccggggcctgctgctgctgctgcccagcctgcccagcgtgaccaccggcggcagcggccctgagctgcagctgggcagccctggagctgaggaggaggagaaggaggaggaggaggccctgcccctgcaggagccccccagccaggccgccggcaccatccctggccctgaccctgaggcccaccagctgttcagcgcccacggggccttcctgctgggcctgatggccttcaccagcgctgtgaccaacggggtgctgcccagcgtgcagagcttcagctgcctgccctacggccgcctggcctaccacctggccgtggtgctgggcagcgctgccaaccccctggcctgcttcctggccatgggcgtgctgtgccgctgctgccggggctgctgcgtgtgtgtgtgcagccacatgtag

SEQ ID NO: 196042 - DNA, 1347 bp, Artificial Sequence
  derived and/or modified sequence
atggccgcccccaccctgggccggctggtgctgacccacctgctggttgctctcttcgggatgggatcctgggccgccgtgaatggaatttgggtggagctgcccgtcgtcgttaaggatctcccggaggggtggagcctaccctcctacttatctgtagtcgtcgccttaggtaatctgggcctgctcgttgtgactctatggcggcagctggccccaggcaaaggtgaacaagtcccaatacaagttgtgcaggtactgtctgtagttggtaccgccctgctggcacctctatggcatcacgtggccccggtcgcagggcaattacatagcgttgcctttctgacactggctctggtgctcgccatggcctgttgcacctccaacgtcacattcctgccattcctatcccacctgccccctccatttcttcggtcctttttcctcggtcagggactgagcgcactgctgccgtgcgtgctcgcactggtgcaaggcgttggaagactggaatgtccacccgcccccacaaatggaacaagtggccccccactcgacttccccgaacgatttcccgcttcgacttttttctgggcactgacagcactccttgtgacttcagctgccgcgtttcgagggctcttgttgctccttcctagtttgccctctgtgaccaccggaggcagtggacctgagttgcagcttgggagtccaggagccgaagaggaggagaaagaagaagaagaagccctgcctttacaagaacctccctcacaggcggcgggtactataccgggaccagatcccgaagcccaccaactgttcagcgcgcacggagcgtttctgctaggactgatggcctttacctcagcagtcactaacggggttttgccctccgttcagtccttcagttgcctgccatacgggcgtctggcctaccacctcgcggttgttctgggctctgcagcaaatccactggcttgctttcttgcaatgggcgtcctgtgccgctcactggcaggactggtgggactttcattgctagggatgctctttggggcatacctgatggcattggccattctgagtccatgccctccactggtagggacgacagctggtgttgtgctcgtagtgctctcatgggttctgtgcctttgcgttttctcttacgtgaaggtggctgcttcatcactcctccatggcggggggaggcctgccctgctggcagccggggtggccatccaggtgggcagtctgctgggggccggagccatgtttcctcctacttcgatataccatgtcttccagtccaggaaagattgtgtggatccttgtgggccttag

SEQ ID NO: 196043 - DNA, 1347 bp, Artificial Sequence
  derived and/or modified sequence
atggccgcccccaccctgggccggctggtgctgacccacctgctggtggccctcttcggcatgggctcctgggccgcagtcaatgggatctgggtagaacttccagttgtggtgaaggatttgcctgagggctggagtctcccctcgtatctgtccgtggtcgtggcattgggaaatctggggctattggtggtgaccttgtggaggcagcttgcacccgggaaaggggagcaggtcccgatccaagtggtacaggtactatctgtggtcggcacagcactcctggctcctctgtggcaccacgtggccccagttgcagggcaactccatagtgtcgctttcctgactctagctctggtccttgcgatggcctgctgtaccagtaacgtgacttttttaccctttctttctcacttgccccctccctttctgcggtccttttttttgggacagggtctcagcgctcttctcccctgcgtgctcgcactagtgcagggcgtgggtcgacttgagtgcccccctgcaccgaccaacggcactagcgggccccctcttgatttcccagagaggtttcctgcgagtacatttttctgggccctgaccgcgctgctcgtcacatcagcggcagcttttaggggactcctcctgctcctcccctccctcccgagtgtgactactggcgggtcagggcctgagctccagttaggcagtcccggggccgaggaagaagagaaagaagaggaggaagccctgccactccaggaaccacccagccaggctgccggaaccataccagggcctgatccagaagcacatcagctcttctctgcccatggagcctttctgcttggactaatggctttcacctcggcagtgacaaacggagtactaccctcagtacaatctttctcttgtctgccttacggtcggctggcgtaccacctggcagtggtccttggttctgcagcaaaccctctcgcctgcttcttggctatgggcgttctgtgtcgatctttggctggtctggtggggctgtcactgctcggaatgctgttcggcgcgtatctgatggctctcgctatcctgagcccgtgtccccctctggtgggcacaacagcaggcgtggtgctcgtggtgctctcctgggtgctgtgcttgtgcgtcttcagttatgtgaaagtagcggcctcttcacttctccatggaggggggcggccagctctgctcgctgcaggagtggctatccaggtgggctccctgctgggcgctggcgccatgtttcctccgactagtatctaccacgtgttccaatcacgcaaagactgcgtggacccttgcggcccctag

SEQ ID NO: 196044 - DNA, 1053 bp, Artificial Sequence
  derived and/or modified sequence
atggccgcccccaccctgggccggctggtgctgacccacctgctggtagccctgttcgggatggggagctgggctgcagtgaatggcatctgggtggaactgccagtagttgttaaagacctgcctgaaggatggtcattgcccagctatttatcagtggtagtcgcccttggaaatctggggctcctggttgtgactctgtggcgccagttggctccaggtaagggcgagcaggtgcctattcaggtagtgcaagtgctgagcgtggttggaacagccctgctcgctcctctgtggcaccatgtcgcacccgtggccggacagctgcattcagtcgcgtttttgacactggccctggtacttgcaatggcctgctgcacaagtaacgttacttttctcccctttctgagtcacctaccacctccattcctgagatccttttttttgggccaaggtctttccgctctcctgccctgtgtgttagccctggtgcaaggggtggggcggctggagtgcccgccggctccaactaatgggacgtcagggccgcctttggattttcccgaacgcttcccagcaagcaccttcttctgggccctcactgcgctgttagtgaccagcgcagcggcttttcgcgggctcctccttttactgccaagtttaccctcagtaacaaccgggggttccggtccggaacttcagctagggtctccaggagccgaagaggaagaaaaagaggaagaggaagcgctgcctttgcaggaacctccaagtcaggccgctggtacaatacccggccccgatccggaggcccaccaactcttcagcgcccacggtgccttcttactgggtctgatggctttcacgagtgcggtgactaatggtgtgctgccgtccgtgcaatcattcagttgcctgccatatggtcgactggcttaccacttggcagtggtccttggcagtgctgccaatcccctagcttgtttcctagctatgggagtgctgtgtcggtgctgcaggggctgctgcgtttgtgtttgctctcacatgtag

SEQ ID NO: 196045 - DNA, 1347 bp, Artificial Sequence
  derived and/or modified sequence
atggcagccccaaccctcggcagattagtactcactcaccttttggtcgctctattcggaatggggagctgggctgcagtgaacggtatttgggttgaactgcccgtcgtggtcaaggacctccccgagggttggtccctgccatcctacctctccgtggttgtagcgttgggtaatctgggtctgctggtagttacgctgtggcgccaattggctcctgggaaaggagaacaggtaccaatccaggttgttcaagtgctgagtgtggtcgggacagctttgttggctccactctggcaccacgtggccccagtcgccggtcagctccactctgtcgctttcttgacgttggcactggtgctggccatggcctgctgcactagcaatgtcacattccttccctttctgtcacacctgccacctccatttctccggtccttctttctgggtcaaggcttgtcagcactgctcccttgcgtgttggccctggtgcagggagtgggcaggctagagtgccccccagcaccaactaatgggacctcgggcccacctctggacttcccagagcgttttcctgccagcactttcttctgggcactgaccgcccttctggttacctcagctgcagccttccggggactgctgttacttctgccctcgctgcccagcgtcactactggtggatccggacctgagctgcagctggggtcccccggagctgaggaagaggaaaaggaagaagaggaggccctgcctctgcaggaaccaccttcccaggccgcaggtaccatcccaggaccagatccggaggctcatcagctgttcagcgcacacggtgcattcttgttagggctgatggcgtttactagcgctgtgacaaatggtgtgctaccatctgtgcagagtttttcttgccttccttatggacggttggcctatcacctggccgtggttttggggagtgctgccaaccctctagcctgctttcttgccatgggagtgctttgccggtctctagctggactagtcgggctgtctcttctcgggatgctttttggggcttaccttatggctcttgcaatcttatccccttgtccccctctggttggtacaacagccggtgtcgtcctcgtagttttgtcttgggtactctgtctgtgtgtcttttcctatgtgaaggtggcagcctcttctctgcttcacggcggaggaagaccagctttgctggctgctggtgtggccatccaggttggcagtctgttaggtgccggtgccatgttccctcccacgagcatctaccacgtgttccaatcccgcaaagactgcgtggatccatgtggtccctag

SEQ ID NO: 196046 - DNA, 1347 bp, Artificial Sequence
  derived and/or modified sequence
atggccgctcctacactgggaaggctcgtgttgactcatctgctcgtcgcgctctttggaatggggagctgggcggcagtgaacgggatttgggtcgagctgcccgtggtcgtgaaagatctgccagaagggtggtccttgccttcctacctgtcagtggttgtggcactggggaatctgggactcttggtagttaccctctggcgccagctcgcacccggaaaaggagaacaggttccaatacaggtggttcaagtcttaagcgtagtgggcacagccttactcgcaccactgtggcaccacgtggctcctgtcgcgggtcagctgcattccgtagcattcttgacacttgctctggtgcttgccatggcctgttgcacaagtaatgtgacatttctgccatttttatcacatttacctcccccttttttacgctcgtttttcctgggacagggattgtctgcgctgttaccatgcgtgctggcactggtgcagggtgttggtcggctggagtgccctccagcccctaccaacggtacctcgggaccccctctagacttccctgaaaggtttcccgcatccactttcttctgggcccttactgccctgttggtaacctccgccgcagcgtttcgaggacttctgttgctcctcccctctctcccaagcgtaactaccggaggttctggaccagagttacagcttggcagcccaggagccgaggaggaagagaaggaggaagaggaagccctacccttacaggaacccccatcccaagctgccggaactatccccggtcccgaccctgaagctcaccagcttttctccgcccatggggcattcctgttgggattgatggcgtttacttcggctgtgacaaacggcgttctgccttcagtgcagagcttctcctgtctgccatacggtcgtttagcctatcacctggctgtggtgctcgggtctgcggcaaatccccttgcctgttttttagcaatgggggtactgtgccgaagtctggccggtttggtcggacttagcctgctgggaatgctattcggcgcatatttgatggctctggccatcttgtctccatgtccgccactcgtcggaaccaccgcaggagtggtccttgttgtgttatcctgggttctgtgcctgtgtgtgtttagttatgtcaaggtcgcagcatcctctctgttacacggcggaggtagacccgctcttctcgccgcaggagtcgctattcaggtgggcagtctgctgggcgctggcgctatgttccctccaacatcgatctatcacgtcttccagagccgtaaggattgcgtggatccctgtggaccctag

SEQ ID NO: 196047 - DNA, 1053 bp, Artificial Sequence
  derived and/or modified sequence
atggccgcacccactttggggcgactggttttaacacacttactggttgctctttttggcatgggctcttgggccgcagtcaacgggatatgggtcgagctccctgtcgtcgtgaaagacttgccagagggatggtcgttaccctcttacctgagcgtggtcgtggcactcggcaacctgggcctgctagtggtaactctttggcgacagctagcgcctggtaagggggaacaggtgcccatacaggtagtccaggtgctgagtgtcgtcggtacagctttgctcgctcctttgtggcatcacgtggctcccgtggcaggacagctgcacagcgtggccttcctaacacttgcactggtgttggctatggcttgttgcacatccaacgtaacgtttttgccgttcctctcacacctgcctccaccattcctgcgcagcttttttctcggtcagggcctcagcgcgcttttgccttgtgtcttagccctagtgcagggtgtgggcagacttgaatgtccacctgcaccaaccaatggcaccagcggtcccccacttgacttcccggaaaggttcccagcgtctacctttttttgggctctgaccgcacttctggtgacgagcgctgcggctttccggggactgctcttactgttgccttctctcccctcggtaactactggaggctctgggcctgagttgcagctcggcagcccaggtgcggaagaggaggagaaggaggaggaagaggccctccctctccaggaaccaccaagtcaggcagctggtactattcccggtcctgaccccgaggctcatcagctcttttcagcacacggcgcttttttgctgggattgatggctttcacatccgcagtcaccaatggggtattaccaagtgtgcagtcgttctcttgtttgccttatgggagacttgcctaccaccttgccgtggttctggggtcggccgctaacccactagcctgttttctcgcaatgggtgtgctgtgccgatgctgtcggggttgctgcgtctgcgtttgctctcacatgtag

SEQ ID NO: 196048 - DNA, 1347 bp, Artificial Sequence
  derived and/or modified sequence
atggccgcccccaccctgggcagactggtgctgacccacctgctggtggccctgttcggcatgggcagctgggccgccgtgaacggcatctgggtggagctgcccgtggtggtgaaggacctgcccgagggctggagcctgcccagctacctgagcgtggtggtggccctgggcaacctgggcctgctggtggtgaccctgtggagacagctggcccccggcaagggcgagcaggtgcccatccaggtggtgcaggtgctgagcgtggtgggcaccgccctgctggcccccctgtggcaccacgtggcccccgtggccggccagctgcacagcgtggccttcctgaccctggccctggtgctggccatggcctgctgcaccagcaacgtgaccttcctgcccttcctgagccacctgcccccccccttcctgagaagcttcttcctgggccagggcctgagcgccctgctgccctgcgtgctggccctggtgcagggcgtgggcagactggagtgcccccccgcccccaccaacggcaccagcggcccccccctggacttccccgagagattccccgccagcaccttcttctgggccctgaccgccctgctggtgaccagcgccgccgccttcagaggcctgctgctgctgctgcccagcctgcccagcgtgaccaccggcggcagcggccccgagctgcagctgggcagccccggcgccgaggaggaggagaaggaggaggaggaggccctgcccctgcaggagccccccagccaggccgccggcaccatccccggccccgaccccgaggcccaccagctgttcagcgcccacggcgccttcctgctgggcctgatggccttcaccagcgccgtgaccaacggcgtgctgcccagcgtgcagagcttcagctgcctgccctacggcagactggcctaccacctggccgtggtgctgggcagcgccgccaaccccctggcctgcttcctggccatgggcgtgctgtgcagaagcctggccggcctggtgggcctgagcctgctgggcatgctgttcggcgcctacctgatggccctggccatcctgagcccctgcccccccctggtgggcaccaccgccggcgtggtgctggtggtgctgagctgggtgctgtgcctgtgcgtgttcagctacgtgaaggtggccgccagcagcctgctgcacggcggcggcagacccgccctgctggccgccggcgtggccatccaggtgggcagcctgctgggcgccggcgccatgttcccccccaccagcatctaccacgtgttccagagcagaaaggactgcgtggacccctgcggcccctag

SEQ ID NO: 196049 - DNA, 1053 bp, Artificial Sequence
  derived and/or modified sequence
atggccgcccccaccctgggcagactggtgctgacccacctgctggtggccctgttcggcatgggcagctgggccgccgtgaacggcatctgggtggagctgcccgtggtggtgaaggacctgcccgagggctggagcctgcccagctacctgagcgtggtggtggccctgggcaacctgggcctgctggtggtgaccctgtggagacagctggcccccggcaagggcgagcaggtgcccatccaggtggtgcaggtgctgagcgtggtgggcaccgccctgctggcccccctgtggcaccacgtggcccccgtggccggccagctgcacagcgtggccttcctgaccctggccctggtgctggccatggcctgctgcaccagcaacgtgaccttcctgcccttcctgagccacctgcccccccccttcctgagaagcttcttcctgggccagggcctgagcgccctgctgccctgcgtgctggccctggtgcagggcgtgggcagactggagtgcccccccgcccccaccaacggcaccagcggcccccccctggacttccccgagagattccccgccagcaccttcttctgggccctgaccgccctgctggtgaccagcgccgccgccttcagaggcctgctgctgctgctgcccagcctgcccagcgtgaccaccggcggcagcggccccgagctgcagctgggcagccccggcgccgaggaggaggagaaggaggaggaggaggccctgcccctgcaggagccccccagccaggccgccggcaccatccccggccccgaccccgaggcccaccagctgttcagcgcccacggcgccttcctgctgggcctgatggccttcaccagcgccgtgaccaacggcgtgctgcccagcgtgcagagcttcagctgcctgccctacggcagactggcctaccacctggccgtggtgctgggcagcgccgccaaccccctggcctgcttcctggccatgggcgtgctgtgcagatgctgcagaggctgctgcgtgtgcgtgtgcagccacatgtag

SEQ ID NO: 196050 - protein, 879 aa, Artificial Sequence
  derived and/or modified sequence
MMFYRLLSIVGRQRASPGWQNWSSARNSTSAAEARSMALPTQAQVVICGGGITGTSVAYHLSKMGWKDIVLLEQGRLAAGSTRFCAGILSTARHLTIEQKMADYSNKLYYQLEQETGIQTGYTRTGSIFLAQTQDRLISLKRINAGLNVIGIPSEIISPKKVAELHHLLNVHDLVGAMHVPEDAVVSSADVALALASAASQNGVQIYDRTSVLHVMVKKGQVTGVETDKGQIECQYFVNCAGQWAYELGLSNEEPVSIPLHACEHFYLLTRPLETPLQSSTPTIVDADGRIYIRNWQGGILSGGFEKNPKPIFTEGKNQLEIQNLQEDWDHFEPLLSSLLRRMPELETLEIMKLVNCPETFTPDMRCIMGESPAVQGYFVLAGMNSAGLSFGGGAGKYLAEWMVHGYPSENVWELDLKRFGALQSSRTFLRHRVMEVMPLMYDLKVPRWDFQTGRQLRTSPLYDRLDAQGARWMEKHGFERPKYFVPPDKDLLALEQSKTFYKPDWFDIVESEVKCCKEAVCVIDMSSFTKFEITSTGDQALEVLQYLFSNDLDVPVGHIVHTGMLNEGGGYENDCSIARLNKRSFFMISPTDQQVHCWAWLKKHMPKDSNLLLEDVTWKYTALNLIGPRAVDVLSELSYAPMTPDHFPSLFCKEMSVGYANGIRVMSMTHTGEPGFMLYIPIEYALHVYNEVMSVGQKYGIRNAGYYALRSLRIEKFFAFWGQDINNLTTPLECGRESRVKLEKGMDFIGRDALLQQKQNGVYKRLTMFILDDHDSDLDLWPWWGEPIYRNGQYVGKTTSSAYSYSLERHVCLGFVHNFSEDTGEEQVVTADFINRGEYEIDIAGYRFQAKAKLYPVASLFTQKRRKDDMELSDLHGK

SEQ ID NO: 196051 - protein, 779 aa, Artificial Sequence
  derived and/or modified sequence
MADYSNKLYYQLEQETGIQTGYTRTGSIFLAQTQDRLISLKRINAGLNVIGIPSEIISPKKVAELHHLLNVHDLVGAMHVPEDAVVSSADVALALASAASQNGVQIYDRTSVLHVMVKKGQVTGVETDKGQIECQYFVNCAGQWAYELGLSNEEPVSIPLHACEHFYLLTRPLETPLQSSTPTIVDADGRIYIRNWQGGILSGGFEKNPKPIFTEGKNQLEIQNLQEDWDHFEPLLSSLLRRMPELETLEIMKLVNCPETFTPDMRCIMGESPAVQGYFVLAGMNSAGLSFGGGAGKYLAEWMVHGYPSENVWELDLKRFGALQSSRTFLRHRVMEVMPLMYDLKVPRWDFQTGRQLRTSPLYDRLDAQGARWMEKHGFERPKYFVPPDKDLLALEQSKTFYKPDWFDIVESEVKCCKEAVCVIDMSSFTKFEITSTGDQALEVLQYLFSNDLDVPVGHIVHTGMLNEGGGYENDCSIARLNKRSFFMISPTDQQVHCWAWLKKHMPKDSNLLLEDVTWKYTALNLIGPRAVDVLSELSYAPMTPDHFPSLFCKEMSVGYANGIRVMSMTHTGEPGFMLYIPIEYALHVYNEVMSVGQKYGIRNAGYYALRSLRIEKFFAFWGQDINNLTTPLECGRESRVKLEKGMDFIGRDALLQQKQNGVYKRLTMFILDDHDSDLDLWPWWGEPIYRNGQYVGKTTSSAYSYSLERHVCLGFVHNFSEDTGEEQVVTADFINRGEYEIDIAGYRFQAKAKLYPVASLFTQKRRKDDMELSDLHGK

SEQ ID NO: 196052 - DNA, 2340 bp, Artificial Sequence
  derived and/or modified sequence
atggccgactacagcaacaagctgtactaccagctggagcaggagaccggcatccagaccggctacaccagaaccggcagcatcttcctggcccagacccaggacagactgatcagcctgaagagaatcaacgccggcctgaacgtgatcggcatccccagcgagatcatcagccccaagaaggtggccgagctgcaccacctgctgaacgtgcacgacctggtgggcgccatgcacgtgcccgaggacgccgtggtgagcagcgccgacgtggccctggccctggccagcgccgccagccagaacggcgtgcagatctacgacagaaccagcgtgctgcacgtgatggtgaagaagggccaggtgaccggcgtggagaccgacaagggccagatcgagtgccagtacttcgtgaactgcgccggccagtgggcctacgagctgggcctgagcaacgaggagcccgtgagcatccccctgcacgcctgcgagcacttctacctgctgaccagacccctggagacccccctgcagagcagcacccccaccatcgtggacgccgacggcagaatctacatcagaaactggcagggcggcatcctgagcggcggcttcgagaagaaccccaagcccatcttcaccgagggcaagaaccagctggagatccagaacctgcaggaggactgggaccacttcgagcccctgctgagcagcctgctgagaagaatgcccgagctggagaccctggagatcatgaagctggtgaactgccccgagaccttcacccccgacatgagatgcatcatgggcgagagccccgccgtgcagggctacttcgtgctggccggcatgaacagcgccggcctgagcttcggcggcggcgccggcaagtacctggccgagtggatggtgcacggctaccccagcgagaacgtgtgggagctggacctgaagagattcggcgccctgcagagcagcagaaccttcctgagacacagagtgatggaggtgatgcccctgatgtacgacctgaaggtgcccagatgggacttccagaccggcagacagctgagaaccagccccctgtacgacagactggacgcccagggcgccagatggatggagaagcacggcttcgagagacccaagtacttcgtgccccccgacaaggacctgctggccctggagcagagcaagaccttctacaagcccgactggttcgacatcgtggagagcgaggtgaagtgctgcaaggaggccgtgtgcgtgatcgacatgagcagcttcaccaagttcgagatcaccagcaccggcgaccaggccctggaggtgctgcagtacctgttcagcaacgacctggacgtgcccgtgggccacatcgtgcacaccggcatgctgaacgagggcggcggctacgagaacgactgcagcatcgccagactgaacaagagaagcttcttcatgatcagccccaccgaccagcaggtgcactgctgggcctggctgaagaagcacatgcccaaggacagcaacctgctgctggaggacgtgacctggaagtacaccgccctgaacctgatcggccccagagccgtggacgtgctgagcgagctgagctacgcccccatgacccccgaccacttccccagcctgttctgcaaggagatgagcgtgggctacgccaacggcatcagagtgatgagcatgacccacaccggcgagcccggcttcatgctgtacatccccatcgagtacgccctgcacgtgtacaacgaggtgatgagcgtgggccagaagtacggcatcagaaacgccggctactacgccctgagaagcctgagaatcgagaagttcttcgccttctggggccaggacatcaacaacctgaccacccccctggagtgcggcagagagagcagagtgaagctggagaagggcatggacttcatcggcagagacgccctgctgcagcagaagcagaacggcgtgtacaagagactgaccatgttcatcctggacgaccacgacagcgacctggacctgtggccctggtggggcgagcccatctacagaaacggccagtacgtgggcaagaccaccagcagcgcctacagctacagcctggagagacacgtgtgcctgggcttcgtgcacaacttcagcgaggacaccggcgaggagcaggtggtgaccgccgacttcatcaacagaggcgagtacgagatcgacatcgccggctacagattccaggccaaggccaagctgtaccccgtggccagcctgttcacccagaagagaagaaaggacgacatggagctgagcgacctgcacggcaagtag

SEQ ID NO: 196053 - DNA, 2640 bp, Artificial Sequence
  derived and/or modified sequence
atgatgttctatagattgcttagtatagtcggaagacagagggcctcgcctgggtggcagaattggagttcagccaggaattccacatcggccgccgaagcccgctctatggccctgcctacccaagcccaggtggtaatatgtgggggaggcatcactggcacaagtgtggcctatcacctctccaaaatggggtggaaagacattgttctgttggagcagggtcggctggcagctgggtccactaggttttgcgctgggattttgtcgactgctagacacctcaccatcgaacagaaaatggccgattattctaataagctctattaccagctcgagcaggaaacagggatccaaacgggatacacacgtaccgggagcatctttctagctcagacccaggatagattgatttcacttaagcgcatcaatgctgggttaaacgttatcggaataccttccgagattattagccctaagaaggtggccgaacttcaccacctccttaatgtgcacgaccttgtcggcgccatgcacgttccagaggatgccgtggtaagtagcgcggacgtcgcgcttgctctggcctcagcagcttcacagaacggggtgcagatctatgaccgtacctccgtactacacgtcatggttaagaaagggcaggtcacaggagtggagaccgacaaaggccagattgagtgccagtactttgtcaactgcgccgggcagtgggcctacgaacttggactcagcaacgaggagcctgtttctatcccgctgcatgcctgtgagcacttctacctgctgacgcgacctctcgagacgcctctccagtcttccacccccacaattgtggacgccgatgggcgcatttatatccggaattggcagggcggaatactgtcagggggattcgagaagaatcccaagccaattttcacagaggggaaaaatcagctggaaatccagaacttgcaagaagactgggatcactttgagcccctactgagttcacttcttcggaggatgccagaactagaaactcttgaaatcatgaagcttgtgaactgtccggagacgttcacccccgacatgagatgcattatgggagaaagtcccgcggttcagggatactttgttttggccggtatgaacagcgccgggctcagttttggcggcggagcaggaaagtaccttgcagagtggatggtccatggttacccgagtgagaatgtgtgggaactggatttgaaacgctttggcgcactgcagtcatctcgcacctttcttaggcaccgtgtcatggaagtaatgcccctcatgtatgatctgaaagtgccacggtgggattttcaaacaggacgtcaacttaggacttctcccctctatgataggcttgatgcccagggggcccgatggatggagaagcatggttttgaaaggcccaaatacttcgtgccacctgacaaggacttgctggcactcgaacaatcaaaaaccttttataagcccgattggttcgatatagtagagtccgaggttaagtgttgcaaagaggccgtttgcgtgatagatatgtcttcctttactaagtttgaaatcacctcaaccggagatcaggcattagaggttctgcagtacctgttttccaatgacttagacgtgcctgttggccacatagtgcataccggcatgctgaatgagggcggtggctacgaaaatgattgtagcatcgctaggctcaacaagcgctcttttttcatgattagccctaccgatcagcaggtgcactgctgggcttggctcaaaaaacacatgccgaaggattccaacctactgctggaagacgtgacgtggaaatatactgctctgaatcttataggccctcgcgctgtcgatgtactctccgagttaagttatgccccaatgacgcctgatcactttcctagtttattctgtaaagagatgagtgttggatacgccaacggcatcagggtcatgtcaatgactcataccggagagcctgggtttatgctgtatatacccatcgaatacgcactgcatgtgtacaacgaggtgatgtcggtcggccagaaatatggaattagaaacgctgggtactatgcgcttcgatccctgcgaatcgagaaatttttcgccttctggggacaagacattaacaatttgaccacccctctcgagtgcggaagggagtcccgggtaaagctggagaaaggaatggacttcattggccgggatgcgttactgcaacagaagcagaatggagtttataaaaggttaacaatgtttatcttggacgatcacgactccgacctcgacctgtggccctggtggggcgagcccatctaccgcaacggccaatatgttgggaagaccactagttccgcctactcctacagccttgagaggcacgtgtgtctggggttcgtccataatttcagcgaggacactggggaagagcaggtggtaactgcggattttatcaatcgcggtgaatacgaaatcgacatcgccgggtacagatttcaagcaaaggctaagctttacccagtagcttctctgttcacccagaagcggcgtaaagatgacatggagctttctgatctccatggcaaatag

SEQ ID NO: 196054 - DNA, 2340 bp, Artificial Sequence
  derived and/or modified sequence
atggctgattattctaacaagctgtactaccagctggagcaggagacaggaatccagacgggatacacccgaacagggagtatcttcctggcccagacacaggacaggctcatctcccttaaaaggataaatgccgggctgaatgtcatcggaattccgtccgagataatctcgcccaagaaagtggcggagttacatcatctgttgaacgtgcatgacttggtcggggccatgcacgtgccggaggatgccgtcgtgtcttccgccgatgtggctctggcgttggcaagcgctgcatcccagaacggtgttcagatctacgaccggacttcagtcctgcatgtgatggttaagaaggggcaagtgaccggggtcgaaacagataagggtcagattgaatgtcagtacttcgtgaattgcgcggggcagtgggcctacgaattggggctgtctaacgaagagccagtgagtatacctctgcacgcctgtgaacatttctatctgctaactcggcctctagagacaccacttcagtccagtaccccaacaattgtcgatgcagacggaaggatttatatcaggaactggcagggtggaatactaagcggtggttttgaaaagaatcccaagccaatctttacagaaggcaaaaatcagttggaaatccagaatctccaagaggattgggaccactttgaaccactcctctctagtctgctcagacgaatgcctgaattggaaacattagaaatcatgaaattggttaactgtccggagacgttcacaccggatatgcgctgcatcatgggagagagccccgccgtgcagggctactttgtgctagccggcatgaactccgctggcctttcttttggaggcggcgcgggcaagtacctggcagagtggatggtgcacgggtacccaagcgaaaacgtgtgggagctcgatctcaaacgctttggggcgctccagagctctcgtacctttctgaggcacagggtgatggaggtcatgcctcttatgtacgatctcaaagtgccccgatgggactttcagacagggcgtcagctaaggacatctcccctgtatgaccgcctggacgcccaaggagcaaggtggatggagaaacacggattcgagcgtcccaaatacttcgtccctccagataaggatcttctggccctggagcagtcgaaaacgttctacaagccagactggtttgacattgtcgagtcagaagtgaaatgctgcaaggaagccgtctgcgtgatcgacatgtccagcttcaccaaattcgaaataactagcacgggcgaccaggctttggaggtgttacagtatcttttctcaaatgacctagatgttcccgtgggccacatagtgcacacgggcatgcttaatgagggcgggggttatgagaacgattgtagtatcgcacgccttaacaaacgatccttttttatgattagtcccaccgatcagcaggtacattgctgggcatggttaaagaaacacatgcctaaagactctaacttgctgctggaggatgttacatggaagtacaccgctcttaatctcatagggccacgcgccgttgacgtgctgagtgagctctcatacgcaccgatgactccagatcactttccatccttgttctgcaaagagatgtctgtcggctatgctaacggtatccgcgtcatgagcatgacacacaccggagagccggggttcatgctgtacataccaatcgagtacgcactgcatgtgtataatgaagtgatgagtgttgggcaaaaatacggtatccgcaacgcggggtattacgccctccggtcacttcggattgaaaagtttttcgcattctgggggcaggatataaacaacctcacgacgcctctggagtgcggcagagaatcgagagtgaagttggaaaaggggatggacttcatcggtagagacgcactgctgcagcagaagcagaatggcgtgtataaacgactaactatgttcatcctggacgaccatgacagcgacttggacctgtggccctggtggggcgagccaatttatagaaatgggcagtatgtgggcaagacaacaagctcagcctattcctactccctggagaggcatgtgtgtctgggcttcgtacacaacttttctgaggacaccggggaggagcaggtagtaaccgcagactttattaataggggtgagtacgaaatcgatatcgctggctatagatttcaagccaaggctaaactgtatcccgtggctagtttgtttacgcagaaacggcggaaagatgacatggaactcagtgacctgcacggaaaatag

SEQ ID NO: 196055 - DNA, 2640 bp, Artificial Sequence
  derived and/or modified sequence
atgatgttctaccgcctgctgagcatcgtgggccggcagagggccagccctggctggcagaactggagcagcgccaggaacagcaccagcgctgctgaggcccgctccatggccctgcccacccaggcccaggtggtgatctgtggcggcggcatcaccggcacctctgtggcctaccacctgagcaagatgggctggaaggacatcgtgctgctggagcagggccgcctggccgccggcagcacccgcttctgtgccggcatcctgagcacagcccggcacctgaccatcgagcagaagatggctgactacagcaacaagctgtactaccagctggagcaggagaccggcatccagacaggctacaccaggacaggcagcatcttcctggcccagacccaggacaggctcatcagcctgaagaggatcaatgccggcctgaatgtcatcggcatccccagcgagatcatcagccccaagaaggtggccgagctgcaccacctgctgaatgtgcatgacctggtgggcgccatgcacgtgcctgaagatgctgtggtgagcagcgcagatgtggccctggccctggccagcgctgccagccagaatggagtgcagatctatgacaggacctctgtgctgcacgtgatggtgaagaagggccaggtgactggagtggagacagacaagggccagatcgagtgccagtactttgtgaactgtgccggccagtgggcctatgagctgggcctgagcaatgaggagcctgtgtccatccccctgcacgcctgtgagcacttctacctgctgacccggcccctggagacccccctgcagagcagcacccccaccatcgtggatgctgatggccgcatctacatccggaactggcagggcggcatcctgagcggcggctttgagaagaaccccaagcccatcttcacagagggcaagaaccagctggagatccagaacctgcaggaggactgggaccactttgagcccctgctgagcagcctgctgcggaggatgcctgagctggagaccctggagatcatgaagctggtgaactgcccagagaccttcaccccagacatgcgctgcatcatgggagagagccctgctgtgcagggctactttgtgctggccggcatgaacagcgctggcctgagctttggaggaggagctgggaagtacctggccgagtggatggtgcacggctaccccagtgaaaatgtgtgggagctggacctgaagagatttggagccctgcagagcagcaggaccttcctgcggcaccgggtgatggaggtgatgcccctgatgtatgacctgaaggtgccccgctgggacttccagacaggccggcagctgcggaccagccccctgtatgaccggctggatgcccagggcgcccgctggatggagaagcacggctttgagcggcccaagtactttgtgcccccagacaaggacctgctggccctggagcagagcaagaccttctacaagccagactggtttgatattgtggagagcgaggtgaagtgctgcaaggaggccgtgtgtgtgattgacatgagcagcttcaccaagtttgagatcaccagcactggagaccaggccctggaggtgctgcagtacctgttcagcaatgacctggatgtgcctgtgggccacatcgtgcacacaggcatgctgaatgaaggaggcggctatgaaaatgactgcagcatcgcccggctgaacaagaggagcttcttcatgatcagccccacagaccagcaggtgcactgctgggcctggctgaagaagcacatgcccaaggacagcaacctgctgctggaggatgtgacctggaagtacacagccctgaacctgattggccccagggctgtggatgtgctgtctgagctgtcctatgcccccatgaccccagaccacttccccagcctcttctgcaaggagatgtctgtgggctacgccaacggcatccgggtgatgtccatgacccacactggagagcccggcttcatgctgtacatccccattgaatatgccctgcacgtgtacaatgaggtgatgtctgtgggccagaagtatggcatcagaaatgccggctactatgccctgcggagcctgagaattgagaagttctttgccttctggggccaggacatcaacaacctgaccacccccctggagtgtggccgggagagccgggtgaagctggagaagggcatggacttcatcggcagagatgccctgctgcagcagaagcagaatggagtgtacaagaggctgaccatgttcatcctggatgaccatgacagcgacctggacctgtggccctggtggggcgagcccatctacagaaatggccagtatgtgggcaagaccaccagcagcgcctacagctacagcctggagagacatgtgtgcctgggctttgtgcacaacttcagcgaggacaccggggaggagcaggtggtgacagctgacttcatcaacagaggagaatatgaaattgatattgctggctaccgcttccaggccaaggccaagctgtaccctgtggccagcctcttcacccagaagaggaggaaggatgacatggagctgagtgacctgcacggcaagtag

SEQ ID NO: 196056 - DNA, 2340 bp, Artificial Sequence
  derived and/or modified sequence
atggctgactacagcaacaagctgtactaccagctggagcaggagaccggcatccagacaggctacaccaggacaggcagcatcttcctggcccagacccaggacaggctcatcagcctgaagaggatcaatgccggcctgaatgtcatcggcatccccagcgagatcatcagccccaagaaggtggccgagctgcaccacctgctgaatgtgcatgacctggtgggcgccatgcacgtgcctgaagatgctgtggtgagcagcgcagatgtggccctggccctggccagcgctgccagccagaatggagtgcagatctatgacaggacctctgtgctgcacgtgatggtgaagaagggccaggtgactggagtggagacagacaagggccagatcgagtgccagtactttgtgaactgtgccggccagtgggcctatgagctgggcctgagcaatgaggagcctgtgtccatccccctgcacgcctgtgagcacttctacctgctgacccggcccctggagacccccctgcagagcagcacccccaccatcgtggatgctgatggccgcatctacatccggaactggcagggcggcatcctgagcggcggctttgagaagaaccccaagcccatcttcacagagggcaagaaccagctggagatccagaacctgcaggaggactgggaccactttgagcccctgctgagcagcctgctgcggaggatgcctgagctggagaccctggagatcatgaagctggtgaactgcccagagaccttcaccccagacatgcgctgcatcatgggagagagccctgctgtgcagggctactttgtgctggccggcatgaacagcgctggcctgagctttggaggaggagctgggaagtacctggccgagtggatggtgcacggctaccccagtgaaaatgtgtgggagctggacctgaagagatttggagccctgcagagcagcaggaccttcctgcggcaccgggtgatggaggtgatgcccctgatgtatgacctgaaggtgccccgctgggacttccagacaggccggcagctgcggaccagccccctgtatgaccggctggatgcccagggcgcccgctggatggagaagcacggctttgagcggcccaagtactttgtgcccccagacaaggacctgctggccctggagcagagcaagaccttctacaagccagactggtttgatattgtggagagcgaggtgaagtgctgcaaggaggccgtgtgtgtgattgacatgagcagcttcaccaagtttgagatcaccagcactggagaccaggccctggaggtgctgcagtacctgttcagcaatgacctggatgtgcctgtgggccacatcgtgcacacaggcatgctgaatgaaggaggcggctatgaaaatgactgcagcatcgcccggctgaacaagaggagcttcttcatgatcagccccacagaccagcaggtgcactgctgggcctggctgaagaagcacatgcccaaggacagcaacctgctgctggaggatgtgacctggaagtacacagccctgaacctgattggccccagggctgtggatgtgctgtctgagctgtcctatgcccccatgaccccagaccacttccccagcctcttctgcaaggagatgtctgtgggctacgccaacggcatccgggtgatgtccatgacccacactggagagcccggcttcatgctgtacatccccattgaatatgccctgcacgtgtacaatgaggtgatgtctgtgggccagaagtatggcatcagaaatgccggctactatgccctgcggagcctgagaattgagaagttctttgccttctggggccaggacatcaacaacctgaccacccccctggagtgtggccgggagagccgggtgaagctggagaagggcatggacttcatcggcagagatgccctgctgcagcagaagcagaatggagtgtacaagaggctgaccatgttcatcctggatgaccatgacagcgacctggacctgtggccctggtggggcgagcccatctacagaaatggccagtatgtgggcaagaccaccagcagcgcctacagctacagcctggagagacatgtgtgcctgggctttgtgcacaacttcagcgaggacaccggggaggagcaggtggtgacagctgacttcatcaacagaggagaatatgaaattgatattgctggctaccgcttccaggccaaggccaagctgtaccctgtggccagcctcttcacccagaagaggaggaaggatgacatggagctgagtgacctgcacggcaagtag

SEQ ID NO: 196057 - DNA, 2640 bp, Artificial Sequence
  derived and/or modified sequence
atgatgttctaccggctgctgagcatcgtgggccggcagcgggcctcacctggctggcagaactggtcatccgcccggaacagtacttccgctgccgaagcccggagtatggccttgccaacccaggctcaggttgtgatttgtggcggggggatcaccgggaccagcgtagcatatcacctgagtaagatgggttggaaagacatcgttttactcgaacagggtcgcctggctgctgggagtacaagattctgcgcggggatccttagtacggctcgacacctcaccattgaacagaagatggccgactactccaataagttgtattaccaattggaacaggagacgggtattcaaactggatacacgagaaccggctccatttttctggcccagactcaggaccggctaatctctctaaagcgcattaatgccggactgaacgtgatcggaataccttccgaaatcattagtcctaagaaagtggccgagctgcaccatctcttgaacgtgcatgacctggtcggggccatgcatgtcccagaggatgctgtggtgagtagtgctgatgtggccttagcactcgccagcgcagcttcccaaaatggtgtgcaaatatacgaccgaacaagtgtgttacatgttatggtgaagaaagggcaggtcaccggcgttgagactgacaagggacagatcgaatgtcagtattttgtgaattgcgcaggccaatgggcgtatgagctcggcctctctaacgaggagcccgtgtcaatccccctccacgcatgtgagcacttttacttgctgacgaggccacttgaaactcccttgcaatcctccacaccaactattgtcgatgctgacgggcgaatctatattcggaattggcagggggggatcttatctggcgggttcgagaagaaccccaagccaatttttacagaaggtaaaaaccaattggagattcaaaatctgcaggaggattgggaccatttcgagcctttgctatcctcacttctgagacgtatgcctgagctagagaccctggaaattatgaagctagtgaactgccctgagacatttactccagacatgagatgtattatgggggaatctcctgcagttcaaggatacttcgtgctggcaggcatgaattccgctgggttatccttcggtggcggcgctggcaaatacctggccgaatggatggttcacggctaccctagcgaaaatgtctgggagctggatcttaaaagattcggagctctgcagagttcacgtacgttccttcgccatagagttatggaggtcatgcccctgatgtatgacctgaaggttcctagatgggactttcagaccgggaggcagctcaggaccagccctctgtatgaccgcctggacgcacagggagcaagatggatggaaaagcatggatttgagcgtcccaaatacttcgtgcccccggataaagatctgctggccctggagcagagcaagaccttttacaaacccgactggtttgacattgtcgagtctgaggttaagtgctgcaaagaagcagtttgtgtgatcgatatgagcagttttacgaagtttgaaatcacaagcaccggcgaccaagcgctcgaagtgttacagtatctattcagcaacgacctggatgtccctgtgggccacatcgtgcataccggaatgttgaacgagggaggcgggtatgagaacgattgctcaattgctaggctgaacaaacggtcctttttcatgatctcacctacggatcagcaggtgcactgttgggcttggctgaaaaaacacatgcccaaagactcaaacttgcttctcgaagatgttacttggaagtacacagccctgaatttgatcggaccccgtgcagtagatgtcttgagcgaactaagctatgccccgatgacccccgatcacttcccctcgttattttgtaaggaaatgtccgtcgggtatgctaacggcatcagggtgatgtcgatgacacatactggggagccgggatttatgctttacatcccaatcgagtatgccctacacgtttataacgaggtgatgtctgtgggacagaaatacggcatcagaaatgccgggtactacgccctccgttcactcaggatcgagaagtttttcgcattctggggccaggacattaacaacctgaccacacccctggagtgtggacgagaaagtagagtaaaacttgaaaagggtatggactttatcggcagggacgccttacttcaacagaaacagaatggagtttacaagcggttaaccatgttcattctcgacgatcacgacagtgatctggacctgtggccctggtggggagagcccatttacaggaatggtcagtacgtgggcaagactacaagctccgcttattcttactctttggagcgacatgtgtgccttggtttcgtgcacaacttctctgaagacactggggaggagcaagtagtgactgccgactttatcaaccgcggcgagtatgagatcgatatcgctgggtaccgcttccaggccaaggcaaagttatacccggtggcatcactttttacccagaagcgcaggaaagatgacatggagctgtcagatttgcacgggaagtag

SEQ ID NO: 196058 - DNA, 2734 bp, Artificial Sequence
  derived and/or modified sequence
aactgttgtggctgccgcattgctcccgccgggctgtagctgagcgcggagcccgtggggaccggtgaggctggctgctggctctaccaggttctgtgctggcatcctgagcactgccaggcacttgaccattgagcagaagatggcagactactcaaacaaactctactatcagttagagcaagaaacagggatccaaacaggttacacaaggacaggctcaatctttctggcccaaactcaggaccgactgatctccctgaagcgcatcaacgcagggctgaatgttataggtatcccttctgagatcatctcccccaagaaagtggccgagcttcaccatctcctcaacgtgcacgacctggtgggggccatgcatgttcccgaggatgcagtggtgtcttccgctgacgtggctcttgccctggcaagtgctgcctcccaaaatggtgttcagatctatgaccggacatctgttcttcatgtaatggtcaaaaaaggtcaagttactggagtggagaccgataaaggacagattgaatgccagtattttgtcaactgtgctggccagtgggcatacgagctgggtctgtccaacgaggagccggttagtatcccgctacatgcctgcgaacacttctacctcctgactcgccccttggagacccctctgcagagcagcacaccaactattgtggatgctgatggaagaatttatattcggaactggcagggtggcatcctgtctgggggctttgagaagaacccgaaaccaattttcactgagggcaagaaccagctggagattcagaatctacaggaagactgggatcactttgagcctctgttgagttcccttctgaggaggatgccagaattagagactctggagatcatgaagttggtgaactgcccagagaccttcacaccagacatgaggtgcatcatgggcgagtctcctgcagtgcagggctactttgtcctggcaggaatgaactctgctggcctttcatttggtggaggagccggaaagtaccttgccgaatggatggtacatggttatccctcagaaaacgtttgggaattggacctgaaacgttttggagccctccagagcagccgcacctttctgcgccaccgggtcatggaagtcatgcctttgatgtatgatctgaaggttccccgctgggacttccagaccggtaggcagttacgcacctctcctctctacgaccggctggatgcacagggagccaggtggatggagaaacatggatttgagaggccaaagtactttgttccccccgacaaggacctcctggcattggagcagagcaagactttctataagccagattggtttgacatcgtggagtctgaagtcaagtgctgtaaggaagctgtgtgtgtcattgacatgtcctctttcacaaagtttgagataacatccactggggatcaggcattagaagttctacagtacctcttctccaatgacctggatgtgcctgtgggccacattgtgcatactggcatgctcaacgagggtggagggtatgaaaatgactgcagcatagcacgactgaacaagcgcagtttcttcatgatctctccaaccgaccagcaggtccactgttgggcctggcttaagaaacacatgccgaaagacagcaacctgctcctggaggacgtcacctggaagtacacagccctcaatctgattggccctcgagctgtggatgtgctgtctgagttgtcctatgcccctatgactccagaccacttcccaagcctcttttgcaaggagatgagtgtgggctatgcaaatgggatccgggtgatgagcatgacgcacacaggagagccaggattcatgctctacatccccatagagtacgccctgcatgtatacaatgaagtgatgagtgttggccagaaatacggaatccggaatgctgggtattacgctcttcgcagtctccgaattgagaagttttttgccttctggggtcaggatataaataacctcaccacgcccctggaatgtggacgagagtctcgggtgaaattagagaagggcatggatttcattggtcgcgacgccctcctgcagcagaagcagaatggagtgtataaacgcctcaccatgttcatcctggacgaccatgattcagacctagacctttggccttggtggggagagcccatttaccggaatgggcagtatgttggcaagaccaccagcagtgcctacagctacagcctggagcgccacgtttgcctgggctttgtgcacaatttttctgaggacacgggggaagagcaagtggtgacagcagatttcatcaaccggggagagtatgagattgacatcgcgggataccgcttccaggccaaggccaagctctaccctgtcgcctccctcttcacccagaagcgccgaaaggatgacatggagctgagtgacttacatgggaagtgatgccaccagggcagcctcacctcctccccatcatcttgtcctagagtgggcgtcaccttggagcttctcttccttccgcctctgttcctcttctggagcctttgcctcccatctcttatctccttgatataattttgaacttgacctactttaaacttttttgctctgcagccttccttgcccttccacctcctcctcctaatattcactctgggctcttcttcccttcccacccctcactcagcttctcgt

SEQ ID NO: 196059 - DNA, 2340 bp, Artificial Sequence
  derived and/or modified sequence
atggccgactacagcaacaagctgtactaccagctggagcaggagacaggcattcaaaccgggtatactaggacgggatccatcttcctggcccaaacacaggatcggctgatttcattaaagcgcattaacgccggccttaacgtgattggaatccccagcgagatcatttctccgaaaaaggtcgctgagctgcatcacctgctgaatgtccacgacttagttggagcaatgcatgtgcctgaggatgcggtggtctcctcagccgacgtcgcacttgcactggctagtgctgcatcccagaacggcgtgcagatctacgatcggaccagcgtgcttcacgtgatggtcaagaagggccaggtcacgggagtcgagaccgacaagggccagatcgagtgccagtactttgtgaactgtgcggggcaatgggcctatgagctgggactttcaaatgaagagcctgtgtccattcccctgcacgcatgtgaacacttttaccttttaactaggccactggaaactcccctacaaagctccacgccaaccattgtggacgctgacgggagaatctacataagaaattggcagggcggaattttgagcgggggtttcgagaaaaatcccaaaccaatctttaccgaggggaaaaatcaattagagatccaaaatctccaggaggattgggaccacttcgaaccccttctgtctagcctgctgcggaggatgccggagctggagactctcgagataatgaagttggtcaactgccccgaaacttttacgccagatatgcggtgcatcatgggcgaatctcccgccgtgcagggctacttcgtcctggccggaatgaacagcgccgggctgtcgttcggtggaggggcaggcaaatacctcgccgaatggatggtgcatgggtacccttccgagaacgtgtgggaattagacctgaagaggttcggagcacttcagtctagccggactttccttcggcaccgtgtgatggaagtcatgccattgatgtatgatcttaaagtccccaggtgggatttccagactggccgtcaattgcgtacctcccccctttacgaccggctggacgcacagggagcaagatggatggagaaacacggttttgaacgacctaagtacttcgtgccaccagacaaggacctgctggccctggagcagagcaaaacgttttataagcctgactggttcgatatcgtggagagcgaagtgaagtgttgtaaggaggcagtctgtgtgattgacatgagctctttcacaaagttcgaaatcacatctaccggagatcaggcccttgaggtgttacagtatctcttctctaacgatcttgatgtgccagtaggccatatcgtccacactggcatgcttaacgagggcggtggctacgaaaatgactgcagtatcgcccgtttaaacaaaaggtcttttttcatgatttctccgactgatcagcaggttcactgctgggcttggttgaagaagcatatgcctaaggactctaatctgcttctggaggatgtgacttggaagtataccgcactgaacctaatcgggccacgcgctgtcgacgtgctcagcgagctgtcctacgcaccaatgacacccgatcattttccgtctctcttttgtaaggagatgagcgttggctatgcaaatggtatcagggtgatgagcatgactcacaccggagaaccaggtttcatgctgtatatccccatcgagtacgcattgcacgtctataatgaagtgatgtctgtaggacagaagtacggcattcgcaatgctgggtactacgctttgcggagccttcgcatcgaaaaattcttcgctttttgggggcaagatatcaataatcttactacccccttggagtgcggaagagagtcacgcgttaaacttgagaaaggaatggactttatcggccgggatgccctactgcaacagaagcaaaacggagtctataaacgactcactatgttcatcctggacgaccacgattcagacttggatctgtggccctggtggggggagccgatttaccgcaacggacaatacgtgggcaaaaccacgagttccgcatacagttatagtctggaacgccatgtgtgtttgggcttcgtgcacaatttctctgaagacacgggtgaggagcaagttgttacagctgacttcattaataggggtgaatacgagatcgatatcgccggatacaggtttcaagcaaaggcaaagttgtaccctgtcgcgtccctcttcactcagaagcgacggaaggatgatatggagctttccgatctgcacgggaaatag

SEQ ID NO: 196060 - DNA, 2640 bp, Artificial Sequence
  derived and/or modified sequence
atgatgttttatagactgctttccatcgttggcagacaaagagcttccccagggtggcaaaattggagttccgctcgcaacagcacttccgccgcagaggcccgaagcatggccctccctacacaggcgcaagtggtcatctgcggtggcggtattactgggacctccgtcgcctatcatttgagtaagatggggtggaaagatatagtgcttctggagcagggcagactggccgctggttctacccgattctgtgcaggcatcctgagcacagctagacatttaaccattgagcagaagatggcagattactctaacaagctttattatcagcttgagcaggaaaccggaattcagactggctataccagaacagggtctatctttctagcgcagacccaagataggctgatctctctgaagagaataaatgctggactgaatgtgatcggaatccctagtgagattatttcacctaaaaaggtggcagagctccaccacctccttaatgttcacgatctggtgggcgctatgcatgttccagaggacgcagtcgtgagcagcgccgacgtggccctggcgttagcttctgcagccagccagaacggtgtgcaaatctacgacaggactagcgtcttgcacgtgatggtgaaaaaaggacaggttacaggggtggagaccgacaagggacagattgagtgtcaatactttgtgaactgtgccggtcagtgggcttacgaacttggcttatctaacgaggaacccgtgagcattccactccatgcttgcgaacacttttatcttctgacgagacccctggaaaccccactgcagagctccacacccactatcgtggatgcagacgggcgtatatacattcggaattggcaaggcggaattctttcaggcggattcgaaaagaatcctaagcccatttttaccgagggcaaaaaccaactggaaattcagaacctgcaggaagattgggaccattttgagccccttctgagtagcttactgagaaggatgccagagttagagactctggaaatcatgaaacttgtgaattgccccgagacctttacacctgacatgagatgcataatgggcgagtctccggcagtgcagggatacttcgtgctggcgggtatgaactcagcgggtctgtctttcggcggtggcgctgggaaatacctagccgagtggatggtccacggctatccaagtgaaaatgtttgggagcttgacctgaaaaggtttggtgcactgcagagcagccggaccttcttgaggcatcgcgtaatggaggtcatgcctctgatgtatgatctcaaggtgccgagatgggacttccagaccggcagacagttacgcaccagtcctctgtatgataggttagatgcgcagggcgctcggtggatggaaaaacacggttttgagagaccaaaatacttcgtccctcccgacaaagatctcttagcgttggaacaaagtaaaacattttacaaaccagattggttcgatatcgtggagtccgaggtgaagtgttgcaaggaagctgtatgcgtcattgacatgagctcatttacaaaatttgaaataacctcaactggcgatcaagcccttgaagtgttgcagtatctcttttccaacgatttagacgttcccgtcggtcacattgtgcacacaggaatgttgaatgaaggcggtggctatgaaaacgattgtagtatcgcaagactgaataagaggagtttcttcatgatatcgcctactgatcagcaggtgcactgttgggcatggctgaagaagcacatgcccaaagacagtaatctactcctggaagacgtgacctggaaatacacagcgttaaacctgatcgggccaagggccgtcgatgtcctgtctgagctaagttatgccccaatgacccctgaccattttccctccctgttctgtaaagaaatgtccgtgggctacgccaatggaatccgcgttatgagcatgacccacactggggaacccggttttatgttgtatattcccattgaatacgctttgcatgtctataatgaggttatgtcagttggccagaagtacggcatccgcaatgccggttattatgccctgagatcactacgaatcgagaaattcttcgctttttggggccaggacattaacaatctgactactcctcttgagtgcgggagggagagtagggttaagcttgagaaaggtatggattttattgggcgagatgcgctgctgcagcagaagcagaacggggtctataagcggctcacaatgttcattctcgatgatcacgactcagatttagacctgtggccctggtggggtgaacctatttaccggaatggacagtatgtgggcaaaacaacttcaagcgcatatagttattcactggagcgccacgtgtgcttgggcttcgtgcacaattttagcgaggatacgggcgaggagcaggtggtgacggctgatttcattaatcgcggagagtatgagatcgacattgcagggtaccgcttccaggccaaagccaagctgtacccggtagcctctttgtttactcagaaacgaagaaaggacgacatggaattgtccgacctgcatggcaaatag

SEQ ID NO: 196061 - DNA, 2340 bp, Artificial Sequence
  derived and/or modified sequence
atggccgattactccaacaaactgtattaccaacttgagcaggagaccggaattcagaccggctatacccgcactggttccattttcctcgctcagacccaagaccggctaatcagcctaaagcgcatcaatgcaggtctgaacgtgatcgggatcccttcagaaatcatctcgcccaagaaggttgccgagttacaccatcttctcaatgttcatgatctggtgggcgcaatgcacgtacctgaagacgctgtggtatcttctgcggatgttgccctggccctggcgagcgcggcaagtcagaacggggtacagatctatgatcgcacatcggtattacatgtgatggtgaagaaggggcaggtgaccggagtggaaaccgataagggccagatcgaatgccagtatttcgtcaactgtgcagggcagtgggcctatgagctgggactgtccaacgaagagcctgtttctattcccctccacgcctgcgagcacttttatctgctgaccaggccgctggagacacctctccagtccagcacccctacgatcgtcgatgccgatggtaggatctacattcgcaactggcaaggagggattctcagtggaggatttgaaaagaatccaaaacctatatttactgaggggaaaaatcagttagaaatacagaacctccaggaggattgggatcacttcgagccgctccttagctccctcctgcgaaggatgccggaactggagacactcgaaattatgaaactcgtcaactgtcctgagacttttaccccagacatgcggtgcatcatgggcgaatcacctgcagtccaggggtattttgtactggctggcatgaatagtgctggcctgtcttttgggggtggcgctggaaagtatcttgcagaatggatggttcatggctacccctctgagaatgtttgggaactcgaccttaagcgcttcggcgctctccagagttcccgcacctttctgcgtcatagagtgatggaagtcatgcctttgatgtatgacctcaaggtgcctagatgggatttccagacaggaagacagcttcgaacctctcctttatatgatcgattggacgcacagggcgctcggtggatggagaaacacggcttcgagcggccaaaatactttgtgcctcctgataaagatctgctagccctcgagcaaagtaagacattctataaaccagattggttcgacatagtcgaaagtgaagtgaaatgctgtaaggaagccgtgtgcgtgatagacatgagttcgtttacgaagttcgaaattacatccactggtgaccaggccctcgaggtgctgcagtatctttttagtaatgacctcgacgtgccagtgggacatatcgtgcacaccgggatgcttaatgaggggggagggtatgagaatgactgttctattgcaagactcaacaaacgatctttcttcatgatctcaccaacggatcagcaggtgcactgctgggcctggcttaagaaacacatgcctaaggactccaatctattactggaagatgtgacctggaagtacacagcgctgaacctcatcggcccacgggcagtggatgtactctccgagctttcctatgcacccatgactccagaccactttccttctctgttctgtaaggagatgtcggtgggatacgccaacggtatccgcgtgatgtcaatgacacacacaggagagcctggcttcatgttgtacattccgatcgagtatgcactccatgtctacaacgaagtgatgtccgttggacagaagtacggaatacggaacgctggttattacgccttgagaagcctccggattgagaagtttttcgcattttgggggcaggacatcaacaacctgactaccccacttgagtgtggtagagaatcccgtgtgaagctcgaaaaaggtatggatttcattgggcgagatgcccttttgcagcaaaagcagaatggagtttacaagcggctgaccatgtttatcctggatgatcatgacagtgatctcgacctctggccctggtggggtgaaccaatttataggaatggacaatatgtcggtaagacaacttcaagtgcttattcctattccctggagagacacgtgtgccttggctttgtgcataatttttctgaagatactggagaggagcaagtggttactgctgattttataaacagaggagagtacgagatagacatagctggctatagatttcaggctaaagcgaagctttaccctgtcgcgtctttgtttacacaaaaacgcagaaaagatgatatggagctaagcgacttacacggaaaatag

SEQ ID NO: 196062 - DNA, 8020 bp, Artificial Sequence
  derived and/or modified sequence
cagtgatgagttctagaaggaaagaaaaggctgatgtgacagtgaggaagggatgagtggagacttctctgagacttcagtgattcctcttcctctgagctgagccaagctgagaagctgagaagagtaagatagggccgggaactcaggtccgttagtccgtcctccgaggtggggcgggccagcagaatggatttccgatctactctgtgagagcctcgcccaagaaagcccagagccacttccaagatccgcgctcccacggcgatgagaagcgttttcccccgggactgcttggcttaggactggggacccactggctttggagtaagccctggcacgggcctcgagggaagaaagaactcccgcgctccccacactccacagggcctgcgatcatctcagatgttccggttccacgtgcagaaaccccgccggtccgaggccccggttctaaaacggccctaagagtcaaggcttccacagctcgcctctgagggtggcaaagaggccgcgggggcggtgcctcgcgagacccaaacaagcccacgtggcaggggcggggctccgcgaaggcgtcacggcgcgctcgtgcgctgctgaggtcacgcgccggcagtacccttgcccgggggccgtaaagcgcggaaggtcgcggtctcggcttccccggaactttttgctcgcttcgccccgcccccttcccatccccgaaccccgctttccggcccgcggcgaccccaggcaactgttgtggctgccgcattgctcccgccgggctgtagctgagcgcggagcccgtggggaccggtgagatggaactgttttcccgcgttgagacgtgcggtccgcttgtgcttttagaactaaagactgctgcagagtccggaggaagaagtcacctagaaaaatctgggacagggcatttgagttcctgagatctagttggtgagagacatgatgttctaccggttgctgtcgattgttggaagacaaagagccagcccaggatggcagaactggtcctctgcaagaaacagcacgtcagctgccgaggcgcgttccatggccctgcccacccaggcacaggtggtcatctgtggaggtggaatcacgggcacttctgtggcctatcacctctccaaaatggggtggaaggatattgtccttttggagcagggcaggctggctgctggctctaccaggttctgtgctggcatcctgagcactgccaggcacttgaccattgagcagaagatggcagactactcaaacaaactctactatcagttagagcaagaaacagggatccaaacaggttacacaaggacaggctcaatctttctggcccaaactcaggaccgactgatctccctgaagcgcatcaacgcagggctgaatgttataggtatcccttctgagatcatctcccccaagaaagtggccgagcttcaccatctcctcaacgtgcacgacctggtgggggccatgcatgttcccgaggatgcagtggtgtcttccgctgacgtggctcttgccctggcaagtgctgcctcccaaaatggtgttcagatctatgaccggacatctgttcttcatgtaatggtcaaaaaaggtcaagttactggagtggagaccgataaaggacagattgaatgccagtattttgtcaactgtgctggccagtgggcatacgagctgggtctgtccaacgaggagccggttagtatcccgctacatgcctgcgaacacttctacctcctgactcgccccttggagacccctctgcagagcagcacaccaactattgtggatgctgatggaagaatttatattcggaactggcagggtggcatcctgtctgggggctttgagaagaacccgaaaccaattttcactgagggcaagaaccagctggagattcagaatctacaggaagactgggatcactttgagcctctgttgagttcccttctgaggaggatgccagaattagagactctggagatcatgaagttggtgaactgcccagagaccttcacaccagacatgaggtgcatcatgggcgagtctcctgcagtgcagggctactttgtcctggcaggaatgaactctgctggcctttcatttggtggaggagccggaaagtaccttgccgaatggatggtacatggttatccctcagaaaacgtttgggaattggacctgaaacgttttggagccctccagagcagccgcacctttctgcgccaccgggtcatggaagtcatgcctttgatgtatgatctgaaggttccccgctgggacttccagaccggtaggcagttacgcacctctcctctctacgaccggctggatgcacagggagccaggtggatggagaaacatggatttgagaggccaaagtactttgttccccccgacaaggacctcctggcattggagcagagcaagactttctataagccagattggtttgacatcgtggagtctgaagtcaagtgctgtaaggaagctgtgtgtgtcattgacatgtcctctttcacaaagtttgagataacatccactggggatcaggcattagaagttctacagtacctcttctccaatgacctggatgtgcctgtgggccacattgtgcatactggcatgctcaacgagggtggagggtatgaaaatgactgcagcatagcacgactgaacaagcgcagtttcttcatgatctctccaaccgaccagcaggtccactgttgggcctggcttaagaaacacatgccgaaagacagcaacctgctcctggaggacgtcacctggaagtacacagccctcaatctgattggccctcgagctgtggatgtgctgtctgagttgtcctatgcccctatgactccagaccacttcccaagcctcttttgcaaggagatgagtgtgggctatgcaaatgggatccgggtgatgagcatgacgcacacaggagagccaggattcatgctctacatccccatagagtacgccctgcatgtatacaatgaagtgatgagtgttggccagaaatacggaatccggaatgctgggtattacgctcttcgcagtctccgaattgagaagttttttgccttctggggtcaggatataaataacctcaccacgcccctggaatgtggacgagagtctcgggtgaaattagagaagggcatggatttcattggtcgcgacgccctcctgcagcagaagcagaatggagtgtataaacgcctcaccatgttcatcctggacgaccatgattcagacctagacctttggccttggtggggagagcccatttaccggaatgggcagtatgttggcaagaccaccagcagtgcctacagctacagcctggagcgccacgtttgcctgggctttgtgcacaatttttctgaggacacgggggaagagcaagtggtgacagcagatttcatcaaccggggagagtatgagattgacatcgcgggataccgcttccaggccaaggccaagctctaccctgtcgcctccctcttcacccagaagcgccgaaaggatgacatggagctgagtgacttacatgggaagtgatgccaccagggcagcctcacctcctccccatcatcttgtcctagagtgggcgtcaccttggagcttctcttccttccgcctctgttcctcttctggagcctttgcctcccatctcttatctccttgatataattttgaacttgacctactttaaacttttttgctctgcagccttccttgcccttccacctcctcctcctaatattcactctgggctcttcttcccttcccacccctcactcagcttctcgtggtggcaggaggtatgtctgacaggacagaagcaagctccactgtggacatgagtgatggtgacagctgctttcaaattctgcatctcaaggcagggcaagccggggtggtgcaggtctcagggcacgagtccctctcccttgggttccattttcttggagcagcctattagttctggtggggttgccgtgtgtcggatgcagccctgaggggcagctcgtgcctgcagcccggcagctcgttctcctgttctgctgtgctgtgggctggcactcgatacctctggcaagaggatgattatctacctcactgataagaggcatcgcatggacgttctctggtctgtagtggagacaagcagttaacctagcaccatcctcatcctccctgcagaagccattagcagacctttgggccagggcagcctccctataattttcttcatctcttgctaatctctataataaggttgctttttctttcttagttgagtaaacaagtaagccacagtgtttgaaagggaaaaaccatattgccttgtgtgttgcttttcccagtcaaaagggtctgaccttagaaagtccccaccagtgatgctgagtgttctgctatggaaacaatgctgcttttctctcagctgtccaaagttcagccgttcctccttccccttctcccagtgcgtttgactttgtcaggtcagcctcacttgtccctttcacagttggcccataaagtcatgtttctctccctttagaatagggaggggaagggatcaggtgtgttgtcctgggcctttcaaccttgcgggctgtgctgagttccagagagctgccggaattccaggtttgactctccagcacagagcagagctacacagaggtgacccacgttagtccactgagagttctgagtccaaagggtgtacgttgcataaggctagagaccgcttttcctcctttccccccaggctctttgtttccctccacccacccttccatatcctctggagcaggagacaatgtgggtgcccagaagtgccctgcgctttcaggcagtgtctctgttttcccaaggtgaaacttagatatcatggactgttgtccagcctcaatgcttcattttccccttgcatatcaactgccctaatctgactttttttaagtgcaaataaactgctataagacattttggttagtaaaactctagcctttggcgtgttggtatcttggaagcattagctctgataggtctataagtgtattaagggacatccttccatttcattagagcagcttaaaatgctcaggtgtctgccttctctggtgtttctttgggatctctgtttacccacttacgctggctccttctagacatttcttgccacttccccaactagaccactcctagtgattactgactttagtgcctaaacctttttggaaggttctggttggcttgttagaggagcatatgattagaattctgtttgggggtctagttgtcttggagcaagtatgtacttaactagccgagagatgctgcctctaggcagagaggaggagaggtgttgccggctggagggccaaccagtgaacaccagctgtgaaggccttgggagaggaggaacaggcccttgggcagatgcaggcattaccagcagggagcagacttacctccgaagatggagacaggtgactgagagctgcaggcctcctctgctcttccaaacacgtagcatttgcacccctccaaagccatctttgtaaaggaaaacgtatttgtaattgaatccagaagaatttagttacacatagacataactcttcaaccttaactatggcaatacatttgtgctttaactgttacatagcagtatcaccacttaccaggatccaaatcgaaataataaaagctgtctccatagtttaaaatcgaatagtgccatcatcacagtatattagtcaaatagaagcttcatcagaaatgtatcccacatagagttttaagacttggattctcttctgcccttgttaatctccaactaattactacagattgacacgtttttaattagctgtcctttgtaagaagtcaggaaatctgatgctgtgtccaaaattatgcactgtttgttgaagtagaaccagaaatcctgacctcctgttaaatgacatcagtttccccctctgagcaacagactgcttgtcttgctaggagaggaggatggggggctgagcactcaggctgtccattgaaaccccttgtccatgaatagggtcatactcctaagactgatggggtgttgatcttctaggacatcacttgtttattcagtgccccaaacacagatttctcttctagcactttagagttgatccttgaagtctctcctggttcattcaaatacaagctgtgtgagtctggtggttttctgtgattggtctaatgtgagctctttgaacagacagatctgacagtgaatgactctcccctgcttctggcataactgctttgcctctgtctagtgtccaagcatcttagctgttcaagaggagagggcagcataacttcctgaccaccggtgtcagatatcagagcattctggactcctgagaggcagtggcctcttgagtgaacaggggaggccagtagatgccccagatccagagccgtggctgcaaatccagcaggaataaggagggacaaccacagcctcctcatccatgtgtcatttccaagggtttgccttgtgtctcagctcattctgggcagcacgtttgtcttctgtccctagagatttgaaggattttggactcttgtgaatgggtgactggacttggctttacagagttgggtgcttttttctctctgcaattacctgtcatagcattttgtgctcaccacgaaggatggtctctgccttctcttgtcggtgtatgccatctgaacctaggaacacaaagtatattggcctcaaacggagacccagggttgccagttttccgtgggccttcccctcccttgaaatgtctttaattacctccccttcatcgtcaggccacgtgtgacttctgttcttagcactgccagggtcattgacttccatctaagcttgcatcaggaagatgttccttctgtgatcattggtactgaagccagaaaagctctcattcaggaactctgaagagcaaaaagggacaaacactaactgctgagctgggccatttgatctcctttcaccttgcattgctgtcacagcaccttgtatgatggcaggacaggctccagcagagagaactgcacagtgaccactgtatttttcacgctcttccagggatccctgtcccccgacattgaagagatctcattcaggccagagacacagagaccacatagcccagtgattaaaccccggtttcactctggccccaggagtggagcctggccactcctgtttggttctcactgggaggcccactggccttggatcatctcctcatgcacacccggagttttacctgcttgcttgctttcctggactgctgtttgcaagaaagtaactaaaacatgaaaagtaaacctccagcttccacagtatattacctgccgttgcatgcatttgaaagttagcctcctcccttgccaccgtcttggtggcagtagcgatgcaagaatgatgggagctttccgagagcgttcagtgtttcactgaagacaggacccatagccttcatttctggctctgtgtctcctctggcatatggacacatttcctggcatttgcctgagtctacaccactttttgagaacctgaaatagaagggaatcttctgtggcccacagtctccatattggcactagaagactggcctggcggaggaatttgcgttggcttgctttcaggggttagctacaagattcagctttatatctctgttgcttcttggccagtgtagtcaataagggtcttctttaacatctaagatagaggtttggttggccgggcgtggtcgcttactcctgtaatcccagcactttgggaggcccagtgaggtgggagaattgcttgaacccaggaggcagaggttgcagtgagctgagattgcaccactgcactccagcctgggtaacagagtgagactcttgtctcaaaaaaaaaaaaaaaaaaatc

SEQ ID NO: 196063 - DNA, 2640 bp, Artificial Sequence
  derived and/or modified sequence
atgatgttctacagactgctgagcatcgtgggcagacagagagccagccccggctggcagaactggagcagcgccagaaacagcaccagcgccgccgaggccagaagcatggccctgcccacccaggcccaggtggtgatctgcggcggcggcatcaccggcaccagcgtggcctaccacctgagcaagatgggctggaaggacatcgtgctgctggagcagggcagactggccgccggcagcaccagattctgcgccggcatcctgagcaccgccagacacctgaccatcgagcagaagatggccgactacagcaacaagctgtactaccagctggagcaggagaccggcatccagaccggctacaccagaaccggcagcatcttcctggcccagacccaggacagactgatcagcctgaagagaatcaacgccggcctgaacgtgatcggcatccccagcgagatcatcagccccaagaaggtggccgagctgcaccacctgctgaacgtgcacgacctggtgggcgccatgcacgtgcccgaggacgccgtggtgagcagcgccgacgtggccctggccctggccagcgccgccagccagaacggcgtgcagatctacgacagaaccagcgtgctgcacgtgatggtgaagaagggccaggtgaccggcgtggagaccgacaagggccagatcgagtgccagtacttcgtgaactgcgccggccagtgggcctacgagctgggcctgagcaacgaggagcccgtgagcatccccctgcacgcctgcgagcacttctacctgctgaccagacccctggagacccccctgcagagcagcacccccaccatcgtggacgccgacggcagaatctacatcagaaactggcagggcggcatcctgagcggcggcttcgagaagaaccccaagcccatcttcaccgagggcaagaaccagctggagatccagaacctgcaggaggactgggaccacttcgagcccctgctgagcagcctgctgagaagaatgcccgagctggagaccctggagatcatgaagctggtgaactgccccgagaccttcacccccgacatgagatgcatcatgggcgagagccccgccgtgcagggctacttcgtgctggccggcatgaacagcgccggcctgagcttcggcggcggcgccggcaagtacctggccgagtggatggtgcacggctaccccagcgagaacgtgtgggagctggacctgaagagattcggcgccctgcagagcagcagaaccttcctgagacacagagtgatggaggtgatgcccctgatgtacgacctgaaggtgcccagatgggacttccagaccggcagacagctgagaaccagccccctgtacgacagactggacgcccagggcgccagatggatggagaagcacggcttcgagagacccaagtacttcgtgccccccgacaaggacctgctggccctggagcagagcaagaccttctacaagcccgactggttcgacatcgtggagagcgaggtgaagtgctgcaaggaggccgtgtgcgtgatcgacatgagcagcttcaccaagttcgagatcaccagcaccggcgaccaggccctggaggtgctgcagtacctgttcagcaacgacctggacgtgcccgtgggccacatcgtgcacaccggcatgctgaacgagggcggcggctacgagaacgactgcagcatcgccagactgaacaagagaagcttcttcatgatcagccccaccgaccagcaggtgcactgctgggcctggctgaagaagcacatgcccaaggacagcaacctgctgctggaggacgtgacctggaagtacaccgccctgaacctgatcggccccagagccgtggacgtgctgagcgagctgagctacgcccccatgacccccgaccacttccccagcctgttctgcaaggagatgagcgtgggctacgccaacggcatcagagtgatgagcatgacccacaccggcgagcccggcttcatgctgtacatccccatcgagtacgccctgcacgtgtacaacgaggtgatgagcgtgggccagaagtacggcatcagaaacgccggctactacgccctgagaagcctgagaatcgagaagttcttcgccttctggggccaggacatcaacaacctgaccacccccctggagtgcggcagagagagcagagtgaagctggagaagggcatggacttcatcggcagagacgccctgctgcagcagaagcagaacggcgtgtacaagagactgaccatgttcatcctggacgaccacgacagcgacctggacctgtggccctggtggggcgagcccatctacagaaacggccagtacgtgggcaagaccaccagcagcgcctacagctacagcctggagagacacgtgtgcctgggcttcgtgcacaacttcagcgaggacaccggcgaggagcaggtggtgaccgccgacttcatcaacagaggcgagtacgagatcgacatcgccggctacagattccaggccaaggccaagctgtaccccgtggccagcctgttcacccagaagagaagaaaggacgacatggagctgagcgacctgcacggcaagtag

SEQ ID NO: 196064 - DNA, 2355 bp, Artificial Sequence
  derived and/or modified sequence
aaagcgcggaaggtcgcggtctcggcttccccggaactttttgctcgcttcgccccgcccccttcccatccccgaaccccgctttccggcccgcggcgaccgccggcaactgttgtggctgccgcattgctcccgccgggctgtagctgagcgcggagcccgtgggggccggtgagtttgagttcctgagatctagttggtgagagacatgatgttctactggttgctgtcgattgttggaagacaaagagccagcccaggatggcagaactggtcctctgcaagaaacagcgcatcagctgccgaggcgcgttccatggccctgcccacccaggcacaggtggtcgtctgtggaggtggaatcacgggcacttctgtggcccatcaccaatccaaaatggggtggaaggatattgtccttttggagcagggcaggctggctgctggctctaccaggttctgtgctggcatcctgagcactgccaggcacttgaccattgagcagaagatggcagactactcaaacaaactctaccatcagttagagcaagaaacagggatccgaacaggttacacaaggacaggctcaatctttctggcccaaactcaggaccgactgatctccctgaagcgcatcaacgcagggctgaatgttataggtatcccttctgagatcatctcccccaagaaagtggccgagcttcaccatctcctcaacgtgcacgacctggtgggggccatgcatgttcctgaggatgcagtggtgtcttccgctgacgtggctcttgccctggcaagtgctgcctcccaaaatggtgttcagatctatgaccggacatctgttcttcaagtaatgggcaaaaaaggtcaagttactggagtggagaccgataaaggacagattgaatgccagtattttgtcaactgtgctggccagctattgtggatgctgatggaagaatttatattcggaactggcagggtggcatcctgtctgggggctttgagaagaacccaaaaccaattttcactgagggcaagaaccagctggagattcagaatctacaggggactgggatcactttgagcctctgttgagttcccttctgaggaggatgccagaattagagactctggagatcatgaagttggtgaactgcccagagaccttcgcatcagacatgaggtgcatcatgggcgagtctcctgcagtgtagggctactttgtcctggcaggaatgaactctgctggcctttcatttggtggaggagccggaaagtaccttgccgaatggatggtacatggttatccctcagaaaacgtttgggaattggacctgaaacgttttggagccctccagagcagccgcacctttctgcgccaccgggtcatggaagtcatgcctttgatgtatgatctgaaggttccccactgggacttccagaccggtaggcagttacgcacctctcctctctacgaccggctggatgcacagggagccaggtggatggagaaacatggatttgagaggccaaagtactttgttccccctgacaagggtaagaagtcacattctcatttttgctcctttttttttttgtcctgggaattaataaaacgtattttcaaatgcataggctagaatgtgttcacagaagaaaaagaaccacgtggactacactaaactctacagggccttgtgatttttccattccgtagacctcctggcattggagcagagcaagactttctataagccagattggtttgacatcgtggagtctgaagtcaagtgctgtaaggaagctgtgtgtgtcattgacatgtcctctttcacagagtttgagataacagtaagtatttgggaaccaaagtaatagattaggaaactttgcatatttattgaatgccttttgtttttcatcttcaaaactgattcctgactgggtgcagtgggtcatgcctgtattcccagcactttgggaggccaaggggggcgtggatcacctgaagtcaggagttccagaccagcctggccaagatggtaaaaccccgtttctactaaaaatacaaaaattaaggccaggagtggtggctcatgcctgtaatcccagcagtttgggaggccgagacgggtagatcacctgagatcaggagttcaagaccagcctggccaacatggcgaaaccatctctaccaaaaatacaaaaaattaaccaggcatggtggcgggcacttgtaatcccagctactcgggaggcaggagaatcgcatgaactcatgaggtggaggttgcagtgagctgagattgcgccactgcactcagcctgggcaacagagtgagactccatctc

SEQ ID NO: 196065 - protein, 1072 aa, Artificial Sequence
  derived and/or modified sequence
MPGEEEERAFLVAREELASALRRDSGQAFSLEQLRPLLASSLPLAARYLQLDAARLVRCNAHGEPRNYLNTLSTALNILEKYGRNLLSPQRPRYWRGVKFNNPVFRSTVDAVQGGRDVLRLYGYTEEQPDGLSFPEGQEEPDEHQVATVTLEVLLLRTELSLLLQNTHPRQQALEQLLEDKVEDDMLQLSEFDPLLREIAPGPLTTPSVPGSTPGPCFLCGSAPGTLHCPSCKQALCPACDHLFHGHPSRAHHLRQTLPGVLQGTHLSPSLPASAQPRPQSTSLLALGDSSLSSPNPASAHLPWHCAACAMLNEPWAVLCVACDRPRGCKGLGLGTEGPQGTGGLEPDLARGRWACQSCTFENEAAAVLCSICERPRLAQPPSLVVDSRDAGICLQPLQQGDALLASAQSQVWYCIHCTFCNSSPGWVCVMCNRTSSPIPAQHAPRPYASSLEKGPPKPGPPRRLSAPLPSSCGDPEKQRQDKMREEGLQLVSMIREGEAAGACPEEIFSALQYSGTEVPLQWLRSELPYVLEMVAELAGQQDPGLGAFSCQEARRAWLDRHGNLDEAVEECVRTRRRKVQELQSLGFGPEEGSLQALFQHGGDVSRALTELQRQRLEPFRQRLWDSGPEPTPSWDGPDKQSLVRRLLAVYALPSWGRAELALSLLQETPRNYELGDVVEAVRHSQDRAFLRRLLAQECAVCGWALPHNRMQALTSCECTICPDCFRQHFTIALKEKHITDMVCPACGRPDLTDDTQLLSYFSTLDIQLRESLEPDAYALFHKKLTEGVLMRDPKFLWCAQCSFGFIYEREQLEATCPQCHQTFCVRCKRQWEEQHRGRSCEDFQNWKRMNDPEYQAQGLAMYLQENGIDCPKCKFSYALARGGCMHFHCTQCRHQFCSGCYNAFYAKNKCPEPNCRVKKSLHGHHPRDCLFYLRDWTALRLQKLLQDNNVMFNTEPPAGARAVPGGGCRVIEQKEVPNGLRDEACGKETPAGYAGLCQAHYKEYLVSLINAHSLDPATLYEVEELETATERYLHVRPQPLAGEDPPAYQARLLQKLTEEVPLGQSIPRRRK

SEQ ID NO: 196066 - protein, 505 aa, Artificial Sequence
  derived and/or modified sequence
MPGEEEERAFLVAREELASALRRDSGQAFSLEQLRPLLASSLPLAARYLQLDAARLVRCNAHGEPRNYLNTLPTPSWDGPDKQSLVRRLLAVYALPSWGRAELALSLLQETPRNYELGDVVEAVRHSQDRAFLRRLLAQECAVCGWALPHNRMQALTSCECTICPDCFRQHFTIALKEKHITDMVCPACGRPDLTDDTQLLSYFSTLDIQLRESLEPDAYALFHKKLTEGVLMRDPKFLWCAQCSFGFIYEREQLEATCPQCHQTFCVRCKRQCEDFQNWKRMNDPEYQAQGLAMYLQENGIDCPKCKFSYALARGGCMHFHCTQCRHQFCSGCYNAFYAKNKCPEPNCRVKKSLHGHHPRDCLFYLRDWTALRLQKLLQDNNVMFNTEPPAGARAVPGGGCRVIEQKEVPNGLRDEACGKETPAGYAGLCQAHYKEYLVSLINAHSLDPATLYEVEELETATERYLHVRPQPLAGEDPPAYQARLLQKLTEEVPLGQSIPRRRK

SEQ ID NO: 196067 - protein, 170 aa, Artificial Sequence
  derived and/or modified sequence
MPGEEEERAFLVAREELASALRRDSGQAFSLEQLRPLLASSLPLAARYLQLDAARLVRCNAHGEPRNYLNTLSTALNILEKYGRNLLSPQRPRYWRGVKFNNPVFRSTVDAVQGGRDVLRLYGYTEEQPDGLSFPEGQEEPDEHQVATVTLEVLLLRTELSLLLQNTHPR

SEQ ID NO: 196068 - protein, 56 aa, Artificial Sequence
  derived and/or modified sequence
MPGEEEERAFLVAREELASALRRDSGQAFSLEQLRPLLASSLPLAARYLQLDAARL

SEQ ID NO: 196069 - DNA, 3219 bp, Artificial Sequence
  derived and/or modified sequence
atgcctggcgaggaggaagagcgggccttcctggttgccagagaagaattggccagtgcgctgaggcgagactccggtcaggcattctctctggagcagctgcggccacttctagcgtcctccctcccacttgccgcacgttacttgcagctggacgcagcacgcctggtcaggtgcaatgctcacggggagccccgcaactatctgaatactctgtccacggcattaaatattctggagaaatatgggaggaatctactgagtccccaacgtccacgatactggcggggcgtaaagtttaacaatcctgtgtttcgctctaccgttgatgctgtacagggcgggcgggatgtgttgcgcctttacgggtatactgaagagcagcccgacggcttaagctttcccgagggacaggaggaacctgatgaacatcaggtggcaacagtgaccctggaggtcctgcttcttcgaaccgagctgagcctactgttgcagaacacccacccacgccaacaggccctcgaacagcttcttgaggataaggtcgaggatgacatgctacagctttcagagtttgatccccttctcagggaaatcgcacccggccctctcacaacaccttcagtgcctggatccacacccggcccatgcttcctgtgcggtagcgcccctgggaccttacattgcccgagctgcaagcaggccctgtgccctgcatgcgatcacctttttcacggtcatccttcccgagcccaccacctgcgtcaaacattgcccggcgtgctgcagggcactcatctgtctccgtctttgccagcaagtgcccagcccagaccgcagtcaacgtctctgttggcgctgggcgactccagcttatcctctcctaatcccgcatcagctcatctgccttggcactgcgctgcatgtgctatgctgaacgaaccatgggctgtcctttgcgtggcatgtgacagaccacgcgggtgcaagggactcggactggggaccgagggtccacagggcaccggaggtctggaacctgatctcgccaggggacggtgggcctgtcagtcctgtacatttgagaacgaagcggctgctgtgttatgttcgatctgcgagcgtccgagactggctcagccaccatctttagtggtagattctagagacgccggtatttgccttcaacctctccagcaaggggatgcactgcttgcatcagcccagtcccaggtatggtattgcattcactgcacgttttgtaatagcagtcctggctgggtgtgtgtcatgtgtaatcggaccagcagcccaattcctgcacaacatgccccccgtccctatgcttcctccctggagaagggccccccaaagccagggcccccaaggcgcctgagcgctcccctgcccagtagctgcggcgatcccgagaaacagcggcaggataagatgcgggaggagggattgcagctggtgtcaatgatacgggaaggtgaggccgctggggcctgtcccgaggaaattttttctgcactccaatacagcggaactgaggtgcctctccagtggctgcgctctgaactcccctacgtcctggaaatggtcgccgaacttgcaggccagcaagaccctggcctcggagccttcagctgtcaggaggcccggcgggcctggcttgatcgtcacggaaatctggatgaggctgttgaagaatgcgtaagaacccgcaggcgcaaggttcaagaactgcagtccctgggattcggaccggaggagggctcccttcaggctctgtttcaacacgggggagacgtctcgagagctttaacggagctccagaggcagaggctggagccatttagacaacgactgtgggatagcggtcccgaacccacgccctcttgggacggacctgacaagcagtcactcgtgcgcaggctgctggctgtttacgccctgcccagttggggccgggccgaattggccctgagtctgctgcaggagacgcccagaaactacgagctgggcgatgttgtcgaagccgtgcggcactcccaagaccgcgcgtttctgcgacgactgctagcacaggaatgcgcagtctgcgggtgggcactccctcacaatagaatgcaggctttaacttcatgtgaatgcacaatctgccctgattgcttcagacagcattttacgattgctctgaaagaaaagcacataacagatatggtgtgtcccgcctgcggccgacctgacttaaccgacgatactcaactgttgtcgtacttcagtaccctggatatccagttgcgggagtcattggagcctgacgcgtatgcccttttccacaaaaagctcacagagggcgtgctgatgcgcgaccctaaatttctctggtgtgcccagtgttcattcgggttcatttacgaaagagagcaactagaggctacatgtccccagtgccaccagaccttctgcgtccgctgtaagcggcagtgggaggaacaacatagaggacggtcatgtgaggattttcaaaattggaagaggatgaatgaccctgaataccaagcacaggggctggccatgtatcttcaggagaatggcatcgactgcccaaagtgcaagtttagttacgcattggcaaggggagggtgcatgcatttccactgcacccagtgtcgccaccagttctgttcaggttgttataacgcattttacgcgaagaacaagtgccccgagcctaactgtcgggtgaagaaatcattgcacggccaccacccaagggattgccttttttatctgcgagactggacagcacttcgcctgcagaagctcctgcaggataacaatgtcatgttcaacacggagcctccagcgggagcaagagccgtccctggtggaggctgccgcgtcatcgaacagaaagaggttcccaacgggctgcgcgacgaggcatgtggaaaggagactccagcgggctacgcgggcttatgccaagctcactacaaagagtacctcgtgtccctgataaacgcccactctctagatcctgccacattgtacgaggtggaagaactggagaccgcaaccgagcgatacctccacgtgaggcctcagccccttgcaggagaagatcccccagcgtaccaagctcgattgctacagaagcttactgaagaggtgcctctgggacagtccatccctcgtcgtagaaagtag

SEQ ID NO: 196070 - DNA, 513 bp, Artificial Sequence
  derived and/or modified sequence
atgcctggggaggaggaagagcgcgcattcttggttgccagagaagaacttgcttccgcactgaggagggattcaggacaagccttttccctggaacagctccgaccactgttggcatcttctctacccctcgctgcaagatacctgcaactggatgccgcccgactcgtgaggtgtaacgctcacggggagcctcgcaactacctcaatactctgtccacagcgttaaatattctggagaagtacggtcgaaacctgttgtccccacaaagacctaggtattggcgcggggtgaagttcaataatcccgtctttcggagtactgtagatgccgtccagggtggccgcgatgtgctgcgtttatacggctacactgaggagcagccggatggcctgtcattccccgaaggacaggaagaacctgatgagcaccaggtggcgactgtgacactggaagtgttactgttgcgcacggaattgtcactgctcttgcagaatacacacccccggtag

SEQ ID NO: 196071 - DNA, 171 bp, Artificial Sequence
  derived and/or modified sequence
atgccaggggaggaggaagagcgagcgtttctggtggcgagggaggaacttgcctccgcccttcggcgagacagcgggcaggcattcagcctggagcagctgaggcctctattggccagttctctgcctctggcagcacgctacttgcagctcgatgcagctaggctgtag

SEQ ID NO: 196072 - DNA, 3219 bp, Artificial Sequence
  derived and/or modified sequence
atgcctggagaggaggaggagcgggccttcctggtggcccgggaggagctggccagcgccctgcggcgggacagcggccaggccttcagcctggagcagctgcggcccctgctggccagcagcctgcccctggccgcccgctacctgcagctggatgctgcccggctggtgcgctgcaatgcccacggggagcccaggaactacctgaacaccctgagcacagccctgaacatcctggagaagtatggcaggaacctgctgagcccccagaggccccgctactggaggggcgtgaagttcaacaaccctgtgttccgcagcacagtggatgctgtgcagggcggcagagatgtgctgcggctgtatggctacacagaggagcagccagatggcctgtccttccctgagggccaggaggagccagatgagcaccaggtggccaccgtgaccctggaggtgctgctgctgaggacagagctgagcctgctgctgcagaacacccacccccggcagcaggccctggagcagctgctggaggacaaggtggaggatgacatgctgcagctgtctgaatttgaccccctgctgcgggagatcgcccctggccccctgaccacccccagcgtgcccggcagcaccccaggcccctgcttcctgtgtggcagcgcccctggcaccctgcactgccccagctgcaagcaggccctgtgcccagcctgtgaccacctgttccacggccaccccagccgggcccaccacctgcggcagaccctgcccggggtgctgcagggcacccacctgagccccagcctgcctgccagcgcccagccccggccccagagcaccagcctgctggccctgggggacagcagcctgagcagccccaacccagccagcgcccacctgccctggcactgtgccgcctgtgccatgctgaatgagccctgggccgtgctgtgtgtggcctgtgaccggccccggggctgcaagggcctgggcctgggcacagagggcccccagggcaccggcggcctggagccagacctggcccggggccgctgggcctgccagagctgcacctttgaaaatgaagctgctgctgtgctgtgcagcatctgtgagcggccccggctggcccagccccccagcctggtggtggacagcagagatgctggcatctgcctgcagcccctgcagcagggagatgccctgctggccagcgcccagagccaggtgtggtactgcatccactgcaccttctgcaacagcagccctggctgggtgtgtgtgatgtgcaacagaaccagcagccccatcccagcccagcacgccccccggccctatgccagcagcctggagaagggcccccccaagccaggccccccccggcggctgagcgcccccctgcccagcagctgtggggaccctgagaagcagaggcaggacaagatgagggaggagggcctgcagctggtgtccatgatccgggagggggaggccgccggggcctgcccagaggagatcttcagcgccctgcagtacagcggcacagaggtgcccctgcagtggctgcggtctgagctgccctacgtgctggagatggtggccgagctggccggccagcaggaccccggcctgggcgccttcagctgccaggaggcccggcgggcctggctggacagacatggcaacctggatgaggccgtggaggagtgtgtgaggaccaggaggaggaaggtgcaggagctgcagagcctgggcttcggccctgaggagggcagcctgcaggccctcttccagcacggcggagatgtgtcccgggccctgacagagctgcagaggcagaggctggagcccttccggcagaggctgtgggacagcggccctgagcccacccccagctgggatggccctgacaagcagagcctggtgcggcggctgctggccgtgtatgccctgcccagctggggccgggcagagctggccctgagcctgctgcaggagaccccaagaaattatgagctgggagatgtggtggaggccgtgcgccacagccaggaccgggccttcctgcggcggctgctggcccaggagtgtgctgtgtgtggctgggccctgccccacaacaggatgcaggccctgaccagctgtgagtgcaccatctgcccagactgcttccggcagcacttcaccatcgccctgaaggagaagcacatcacagacatggtgtgcccagcctgtggccgcccagacctgacagatgacacccagctgctgagctacttcagcaccctggacatccagctgcgggagagcctggagccagatgcctatgccctcttccacaagaagctgacagagggcgtgctgatgagggaccccaagttcctgtggtgtgcccagtgcagctttggcttcatctatgaaagagagcagctggaggccacctgcccccagtgccaccagaccttctgtgtgcgctgcaagaggcagtgggaggagcagcaccggggccgcagctgtgaggacttccagaactggaagaggatgaatgaccctgagtaccaggcccagggcctggccatgtacctgcaggagaatggaattgactgccccaagtgcaagttctcctatgccctggcccggggcggctgcatgcacttccactgcacccagtgccgccaccagttctgcagcggctgctacaatgccttctacgccaagaacaagtgcccagagcccaactgccgggtgaagaagagcctgcacggccaccacccccgggactgcctcttctacctgcgggactggacagccctgcggctgcagaagctgctgcaggacaacaacgtgatgttcaacacagagcccccagctggggcccgggctgtgcctgggggcggctgcagggtcatcgagcagaaggaggtgcccaacggcctgagagatgaggcctgtgggaaggagaccccagctggctacgccggcctgtgccaggcccactacaaggagtacctggtgtccctcatcaatgcccacagcctggaccctgccaccctgtatgaggtggaggagctggagacagccacagagcgctacctgcacgtgcggccccagcccctggccggggaggaccccccagcctaccaggcccggctgctgcagaagctgacagaggaggtgcccctgggccagagcatccccaggaggaggaagtag

SEQ ID NO: 196073 - DNA, 513 bp, Artificial Sequence
  derived and/or modified sequence
atgcctggagaggaggaggagcgggccttcctggtggcccgggaggagctggccagcgccctgcggcgggacagcggccaggccttcagcctggagcagctgcggcccctgctggccagcagcctgcccctggccgcccgctacctgcagctggatgctgcccggctggtgcgctgcaatgcccacggggagcccaggaactacctgaacaccctgagcacagccctgaacatcctggagaagtatggcaggaacctgctgagcccccagaggccccgctactggaggggcgtgaagttcaacaaccctgtgttccgcagcacagtggatgctgtgcagggcggcagagatgtgctgcggctgtatggctacacagaggagcagccagatggcctgtccttccctgagggccaggaggagccagatgagcaccaggtggccaccgtgaccctggaggtgctgctgctgaggacagagctgagcctgctgctgcagaacacccaccccaggtag

SEQ ID NO: 196074 - DNA, 171 bp, Artificial Sequence
  derived and/or modified sequence
atgcctggagaggaggaggagcgggccttcctggtggcccgggaggagctggccagcgccctgcggcgggacagcggccaggccttcagcctggagcagctgcggcccctgctggccagcagcctgcccctggccgcccgctacctgcagctggatgctgcccggctgtag

SEQ ID NO: 196075 - DNA, 3219 bp, Artificial Sequence
  derived and/or modified sequence
atgcccggcgaggaggaggagcgggccttcctggtggcccgggaggaactcgccagtgcactgcgaagagactcaggacaggccttcagcctcgaacagttacgccctctgctggcttcaagcctccccctggccgcgcggtacctgcagctcgacgccgctcggctcgttcgctgcaacgcgcatggcgagccaagaaactacctaaatactttgagcacagccctaaacatactcgaaaagtatggccgcaatcttctttcgcctcaaagaccgcgctactggcgcggagtcaagttcaacaatccagtcttccgcagtaccgtggatgccgttcagggaggcagagacgttttgcgcctgtacggctatacagaagaacagcccgacggtctgtcctttcctgagggacaggaggagccagacgagcaccaagtagccactgtgacattggaggtgctgctgctgaggactgagctgtcattattactacagaacacacaccctaggcagcaggcgctggagcagctgctagaggataaggttgaggatgatatgcttcaactctctgagttcgatccactgttacgcgagattgcaccgggccctcttaccaccccaagcgttccagggtccacccctggtccttgttttctctgcggcagcgcacctggaacactccactgtccgagctgcaaacaggcgctctgtccagcttgcgatcacctttttcatgggcacccctcaagagcccaccatcttcggcagaccttgcctggggtgctccagggaacccatctgtcacctagcctgccagcttccgcccagccaaggccccagtcaacgtctttgctggcgctgggagatagttcgctgtcctctcctaaccccgcctctgcccatttaccttggcactgcgcagcatgcgcaatgcttaatgaaccttgggcagtgctgtgcgtcgcctgcgatagacctcgggggtgtaaaggacttggtctcggcacagagggcccgcagggcacaggcgggctggagcccgacctggctcgagggcgatgggcctgccagtcttgtaccttcgagaacgaagccgcagcagtgctgtgcagcatttgtgaacggccacggctcgcacagccaccaagtcttgtggttgactctcgcgacgcgggaatttgcctgcaaccactgcaacagggggacgcgctcttagcttcagcccagtcacaagtgtggtactgcatccattgcacgttctgcaattcctctcccggttgggtttgcgtgatgtgtaaccgcaccagctcccccatccccgcccagcatgctccacggccttatgcatccagtctggaaaaaggccctccaaagcccggaccaccccgccggcttagcgcaccactgcctagcagttgtggcgacccagagaaacagaggcaggataaaatgcgggaagagggcttacagcttgtgtccatgatccgcgagggcgaagcggccggggcctgtccagaagagatattctctgcgcttcagtattctggcaccgaagtcccattgcagtggctgaggtcggagctgccctatgtcctcgagatggtggccgagctggccggacagcaggatccaggtcttggggcgttctcctgtcaggaggcccgtagggcgtggctggatagacatggcaatttagatgaagctgttgaggagtgtgtgaggaccagacggcgcaaggtgcaggagttacagagcctgggctttgggccggaggagggtagtttacaggcactgttccaacacgggggcgacgtgtcccgagctctgaccgagcttcaaagacagcggcttgaaccttttcgccagcgactctgggattcgggacctgaaccaacaccctcgtgggacggccccgataaacagtcactcgtgcgccggctgcttgctgtgtatgccctcccaagttggggtcgggctgagctcgccctcagcctgctgcaggaaacccctcgaaactacgagcttggtgacgttgtagaagcagtgagacattcccaggaccgagccttcctgcgccggctattggctcaagagtgcgcggtctgtgggtgggcccttccccataataggatgcaagccctgacatcttgcgagtgcacaatttgccccgattgtttccgtcagcactttacaatcgctctgaaagagaagcatattacagacatggtttgtcccgcttgtggccgcccggacttgaccgacgacacacagctgctctcttatttcagcactctggacattcagttgagagagtctctggagcccgacgcttatgctctttttcacaaaaaactgaccgagggggtcctcatgcgtgacccaaaattcttatggtgcgcgcagtgcagtttcggcttcatatacgagagggaacagcttgaagccacttgtccccaatgccaccagactttttgcgtgcgttgtaaacgccaatgggaggaacagcaccgagggaggtcgtgtgaggacttccagaactggaaacgtatgaacgatcctgaataccaggcacagggcctggccatgtatctccaggagaacggtattgactgccccaaatgcaaattctcctacgccctggctcgtgggggatgtatgcatttccactgtacccaatgccgccatcaattctgcagcggttgttataacgccttctacgccaaaaacaaatgccccgagccaaattgtcgggtaaagaaaagcctgcacgggcaccaccccagagactgtttattctatctacgtgactggaccgccctgcggctgcagaagctgctccaggataataatgtcatgtttaatactgagccacctgctggcgcaagagccgttcctggaggaggctgtcgagtgatagagcagaaagaggtgccaaatgggctccgagacgaggcatgcgggaaagagacccccgccggctacgccggactgtgccaggctcactataaggaatatctcgttagccttattaatgcccacagcctcgacccagccactctgtacgaagtcgaagaactggagacagccaccgagaggtatctgcacgtgagaccgcaaccattggccggcgaggatcctcccgcctatcaggcacgcctattacaaaaacttaccgaggaggtcccgttgggccagtcaataccccgcagaaggaagtag

SEQ ID NO: 196076 - DNA, 513 bp, Artificial Sequence
  derived and/or modified sequence
atgcccggcgaggaggaggagcgggccttcctggtggcccgggaggagctggcttccgcgttgagacgggattcgggtcaagcattctctctggagcagctccggcctctcctagcatcgagcctcccattggctgccaggtacttgcagctggatgccgcgcggctcgtgcggtgtaatgctcatggagaaccgagaaactacctgaacaccctaagcacggcgctgaacatcttggagaaatacggcagaaaccttttgagtcctcagcgtccaagatactggcggggtgttaagttcaacaatcccgtgtttagatccacagtggacgcagtgcagggaggccgcgacgtgctcaggctctacggttacactgaggagcagcctgatggactgtcttttcctgaaggccaagaggaacctgatgagcaccaggttgcaactgttacactggaggtgttgctcttacggacagaattgagcttgctcctgcagaacacccatccgagatag

SEQ ID NO: 196077 - DNA, 171 bp, Artificial Sequence
  derived and/or modified sequence
atgcccggcgaggaggaggagcgggccttcctggtggcccgggaggaactagcttccgccctaagacgggattctggccaggccttctctctggaacaactgcgcccactgctggcgagtagcctccccctggctgctaggtacttgcaactcgatgccgcgcgactttag

SEQ ID NO: 196078 - DNA, 3219 bp, Artificial Sequence
  derived and/or modified sequence
atgcctggagaggaagaggagcgggcttttcttgtggccagagaggaactggcctcggcccttcggcgagatagcggccaggccttttctttggagcagctgcgtccactgctggcctccagcctgccactggcagcacgatacctacagctcgatgctgcacgtcttgtacgctgcaacgcccatggggaaccacggaactatctcaatactctgagcactgccttaaatatcctagagaaatatggtaggaacctactcagcccccagcgacctagatactggcgcggagttaagttcaacaacccagtgtttaggtctacagttgatgctgtccaagggggacgagacgtgctcagactctatggctatacggaagagcagccagatggactaagtttccctgagggtcaggaagagccggatgaacaccaggtggctacggtgaccctggaggtgctcctcctgcggactgagctgtcactgctcctccagaatacccatccgcgacagcaagccctggagcagttactggaagataaagtggaggatgacatgctacagctttcggagttcgatcccctgctcagagaaattgcacccggacccctgacaacaccttccgtgccaggtagcacccctggaccatgtttcctttgcggcagcgctccaggaactctgcattgcccatcctgcaaacaggctctctgtcctgcctgtgaccacctgttccacggacaccccagccgagcacatcacctgcgtcagaccctgcctggggtgctacaagggacacacctgtccccctcgttaccggcatcagctcagcctaggccacaaagtacttctctcttagctctgggtgattctagcctcagttcccccaatcccgcttcggcccacctgccatggcattgtgcggcttgtgcaatgttgaacgaaccttgggccgtgctgtgtgtcgcctgcgacaggcccagaggatgcaaagggttgggcttaggaactgaaggcccacaaggcactggaggtctggaaccagatttagcccgtgggagatgggcatgccagtcgtgtacattcgagaatgaggcagctgccgtcctctgctctatatgcgagaggcctaggctagcacaaccacctagcttggtcgtggacagtcgagacgctgggatttgtctccaaccccttcagcagggtgatgcattacttgccagcgcccagagccaggtatggtattgcatccactgtacgttttgcaactcaagtccaggatgggtgtgcgtgatgtgtaatcgaacgtcctcccccattccagcccagcacgccccacgcccttatgcaagttcccttgagaaggggcctcctaaaccaggccctcccagacggctgtccgcgccactcccgtcaagttgcggcgaccccgaaaaacagcgtcaagacaaaatgcgagaggaggggctgcagctcgtgagcatgatcagggagggagaggccgcaggcgcatgccccgaggagatctttagcgcacttcagtatagcggcaccgaggtgcctttacagtggttgaggtctgagcttccttacgtccttgaaatggttgccgaactggcaggccagcaggacccaggcctgggggcattttcttgccaggaagccagaagagcttggcttgatcgacacggaaatcttgatgaggcggtggaggagtgcgtccgaacaaggcgcaggaaagttcaggagctgcagagtttagggttcggaccggaagaaggcagtcttcaggcccttttccagcatggaggtgatgtctctcgcgctttaacagagctgcaacgacagagattggaacctttccggcaacgtctgtgggacagcggaccggagcccactccatcttgggatggcccagacaagcagtctctggttcgacgacttttggccgtgtacgccttaccttcctggggacgggctgagctggccctgtctctgctgcaagaaacccccagaaattacgagctaggagacgtggtcgaggcagtgcgccattctcaagaccgagcctttttgagaagactcctggctcaggaatgcgcagtgtgcggctgggcattgcctcataaccgaatgcaggccctcactagttgcgagtgcaccatctgccccgattgtttccgacagcatttcaccatcgccctgaaagagaaacacattactgacatggtctgcccggcatgcggtagaccggatctgacggatgatacccagttattgtcctattttagcactttggacatccagctccgcgaatcactggagccagacgcgtacgccctattccacaagaaacttactgaaggagttctcatgcgcgatcctaagttcctgtggtgcgctcagtgcagcttcggcttcatctatgagagggagcagttggaggccacctgtccacagtgtcatcagacattctgtgtgcgctgcaagcggcagtgggaagagcagcaccggggtcgcagctgcgaggattttcagaactggaagaggatgaacgacccagaatatcaggcgcaaggacttgcgatgtatctgcaggaaaacggaattgattgtcccaagtgcaaattttcatacgccctggccaggggagggtgtatgcacttccactgtacacaatgtcgccatcagttttgttccgggtgttataacgccttttatgccaaaaacaagtgccccgagccgaattgcagagttaagaagtccttacatggtcatcatcccagggattgcctgttttacttaagggactggactgccctgcgtctgcagaagttactgcaagacaataatgtgatgtttaatactgaaccccctgcaggcgcaagggccgtccctggtgggggatgcagggtgatcgaacagaaggaagtgccgaatggcttgagggatgaggcatgcggaaaggagacccctgctggctatgcaggtctctgccaggcacactacaaggaatacctcgtgtctctcatcaacgcccattcccttgacccagccacactctacgaagtggaggaattggaaactgccacagaaagatacctccacgttagaccacagcctttagcaggggaagacccacccgcttaccaggctaggctcttgcagaaactcactgaggaagtgccattaggccagagcattcctcgcaggcgcaagtag

SEQ ID NO: 196079 - DNA, 513 bp, Artificial Sequence
  derived and/or modified sequence
atgcccggagaagaggaggagcgggctttcctcgttgcaagggaggaactggcatcagccctgcgacgggattcagggcaggcgttcagcctcgagcagctccggccactgctggcctcctccctgcccctcgctgcaaggtatttacagctggacgcagcgaggctggtgcgatgtaatgcacacggcgaaccccgaaactatcttaacactctgtctacagcattaaatattctggaaaaatacggacggaacctacttagtccgcaacgacccaggtattggcggggtgttaaattcaacaaccctgtgtttaggtccacagtcgacgccgtgcagggcggtcgcgatgtgcttcgcctatatggctataccgaggaacagcctgacggactaagctttcccgaggggcaggaagagcccgatgagcatcaggtggcaaccgtcactcttgaggtgctgcttcttcggaccgagcttagccttctccttcaaaatactcaccctaggtag

SEQ ID NO: 196080 - DNA, 171 bp, Artificial Sequence
  derived and/or modified sequence
atgcccggagaggaggaggaacgtgcatttctggtggccagagaggagctcgcctctgctctccggagagatagcggtcaggcttttagcctagagcaacttaggcctctacttgcctcttccttgccattagccgctcggtatctgcagttagatgcggctaggctgtag

SEQ ID NO: 196081 - DNA, 3627 bp, Artificial Sequence
  derived and/or modified sequence
attggttgggacctggccctccctcttggccgcgccccctggtttcctgacaccgctccaaccttaaccttaagccccgcccgttcctccgaaattgggtcgcagtcccaccctctctcctagtacttcctgttctcggctaaccctggcgctgggccgggggctggagagtgaccgtggtctgagtgacctggggcggctgcgtgggccggggtgggcctcaaagccgggcaccagacgggaggggcggcgctcgggccgcgcgctgcccgcgccgggtcctggcgggcggcgaggctggggctgactcctgcctcaggatgccgggggaggaagaggagcgggccttcctggtggcccgcgaggagctggcgagcgccctgaggagggattccgggcaggcgttttccctggagcagctccggccgctactagccagctctctgccgctagccgcccgctacctgcagctggacgccgcacgccttgtccgctgcaacgctcatggggagccccgaaactacctcaacaccctgtccacggctctgaacatcctggagaaatacggccgcaaccttctcagccctcagcggcctcggtactggcgtggtgtcaagtttaataaccctgtctttcgcagcacggtggatgctgtgcaggggggccgagatgtgctgcgattatatggctacacagaggagcaaccagatgggttgagcttccccgaagggcaggaggagccagatgagcaccaggttgctacagtcacactggaagtactgctgcttcggacagagctcagcctgctattgcagaatactcatccaagacagcaggcactggagcagctgttggaagacaaggttgaagatgatatgctgcagctttcagaatttgaccccctattgagagagattgctcctggccccctcaccacaccctctgtcccaggctccactcctggtccctgcttcctctgtggttctgccccaggcacactgcactgcccatcctgtaaacaggccctgtgtccagcctgtgaccacctgttccatggacacccatcccgtgctcatcacctccgccagaccctgcctggggtcctgcagggtacccacctgagccccagtttacctgcctcagcccaaccacggccccagtcgacctccctgctggccctgggagacagctctctttcttcccctaatcctgcaagtgctcatttgccctggcactgtgctgcctgtgccatgctaaatgagccttgggcagtgctctgtgtggcctgtgatcggccccgaggctgtaaggggttggggttgggaactgagggtccccaaggaactggaggcctagaacctgatcttgcacggggtcggtgggcctgccagagctgtacctttgagaatgaggcagctgctgtgctatgttccatatgtgagcgacctcggctggcccagcctcccagcttggtggtggattcccgagatgctggcatttgcctgcaaccccttcagcagggggatgctttgctggcctctgcccagagtcaagtctggtactgtattcactgtaccttctgcaactcgagccctggctgggtgtgtgttatgtgcaaccggactagtagccccattccagcacaacatgccccccggccctatgccagctctttggaaaagggaccccccaagcctgggcccccacgacgccttagtgcccccctgcccagttcctgtggagatcctgagaagcagcgccaagacaagatgcgggaagaaggcctccagctagtgagcatgatccgggaaggggaagccgcaggtgcctgtccagaggagatcttctcggctctgcagtactcgggcactgaggtgcctctgcagtggttgcgctcagaactgccctacgtcctggagatggtggctgagctggctggacagcaggaccctgggctgggtgccttttcctgtcaggaggcccggagagcctggctggatcgtcatggcaaccttgatgaagctgtggaggagtgtgtgaggaccaggcgaaggaaggtgcaggagctccagtctctaggctttgggcctgaggaggggtctctccaggcattgttccagcacggaggtgatgtgtcacgggccctgactgagctacagcgccaacgcctagagcccttccgccagcgcctctgggacagtggccctgagcccaccccttcctgggatgggccagacaagcagagcctggtcaggcggcttttggcagtctacgcactccccagctggggccgggcagagctggcactgtcactgctgcaggagacacccaggaactatgagttgggggatgtggtagaagctgtgaggcacagccaggaccgggccttcctgcgccgcttgcttgcccaggagtgtgccgtgtgtggctgggccctgccccacaaccggatgcaggccctgacttcctgtgagtgcaccatctgtcctgactgcttccgccagcacttcaccatcgccttgaaggagaagcacatcacagacatggtgtgccctgcctgtggccgccccgacctcaccgatgacacacagttgctcagctacttctctacccttgacatccagcttcgcgagagcctagagccagatgcctatgcgttgttccataagaagctgaccgagggtgtgctgatgcgggaccccaagttcttgtggtgtgcccagtgctcctttggcttcatatatgagcgtgagcagctggaggcaacttgtccccagtgtcaccagaccttctgtgtgcgctgcaagcgccagtgggaggagcagcaccgaggtcggagctgtgaggacttccagaactggaaacgcatgaacgacccagaataccaggcccagggcctagcaatgtatcttcaggaaaacggcattgactgccccaaatgcaagttctcgtacgccctggcccgaggaggctgcatgcactttcactgtacccagtgccgccaccagttctgcagcggctgctacaatgccttttacgccaagaataaatgtccagagcctaactgcagggtgaaaaagtccctgcacggccaccaccctcgagactgcctcttctacctgcgggactggactgctctccggcttcagaagctgctacaggacaataacgtcatgtttaatacagagcctccagctggggcccgggcagtccctggaggcggctgccgagtgatagagcagaaggaggttcccaatgggctcagggacgaagcttgtggcaaggaaactccagctggctatgccggcctgtgccaggcacactacaaagagtatcttgtgagcctcatcaatgcccactcgctggacccagccaccttgtatgaggtggaagagctggagacggccactgagcgctacctgcacgtacgcccccagcctttggctggagaggatccccctgcttaccaggcccgcttgttacagaagctgacagaagaggtacccttgggacagagtatcccccgcaggcggaagtagctgagggcaagggtcccgatgagggtcccatggcctgctccctcaggaacagctccagcaccaataaagaggcatcttaccacccagg

SEQ ID NO: 196082 - DNA, 578 bp, Artificial Sequence
  derived and/or modified sequence
agttgccactaggagaggcggtgctggctgggtcacagtccaggggctgcccgagggaggggctagggatgccgggggaggaagaggagcgggccttcctggtggcccgcgaggagctggcgagcgccctgaggagggattccgggcaggcgttttccctggagcagctccggccgctactagccagctctctgccgctagccgcccgctacctgcagctggacgccgcacgccttgtccgctgcaacgctcatggggagccccgaaactacctcaacaccctgtccacggctctgaacatcctggagaaatacggccgcaaccttctcagccctcagcggcctcggtactggcgtggtgtcaagtttaataaccctgtctttcgcagcacggtggatgctgtgcaggggggccgagatgtgctgcgattatatggctacacagaggagcaaccagatgggttgagcttccccgaagggcaggaggagccagatgagcaccaggttgctacagtcacactggaagtactgctgcttcggacagagctcagcctgctattgcagaatactcatccaaga

SEQ ID NO: 196083 - DNA, 550 bp, Artificial Sequence
  derived and/or modified sequence
ttctttccgcccccctcctcccgctggcaggccgcaagcagtaggtagcccctcagccattcccagccagttgccactaggagaggcggtgctggctgggtcacagtccaggggctgcccgagggaggggctaggccccgcccgttcctccgaaattgggtcgcagtcccaccctctctcctagtacttcctgttctcggctaaccctggcgctgggccgggggctggagagtgaccgtggtctgagtgacctggggcggctgcgtgggccggggtgggcctcaaagccgggcaccagacgggaggggcggcgctcgggccgcgcgctgcccgcgccgggtcctggcgggcggcgaggctggggctgactcctgcctcaggatgccgggggaggaagaggagcgggccttcctggtggcccgcgaggagctggcgagcgccctgaggagggattccgggcaggcgttttccctggagcagctccggccgctactagccagctctctgccgctagccgcccgctacctgcagctggacgccgcacgccttg

SEQ ID NO: 196084 - DNA, 3219 bp, Artificial Sequence
  derived and/or modified sequence
atgcccggcgaggaggaggagagagccttcctggtggccagagaggagctggccagcgccctgagaagagacagcggccaggccttcagcctggagcagctgagacccctgctggccagcagcctgcccctggccgccagatacctgcagctggacgccgccagactggtgagatgcaacgcccacggcgagcccagaaactacctgaacaccctgagcaccgccctgaacatcctggagaagtacggcagaaacctgctgagcccccagagacccagatactggagaggcgtgaagttcaacaaccccgtgttcagaagcaccgtggacgccgtgcagggcggcagagacgtgctgagactgtacggctacaccgaggagcagcccgacggcctgagcttccccgagggccaggaggagcccgacgagcaccaggtggccaccgtgaccctggaggtgctgctgctgagaaccgagctgagcctgctgctgcagaacacccaccccagacagcaggccctggagcagctgctggaggacaaggtggaggacgacatgctgcagctgagcgagttcgaccccctgctgagagagatcgcccccggccccctgaccacccccagcgtgcccggcagcacccccggcccctgcttcctgtgcggcagcgcccccggcaccctgcactgccccagctgcaagcaggccctgtgccccgcctgcgaccacctgttccacggccaccccagcagagcccaccacctgagacagaccctgcccggcgtgctgcagggcacccacctgagccccagcctgcccgccagcgcccagcccagaccccagagcaccagcctgctggccctgggcgacagcagcctgagcagccccaaccccgccagcgcccacctgccctggcactgcgccgcctgcgccatgctgaacgagccctgggccgtgctgtgcgtggcctgcgacagacccagaggctgcaagggcctgggcctgggcaccgagggcccccagggcaccggcggcctggagcccgacctggccagaggcagatgggcctgccagagctgcaccttcgagaacgaggccgccgccgtgctgtgcagcatctgcgagagacccagactggcccagccccccagcctggtggtggacagcagagacgccggcatctgcctgcagcccctgcagcagggcgacgccctgctggccagcgcccagagccaggtgtggtactgcatccactgcaccttctgcaacagcagccccggctgggtgtgcgtgatgtgcaacagaaccagcagccccatccccgcccagcacgcccccagaccctacgccagcagcctggagaagggcccccccaagcccggcccccccagaagactgagcgcccccctgcccagcagctgcggcgaccccgagaagcagagacaggacaagatgagagaggagggcctgcagctggtgagcatgatcagagagggcgaggccgccggcgcctgccccgaggagatcttcagcgccctgcagtacagcggcaccgaggtgcccctgcagtggctgagaagcgagctgccctacgtgctggagatggtggccgagctggccggccagcaggaccccggcctgggcgccttcagctgccaggaggccagaagagcctggctggacagacacggcaacctggacgaggccgtggaggagtgcgtgagaaccagaagaagaaaggtgcaggagctgcagagcctgggcttcggccccgaggagggcagcctgcaggccctgttccagcacggcggcgacgtgagcagagccctgaccgagctgcagagacagagactggagcccttcagacagagactgtgggacagcggccccgagcccacccccagctgggacggccccgacaagcagagcctggtgagaagactgctggccgtgtacgccctgcccagctggggcagagccgagctggccctgagcctgctgcaggagacccccagaaactacgagctgggcgacgtggtggaggccgtgagacacagccaggacagagccttcctgagaagactgctggcccaggagtgcgccgtgtgcggctgggccctgccccacaacagaatgcaggccctgaccagctgcgagtgcaccatctgccccgactgcttcagacagcacttcaccatcgccctgaaggagaagcacatcaccgacatggtgtgccccgcctgcggcagacccgacctgaccgacgacacccagctgctgagctacttcagcaccctggacatccagctgagagagagcctggagcccgacgcctacgccctgttccacaagaagctgaccgagggcgtgctgatgagagaccccaagttcctgtggtgcgcccagtgcagcttcggcttcatctacgagagagagcagctggaggccacctgcccccagtgccaccagaccttctgcgtgagatgcaagagacagtgggaggagcagcacagaggcagaagctgcgaggacttccagaactggaagagaatgaacgaccccgagtaccaggcccagggcctggccatgtacctgcaggagaacggcatcgactgccccaagtgcaagttcagctacgccctggccagaggcggctgcatgcacttccactgcacccagtgcagacaccagttctgcagcggctgctacaacgccttctacgccaagaacaagtgccccgagcccaactgcagagtgaagaagagcctgcacggccaccaccccagagactgcctgttctacctgagagactggaccgccctgagactgcagaagctgctgcaggacaacaacgtgatgttcaacaccgagccccccgccggcgccagagccgtgcccggcggcggctgcagagtgatcgagcagaaggaggtgcccaacggcctgagagacgaggcctgcggcaaggagacccccgccggctacgccggcctgtgccaggcccactacaaggagtacctggtgagcctgatcaacgcccacagcctggaccccgccaccctgtacgaggtggaggagctggagaccgccaccgagagatacctgcacgtgagaccccagcccctggccggcgaggacccccccgcctaccaggccagactgctgcagaagctgaccgaggaggtgcccctgggccagagcatccccagaagaagaaagtag

SEQ ID NO: 196085 - DNA, 513 bp, Artificial Sequence
  derived and/or modified sequence
atgcccggcgaggaggaggagagagccttcctggtggccagagaggagctggccagcgccctgagaagagacagcggccaggccttcagcctggagcagctgagacccctgctggccagcagcctgcccctggccgccagatacctgcagctggacgccgccagactggtgagatgcaacgcccacggcgagcccagaaactacctgaacaccctgagcaccgccctgaacatcctggagaagtacggcagaaacctgctgagcccccagagacccagatactggagaggcgtgaagttcaacaaccccgtgttcagaagcaccgtggacgccgtgcagggcggcagagacgtgctgagactgtacggctacaccgaggagcagcccgacggcctgagcttccccgagggccaggaggagcccgacgagcaccaggtggccaccgtgaccctggaggtgctgctgctgagaaccgagctgagcctgctgctgcagaacacccaccccagatag

SEQ ID NO: 196086 - DNA, 171 bp, Artificial Sequence
  derived and/or modified sequence
atgcccggcgaggaggaggagagagccttcctggtggccagagaggagctggccagcgccctgagaagagacagcggccaggccttcagcctggagcagctgagacccctgctggccagcagcctgcccctggccgccagatacctgcagctggacgccgccagactgtag

SEQ ID NO: 196087 - protein, 224 aa, Artificial Sequence
  derived and/or modified sequence
MGLRDWLRTVCCCCGCECLEERALPEKEPLVSDNNPYSSFGATLVRDDEKNLWSMPHDVSHTEADDDRTLYNLIVIRNQQAKDSEEWQKLNYDIHTLRQVRREVRNRWKCILEDLGFQKEADSLLSVTKLSTISDSKNTRKAREMLLKLAEETNIFPTSWELSERYLFVVDRLIALDAAEEFFKLARRTYPKKPGVPCLADGQKELHLWGDLSCRLAHMQGVLH

SEQ ID NO: 196088 - protein, 214 aa, Artificial Sequence
  derived and/or modified sequence
MGLRDWLRTVCCCCGCECLEERALPEKEPLVSDNNPYSSFGATLVRDDEKNLWSMPHDVSHTEADDDRTLYNLIVIRNQQAKDSEEWQKLNYDIHTLRQVRREVRNRWKCILEDLGFQKEADSLLSVTKLSTISDSKNTRKAREMLLKLAEETNIFPTSWELSERYLFVVDRLIALDAAEEFFKLARRTYPKKPGVPCLADGQKELHYLPFPSP

SEQ ID NO: 196089 - DNA, 675 bp, Artificial Sequence
  derived and/or modified sequence
atgggcttacgcgattggttacgaacagtgtgttgctgttgtggatgcgaatgtcttgaagagcgagcactacctgagaaagagcccctagtctctgataacaatccctacagtagctttggagcaactctggtgagagacgacgaaaagaacctgtggagcatgccacacgacgtgtctcacaccgaagcggacgacgacagaactctttataacctgattgtcatccgcaaccaacaggcgaaagattccgaagagtggcaaaagctgaattacgatattcatacgttgcgccaagtcagaagagaagtacgtaatagatggaaatgcattctggaggatctcggtttccagaaggaggccgattccctcttgagcgttaccaaactatccaccatctccgattccaagaacacacgcaaggcccgagaaatgctcctcaagctggctgaagagaccaacatcttccctacctcctgggagctttccgaaaggtacctgttcgtggtggataggttgatcgccctagatgctgccgaggagtttttcaaattagccaggcgcacctaccccaaaaaaccaggcgtgccttgcttagcagacggccagaaagaacttcatctgtggggcgacctgagctgtagattagcgcacatgcagggggttctgcattag

SEQ ID NO: 196090 - DNA, 645 bp, Artificial Sequence
  derived and/or modified sequence
atggggctgagggactggctgcggacagtgtgttgctgctgtggatgcgaatgtttggaggaaagagctctgcctgagaaggaaccactcgtatcagataacaacccctatagctcctttggagccactctcgttcgtgatgatgaaaaaaatctctggtctatgccccacgacgtttcacacactgaagccgacgacgaccggaccctctacaacctgatcgtgataaggaaccaacaggctaaggattctgaggaatggcagaaattgaattatgacatccacactctccgccaggtgcgccgtgaggtacgcaatcggtggaaatgcattctggaggacttgggattccagaaagaggctgattcactgttgagtgtgaccaaactctccaccatctccgactcgaaaaatactcggaaggcccgggagatgctcctgaagctggcagaagagaccaatattttccccacaagttgggagctgtccgagaggtatctattcgtggttgaccggctgatcgcgctcgacgcagcagaagaatttttcaaactggcgaggcggacgtacccaaaaaagccaggcgtcccttgtttggccgatggacagaaagagctgcactacttacctttcccatcgccgtag

SEQ ID NO: 196091 - DNA, 645 bp, Artificial Sequence
  derived and/or modified sequence
atggggctaagagactggctccgaactgtgtgttgctgttgtggatgcgagtgcctagaggaaagagcactgcccgagaaagaacctctggtgagcgataataacccatatagtagtttcggcgccactctggtcagagacgatgagaaaaatttatggagtatgcctcatgacgtaagtcatacggaggctgacgatgaccggacactgtacaacctgatagttattagaaaccagcaggccaaagatagtgaggagtggcagaagctgaactatgatattcacacattaaggcaggttcgccgcgaggtccgaaacaggtggaagtgcattctggaagatctggggtttcagaaagaggccgattcactgctaagcgtgacaaagctgagcactatttctgatagtaagaatacacgcaaggctagggaaatgctgctgaaactagcagaggagaccaatatcttccctacaagttgggagctgtcggagcgatacctgtttgtcgtggacaggctgatcgcgctggatgccgctgaggaatttttcaaacttgcccgtcggacataccctaagaaacctggagtcccttgcctcgctgatggccagaaagaactgcattacctgccgttcccttccccatag

SEQ ID NO: 196092 - DNA, 675 bp, Artificial Sequence
  derived and/or modified sequence
atgggcctgcgggactggctgaggacagtgtgctgctgctgcggctgtgaatgtctggaggagcgggccctgcctgagaaggagcccctggtgtctgacaacaacccctacagcagctttggagccaccctggtgagagatgatgagaagaacctgtggagcatgcctcatgatgtgagccacacagaagcagatgatgacaggaccctgtacaacctgattgtcatccggaaccagcaggccaaggacagcgaggagtggcagaagctgaactatgacatccacaccctgcggcaggtgagaagagaggtgaggaaccgctggaagtgcatcctggaggacctgggcttccagaaggaggccgacagcctgctgtctgtgaccaagctgagcaccatcagtgacagcaagaacaccaggaaggcccgggagatgctgctgaagctggccgaggagaccaacatcttccccacctcctgggagctgtctgagcgctacctgtttgtggtggacaggctcatcgccctggatgctgctgaggagttcttcaagctggcccggaggacctaccccaagaagccaggagtgccctgcctggctgatggccagaaggagctgcacctgtggggagacctgagctgccgcctggcccacatgcagggcgtgctgcactag

SEQ ID NO: 196093 - DNA, 645 bp, Artificial Sequence
  derived and/or modified sequence
atgggcctgcgggactggctgaggacagtgtgctgctgctgcggctgtgaatgtctggaggagcgggccctgcctgagaaggagcccctggtgtctgacaacaacccctacagcagctttggagccaccctggtgagagatgatgagaagaacctgtggagcatgcctcatgatgtgagccacacagaagcagatgatgacaggaccctgtacaacctgattgtcatccggaaccagcaggccaaggacagcgaggagtggcagaagctgaactatgacatccacaccctgcggcaggtgagaagagaggtgaggaaccgctggaagtgcatcctggaggacctgggcttccagaaggaggccgacagcctgctgtctgtgaccaagctgagcaccatcagtgacagcaagaacaccaggaaggcccgggagatgctgctgaagctggccgaggagaccaacatcttccccacctcctgggagctgtctgagcgctacctgtttgtggtggacaggctcatcgccctggatgctgctgaggagttcttcaagctggcccggaggacctaccccaagaagccaggagtgccctgcctggctgatggccagaaggagctgcactacctgcccttccccagcccctag

SEQ ID NO: 196094 - DNA, 971 bp, Artificial Sequence
  derived and/or modified sequence
cggggcgtctcgtggacgcatgcgccccaaattgcgctcggggaattaaaagaggggaaaaaaagcccgaagaaaactcacgccccaaacaaaacgcaaggagaggagggcgcgcggcctgcagccctcgcccgcgtccccggccgcggcgtgatgcgcgcggaccagcccgcgacgcccgggctgccgctgtccccgcacctggacgctggcgcggtggccgcgccccagcctcgatcgctcgccgcggcgactcggccccaggcttccggcgccggtgggggccctcgctctccatggggctgagggactggctgagaaccgtgtgctgctgctgcgggtgcgagtgcttggaggagcgcgccctgcctgagaaggagcccctcgtcagtgataacaatccatattcctcatttggagcaactctggtgagggatgatgagaagaatttatggagtatgccccatgatgtgtcccacacagaggcagacgacgacagaaccctgtacaatttgatagtcattcgtaatcagcaggccaaagactcagaggagtggcagaagctcaactatgatatccataccctgcggcaggttcgaagggaagtaagaaacagatggaagtgcatcttagaagatttaggttttcaaaaggaagctgactctttgttgtcagtgactaaactcagcaccatcagtgattctaaaaacacaaggaaagctcgagagatgttgttaaaactggctgaagaaaccaatattttcccaacaagttgggagctctcagagagatatctctttgttgtggaccgtctcattgcacttgatgctgcagaagagttctttaagcttgctcgtcgaacttaccccaagaagcctggggttccatgcctggcagatggccagaaagaactgcacctgtggggggacctctcatgcagacttgcacatatgcagggagtattgcactga

SEQ ID NO: 196095 - DNA, 1314 bp, Artificial Sequence
  derived and/or modified sequence
cggggcgtctcgtggacgcatgcgccccaaattgcgctcggggaattaaaagaggggaaaaaaagcccgaagaaaactcacgccccaaacaaaacgcaaggagaggagggcgcgcggcctgcagccctcgcccgcgtccccggccgcggcgtgatgcgcgcggaccagcccgcgacgcccgggctgccgctgtccccgcacctggacgctggcgcggtggccgcgccccagcctcgatcgctcgccgcggcgactcggccccaggcttccggcgccggtgggggccctcgctctccatggggctgagggactggctgagaaccgtgtgctgctgctgcgggtgcgagtgcttggaggagcgcgccctgcctgagaaggagcccctcgtcagtgataacaatccatattcctcatttggagcaactctggtgagggatgatgagaagaatttatggagtatgccccatgatgtgtcccacacagaggcagacgacgacagaaccctgtacaatttgatagtcattcgtaatcagcaggccaaagactcagaggagtggcagaagctcaactatgatatccataccctgcggcaggttcgaagggaagtaagaaacagatggaagtgcatcttagaagatttaggttttcaaaaggaagctgactctttgttgtcagtgactaaactcagcaccatcagtgattctaaaaacacaaggaaagctcgagagatgttgttaaaactggctgaagaaaccaatattttcccaacaagttgggagctctcagagagatatctctttgttgtggaccgtctcattgcacttgatgctgcagaagagttctttaagcttgctcgtcgaacttaccccaagaagcctggggttccatgcctggcagatggccagaaagaactgcactaccttccgtttccaagtccctaaaggagaggctcaggggcagaatgggaattcttccatgaggactcagcagtcaaccaaagttggacaattacatgtagaagagagtgagcaaatagagtttgcttagtgaaaaatgatactgaattctacataaatgtaaagtctttaatctgaggaccctgccccatgaattgtgcaggctgcattgaaacgccttggtgatctcatatttaggaagaaagttaaagagttggtcagatggatagttcataatgggtggttccattctgagagcccattgccccagctttggttttagttgtgtcataatctctgatcattaatcctactgactgagtggactatttcagttaataaaacaatatgattaata

SEQ ID NO: 196096 - DNA, 2183 bp, Artificial Sequence
  derived and/or modified sequence
gaggagggcgcgcggcctgcagccctcgcccgcgtccccggccgcggcgtgatgcgcgcggaccagcccgcgacgcccgggctgccgctgtccccgcacctggacgctggcgcggtggccgcgccccagcctcgatcgctcgccgcggcgactcggccccaggcttccggcgccggtgggggccctcgctctccatggggctgagggactggctgagaaccgtgtgctgctgctgcgggtgcgagtgcttggaggagcgcgccctgcctgagaaggagcccctcgtcagtgataacaatccatattcctcatttggagcaactctggtgagggatgatgagaagaatttatggagtatgccccatgatgtgtcccacacagaggcagacgacgacagaaccctgtacaatttgatagtcattcgtaatcagcaggccaaagactcagaggagtggcagaagctcaactatgatatccataccctgcggcaggttcgaagggaagtaagaaacagatggaagtgcatcttagaagatttaggttttcaaaaggaagctgactctttgttgtcagtgactaaactcagcaccatcagtgattctaaaaacacaaggaaagctcgagagatgttgttaaaactggctgaagaaaccaatattttcccaacaagttgggagctctcagagagatatctctttgttgtggaccgtctcattgcacttgatgctgcagaagagttctttaagcttgctcgtcgaacttaccccaagaagcctggggttccatgcctggcagatggccagaaagaactgcactaccttccgtttccaagtccctaaaggagaggctcaggggcagaatgggaattcttccatgaggactcagcagtcaaccaaagttggacaattacatgtagaagagagtgagcaaatagagtttgcttagtgaaaaatgatactgaattctacataaatgtaaagtctttaatctgaggaccctgccccatgaattgtgcaggctgcattgaaacgccttggtgatctcatatttaggaagaaagttaaagagttggtcagatggatagttcataatgggtggttccattctgagagcccattgccccagctttggttttagttgtgtcataatctctgatcattaatcctactgactgagtggactatttcagttaataaaacaatatgattaatagagagagctgtcattgagtcccaaaatggattgccagttttaaaataattattataaaatgtatgctaaccccaaaataatactaggcatgaggtgacctctctgatttggtcaccttgtagaaccttggagggtgtcagggcatctctttgagtatcagttatgattattcagaagtatagatgtatcaaatgatagaaatgacaaggaatggctgggcgtggcgtgagtcaccgcgcccggccaagcccttggcattttatctggaatagcatctgtaaactgaagtgtttgacctctgttttcttctctcctctttcatctgtttctgattcgttggctggcagctgcacctgtggggggacctctcatgcagacttgcacatatgcagggagtattgcactgaagatctttgctggaccttcttctcttcagaagataattttcaaaagggagcaatgctgtgaatgcagcttgcttctctctacagattgagaagtccagcttcaaaagttacttgccacttaagcaaggaacttgtcaagagatcatggttcatgttactgaaaagactttaaggatttgtaaggttaatccatagattgctgagaaaaatggaaatatttttatttttacagattttgcacttctgaattcaggttaaaaactaacttgtatttagtctgcttagaggactgtgacttgaaaatttttatataccaatgagctttttggtagcgtccacaatgtttaaaatatttcataggcgagatccgtgttctccatttattaatgcattgtagaccaatttaactgctgtgtttcaggaaaattcttcctagtttaataagcaagctaaaagttttattttttatatttagtgcttaatctttgcctcatgttatgtaaaattagcctgcagatattttctctcaattctgtagactctcgcaagataaacattcaaaca

SEQ ID NO: 196097 - DNA, 675 bp, Artificial Sequence
  derived and/or modified sequence
atgggcctgcgggactggctgcggaccgtgtgctgctgctgcggctgcgaatgcctcgaggaacgcgccttaccggagaaagagccactggttagtgacaacaatccatatagcagttttggtgccacactagtcagggatgatgaaaaaaatctgtggagcatgccccatgatgtaagtcacaccgaagctgacgacgatagaaccttatacaacctgatagtaatacggaatcaacaagctaaagattcagaggagtggcaaaagctgaattacgatattcacactcttaggcaggtcaggcgcgaggtgcggaaccggtggaaatgtattctggaggatctggggtttcagaaagaagccgacagcctactgtccgtcacaaaactctcaacaattagtgactcgaaaaatacccggaaagcaagggaaatgctgctgaagctggccgaagagactaatatctttccgacgtcttgggaactatctgaaagatacctatttgtggtggatagattaattgctctcgatgctgcggaagaatttttcaaactggcaaggcgtacatacccaaagaaaccaggggtcccatgtttggcagacgggcagaaagagctccacttatggggggacctgtcttgcaggctcgctcacatgcagggagtgcttcattag

SEQ ID NO: 196098 - DNA, 645 bp, Artificial Sequence
  derived and/or modified sequence
atgggcctgcgggactggctgcggaccgtgtgctgctgctgcggctgcgagtgtttggaagagagggctctgccagagaaggaacccctagtgagcgacaacaatccgtacagctcatttggagctactctcgtgagagatgacgaaaagaacctttggtctatgccacacgatgtgagtcacacggaagccgacgatgacaggaccctctataatctgatcgttatccgcaaccagcaggcaaaagactcggaggaatggcagaaactgaactacgacatccacacccttcgccaggtgagaagggaagtgaggaaccggtggaagtgcatactggaggaccttgggttccagaaagaggctgactctctgttgagcgtgaccaaattgtcgactatatccgacagtaaaaacacccgaaaagcccgggagatgctgctgaaactcgccgaggagacgaacatatttccaacctcatgggagctctctgagaggtacctgttcgtggtggataggcttatcgccttggatgctgctgaagaatttttcaaattggctcgtcgcacctatccaaaaaagcctggagtgccttgcctggctgacggccagaaggaactccactacctgcctttcccaagcccttag

SEQ ID NO: 196099 - DNA, 645 bp, Artificial Sequence
  derived and/or modified sequence
atgggcctgcgggactggctgcggaccgtgtgctgctgctgcggctgcgaatgtctggaagaacgagcactcccggaaaaagaacctctcgtgtctgacaacaacccctatagcagcttcggggctactcttgtacgagacgacgaaaaaaacctttggtccatgccccacgacgtttctcataccgaagccgacgatgataggactctgtacaatctgattgttattaggaaccagcaggccaaggactccgaagagtggcagaagctgaattacgatattcataccttgcgccaggtgcgaagagaggtgagaaacagatggaaatgcattctcgaggatctagggtttcagaaggaggccgacagtttactctccgttaccaagctgtcgacgatctctgattccaaaaacaccaggaaagcgagggagatgcttctgaaactggctgaggaaacgaacatcttccctacatcctgggaattatccgaaaggtacttattcgtcgtggatcggctcatagcacttgacgcagcagaggagttcttcaagctggccaggagaacgtaccccaagaagcctggcgtcccatgcttagcggatggacaaaaggagctgcactacctgccattcccctcgccatag

SEQ ID NO: 196100 - DNA, 675 bp, Artificial Sequence
  derived and/or modified sequence
atgggtctgagggactggttaagaacagtgtgttgttgctgcgggtgcgaatgcctggaggagcgagctctccccgagaaggagcctttggtgagcgacaacaatccttacagttcctttggggctaccctggtcagggatgacgagaaaaatctgtggtccatgccacacgacgtgtcacacacagaggccgacgacgacaggacgctctacaatctgattgttatcagaaaccaacaagcgaaggattccgaagagtggcagaaactgaattacgatattcacacactccgtcaggttcggcgagaagttagaaaccgctggaagtgtattctggaagatctcggattccaaaaggaggccgacagtctgctgtcggttacaaaactttcaactatctccgattcaaagaacaccaggaaggcaagagaaatgctgctcaagctggctgaagaaaccaatatctttcctacgtcctgggagctttccgagaggtacctattcgtagtggaccgactgatcgccttagacgcagctgaggagtttttcaagctagcaagaaggacttatcctaagaagcccggagtcccatgcttggcggatggtcaaaaagaactgcacttgtggggagacctgtcctgccgtctggcacacatgcagggggtactgcattag

SEQ ID NO: 196101 - DNA, 645 bp, Artificial Sequence
  derived and/or modified sequence
atggggctgcgcgactggttacgtaccgtctgttgctgttgtggatgtgagtgcctcgaagagcgcgctctaccagagaaagaaccactggtaagcgataacaatccctacagttccttcggcgctactcttgttcgggacgatgaaaagaacctctggtctatgcctcatgatgtgtcccacacagaagccgacgatgataggaccttatataacctgatcgttataagaaaccaacaggctaaggactctgaggagtggcagaagctgaattacgatattcatacacttcgccaagttaggcgtgaggtaaggaaccggtggaaatgtatcttagaagacttaggctttcaaaaggaagcggattctctgctgagcgtgactaagctgtctaccattagtgacagtaaaaacacccgtaaggcacgggagatgctgctcaaattagctgaagaaaccaatatcttccccaccagttgggaattgagcgagagatatttattcgtggtagatcgtctgatcgccctcgatgccgctgaggaattcttcaagctggctcgtaggacataccccaagaaaccgggtgtcccttgccttgcagatgggcagaaagagctgcactatctgcctttcccctctccgtag

SEQ ID NO: 196102 - DNA, 645 bp, Artificial Sequence
  derived and/or modified sequence
atgggtctgcgcgattggctgagaactgtttgctgctgttgtggctgtgaatgcctggaggaaagggctctgccagagaaagagccgcttgtctccgacaataacccatattccagcttcggggctacgctagtgcgcgatgacgagaagaatctctggtccatgccacatgatgtctcccataccgaagctgatgacgatcggacactgtataatctgatcgttattcgtaaccagcaggcaaaagactccgaagagtggcagaagctgaactatgacattcatactctccggcaggtaagacgagaggttagaaaccgatggaaatgtatcctggaagacttggggtttcagaaggaagctgacagcctgcttagtgtaaccaagttaagcaccattagtgattcaaaaaatacgcgcaaggcccgagagatgctgctcaagttggctgaggagaccaatattttccctacttcctgggaactgagtgagaggtatcttttcgtggtggaccggctgatagctctcgacgccgcagaggaattcttcaaactcgccagaagaacctaccctaagaaaccgggagtcccatgtcttgctgacggccagaaagagttacactaccttccctttccatcgccctag

SEQ ID NO: 196103 - DNA, 675 bp, Artificial Sequence
  derived and/or modified sequence
atgggcctgagagactggctgagaaccgtgtgctgctgctgcggctgcgagtgcctggaggagagagccctgcccgagaaggagcccctggtgagcgacaacaacccctacagcagcttcggcgccaccctggtgagagacgacgagaagaacctgtggagcatgccccacgacgtgagccacaccgaggccgacgacgacagaaccctgtacaacctgatcgtgatcagaaaccagcaggccaaggacagcgaggagtggcagaagctgaactacgacatccacaccctgagacaggtgagaagagaggtgagaaacagatggaagtgcatcctggaggacctgggcttccagaaggaggccgacagcctgctgagcgtgaccaagctgagcaccatcagcgacagcaagaacaccagaaaggccagagagatgctgctgaagctggccgaggagaccaacatcttccccaccagctgggagctgagcgagagatacctgttcgtggtggacagactgatcgccctggacgccgccgaggagttcttcaagctggccagaagaacctaccccaagaagcccggcgtgccctgcctggccgacggccagaaggagctgcacctgtggggcgacctgagctgcagactggcccacatgcagggcgtgctgcactag

SEQ ID NO: 196104 - DNA, 645 bp, Artificial Sequence
  derived and/or modified sequence
atgggcctgagagactggctgagaaccgtgtgctgctgctgcggctgcgagtgcctggaggagagagccctgcccgagaaggagcccctggtgagcgacaacaacccctacagcagcttcggcgccaccctggtgagagacgacgagaagaacctgtggagcatgccccacgacgtgagccacaccgaggccgacgacgacagaaccctgtacaacctgatcgtgatcagaaaccagcaggccaaggacagcgaggagtggcagaagctgaactacgacatccacaccctgagacaggtgagaagagaggtgagaaacagatggaagtgcatcctggaggacctgggcttccagaaggaggccgacagcctgctgagcgtgaccaagctgagcaccatcagcgacagcaagaacaccagaaaggccagagagatgctgctgaagctggccgaggagaccaacatcttccccaccagctgggagctgagcgagagatacctgttcgtggtggacagactgatcgccctggacgccgccgaggagttcttcaagctggccagaagaacctaccccaagaagcccggcgtgccctgcctggccgacggccagaaggagctgcactacctgcccttccccagcccctag

SEQ ID NO: 196105 - protein, 846 aa, Artificial Sequence
  derived and/or modified sequence
MSVSNLSWLKKKSQSVDINAPGFNPLAGAGKQTPQASKPPAPKTPIIEEEQNNAANTQKHPSRRSELKRFYTIDTGQKKTLDKKDGRRMSFQKPKGTIEYTVESRDSLNSIALKFDTTPNELVQLNKLFSRAVVTGQVLYVPDPEYVSSVESSPSLSPVSPLSPTSSEAEFDKTTNPDVHPTEATPSSTFTGIRPARVVSSTSEEEEAFTEKFLKINCKYITSGKGTVSGVLLVTPNNIMFDPHKNDPLVQENGCEEYGIMCPMEEVMSAAMYKEILDSKIKESLPIDIDQLSGRDFCHSKKMTGSNTEEIDSRIRDAGNDSASTAPRSTEESLSEDVFTESELSPIREELVSSDELRQDKSSGASSESVQTVNQAEVESLTVKSESTGTPGHLRSDTEHSTNEVGTLCHKTDLNNLEMAIKEDQIADNFQGISGPKEDSTSIKGNSDQDSFLHENSLHQEESQKENMPCGETAEFKQKQSVNKGKQGKEQNQDSQTEAEELRKLWKTHTMQQTKQQRENIQQVSQKEAKHKITSADGHIESSALLKEKQRHRLHKFLCLRVGKPMRKTFVSQASATMQQYAQRDKKHEYWFAVPQERTDHLYAFFIQWSPEIYAEDTGEYTREPGFIVVKKIEESETIEDSSNQAAAREWEITTREDINSKQVATVKADLESESFRPNLSDPSELLLPDQIEKLTKHLPPRTIGYPWTLVYGTGKHGTSLKTLYRTMTGLDTPVLMVIKDSDGQVFGALASEPLKVSDGFYGTGETFVFTFCPEFEVFKWTGDNMFFIKGDMDSLAFGGGGGEFALWLDGDLYHGRSHSCKTFGNRTLSKKEDFFIQDIEIWAFE

SEQ ID NO: 196106 - DNA, 2541 bp, Artificial Sequence
  derived and/or modified sequence
atgagcgtgtcaaatttgagctggttgaaaaaaaagtctcagtccgtcgacattaatgcacctggattcaaccccctcgccggcgccgggaaacagaccccgcaggctagtaaacctcctgcccctaaaactcctataatagaggaggagcagaacaacgctgccaacacacagaaacatccctcccggcggtcagaattaaaaagattctacaccatcgacaccgggcaaaaaaagacattggataaaaaggacggccgccgcatgtcttttcagaaaccgaagggcaccattgagtatacagttgagagtcgagactcccttaattctattgcactgaaattcgacaccacccctaatgaactggttcaattgaacaaactcttcagtagggccgtggtgaccgggcaggttctctacgtgccggaccccgagtatgtatcatcggtggagtcatcaccatccctgtccccagtctcccccctgagccctacctcctctgaagcagagttcgacaaaacgactaaccccgacgtccaccccacagaggcaacacccagcagtactttcactggtattaggcccgcaagggttgtgtcgagtacatcggaagaagaagaggcctttacggagaagttccttaagattaactgcaagtacatcacgagcggtaaagggactgtcagcggggtgcttctggtcacacccaacaatatcatgtttgatccacataaaaatgaccctctggtgcaagagaatggatgtgaggaatacggaatcatgtgtccaatggaagaggtgatgtcagccgctatgtataaagagatactggattccaagattaaggagagcttacccatagacattgaccagctgtcaggaagagacttctgccattcgaagaagatgactggaagcaacaccgaggagatagacagccgaatcagagatgccggaaacgattcagcgtctacagcaccccggagcactgaggaatcgctgtcggaggatgtgttcacggagtctgaattatcacccattcgcgaagagctcgtctcttctgatgagctccggcaggacaaatcctcaggcgcgtcaagcgaatctgtgcagaccgtgaaccaggccgaggtagagtctctgacggttaaatcagagtcgaccgggacaccaggtcatctgcgcagcgataccgagcatagtaccaacgaggtgggaacgctctgccacaagactgaccttaataacctagagatggctattaaagaggaccagattgccgacaatttccagggtatctcaggtcctaaggaggactctacgagtataaaggggaatagtgatcaggattcttttttgcacgagaactctctgcatcaagaggagagtcagaaggagaacatgccctgtggcgagacggccgagttcaagcagaagcagtctgttaataaagggaagcagggcaaagagcagaaccaggactcacagaccgaggccgaagagctgcgaaaactgtggaaaacacatacgatgcagcagacaaagcagcagagagaaaacatccagcaggtctcgcagaaggaggcgaagcacaagatcacctcggctgacggccatatcgagagcagtgctctgttaaaggagaagcagagacaccggctccataagttcctatgcttgagggttgggaaacctatgcggaagacatttgtatcgcaggcgtccgctactatgcagcagtacgcccagagagacaagaagcacgagtattggttcgccgttccacaagagcgcactgatcacttgtacgcctttttcatccagtggtcacccgagatttacgctgaggacaccggagaatacacaagggaacctggattcatcgtcgtgaaaaagattgaggagtcagagacaatcgaagacagtagcaatcaggctgcagctcgagagtgggaaatcacaactcgcgaagatatcaactctaaacaagtcgcaactgtcaaagccgacctcgaaagcgagagcttccggcctaaccttagtgacccatctgaattgctgttaccggatcaaattgaaaagctgaccaagcacctgcctccacggactattggatacccatggaccctagtgtatgggacgggtaagcacgggacttccctgaagacactttatcggacaatgacaggactggacacacccgtgcttatggtcatcaaggacagtgacggccaggtgttcggggcactggcttccgagcccttgaaggtttcagacggcttctacggcaccggggaaacatttgtcttcacattctgtccagaatttgaggtgtttaaatggaccggcgacaatatgttctttatcaaaggagatatggattctcttgccttcggtggcggaggaggagaatttgcactctggctggacggcgacctatatcacggaaggtcccattcctgtaagacgtttggtaaccggactctgtccaagaaggaggattttttcatccaggacattgagatttgggctttcgagtag

SEQ ID NO: 196107 - DNA, 2541 bp, Artificial Sequence
  derived and/or modified sequence
atgtccgtgtcgaatctgagttggctcaaaaagaaatcccaaagcgttgacattaatgctcccgggttcaaccccctggcaggggcaggtaagcaaacacctcaagcctctaaaccacccgcacccaagaccccaatcattgaagaggaacagaacaatgctgccaacactcagaagcaccctagccgacggagtgaacttaagcgtttttatacgatagatacagggcagaaaaagactcttgacaaaaaagacgggcgccgcatgagttttcagaagcctaagggcaccatagaatatacggtggagtcccgagacagcctcaattctattgcacttaaattcgataccacacccaacgaactggtccaactgaacaaattatttagccgcgcggtggtgactgggcaggttctttacgttccagatcctgaatacgtctcatcagtcgagtctagcccttctctgtctcctgtgagtccgctgtcacccaccagctccgaggctgagttcgacaagacgaccaatcctgacgtgcaccccacggaggccacccctagtagtactttcacggggatccgccccgctcgcgtcgttagctctaccagcgaagaggaagaagcctttacggaaaagttcttgaagatcaactgtaaatacatcacttctgggaagggaaccgtgtctggagttttgctggtgacacctaacaacatcatgttcgatccgcacaagaacgacccgttggttcaggagaacggatgcgaagaatacggcataatgtgtcctatggaggaagtgatgtccgccgcaatgtacaaggagatccttgactctaaaattaaagaaagtctcccaatcgatatcgatcaactctctggacgcgacttttgtcattcgaagaaaatgactggaagcaataccgaggaaatcgatagcaggatccgcgatgcgggtaatgattctgcctctaccgcacctcggtctactgaggagtccctgtcagaggatgttttcacagaatctgagctgtcccctatcagggaggagttggtgagctcggatgagctacgacaagataagtccagcggagccagttcagagtcagttcagactgtgaatcaggctgaggtcgagtcccttaccgtcaagagcgagagtacaggtacacctgggcacctccgaagcgacacagaacacagcaccaatgaggtggggaccctgtgtcataaaaccgatcttaacaacctcgagatggccattaaggaggaccaaattgcagacaacttccagggcattagtggccccaaggaagactccacctctataaaaggaaacagcgatcaggactcatttctccacgagaactcattgcaccaggaggagagccagaaagaaaacatgccatgtggtgagacagctgaatttaagcagaaacaatcagtcaataaggggaagcaaggaaaagagcagaaccaggacagtcagacggaggctgaagaactcaggaagctctggaagacccacaccatgcagcaaacgaaacagcaacgtgagaacatccagcaggtgagccagaaagaagctaaacacaagatcacctccgcagacggccatatcgaatcttctgcactattaaaagaaaaacaaagacatcgtttacataagttcttgtgtctcagggtgggcaagcccatgcgtaagactttcgtttcacaagcgtctgccaccatgcagcagtatgcccagagagacaagaaacatgagtactggtttgccgtgccccaggaaaggacagatcatctatatgctttctttatccaatggtccccagaaatctacgcagaggataccggcgaatacacccgcgagccaggctttattgtggttaaaaagatcgaagagtctgaaaccattgaggattcatcgaatcaggctgccgcccgtgagtgggagatcactactagagaggatattaacagcaagcaggtggccaccgtaaaagccgatcttgagtccgagagtttcaggcccaacctttccgatccaagcgagcttttactgcctgaccagattgagaaacttaccaaacacctgcctcccagaacaatcgggtacccctggaccctagtttacggaacagggaaacacggtacaagtctgaaaacattatatcgaaccatgacagggctggatacccccgtcctgatggtgatcaaagactctgacggacaagtctttggagccctcgcaagcgaacctttgaaggtttctgatgggttctacggtactggcgagacatttgtttttaccttttgtcccgagttcgaagtgtttaagtggaccggagacaatatgttcttcattaaaggagatatggatagcttggcttttggtggcgggggtggcgaattcgccctgtggttggacggcgacctctatcacggcagaagccacagctgcaagactttcggaaaccgcaccctcagcaagaaagaagactttttcatccaggacatagagatttgggcctttgagtag

SEQ ID NO: 196108 - DNA, 2541 bp, Artificial Sequence
  derived and/or modified sequence
atgtctgtgagcaacctgtcctggctgaagaagaagagccagagcgtggacatcaatgcccctggcttcaaccccctggccggggccggcaagcagaccccccaggccagcaagcccccagcccccaagacccccatcatcgaggaggagcagaacaatgctgccaacacccagaagcaccccagcagaagaagtgagctgaagcgcttctacaccatcgacaccggccagaagaagaccctggacaagaaggatggaagaaggatgtccttccagaagcccaagggcaccatcgagtacacagtggagagccgggacagcctgaacagcatcgccctgaagtttgacaccaccccaaatgagctggtgcagctgaacaagctgttcagcagagctgtggtgacaggccaggtgctgtatgtgcctgaccctgaatatgtgtcctctgtggagagcagccccagcctgagccctgtgagccccctgagccccaccagcagcgaggccgagtttgacaagaccaccaacccagatgtgcaccccacagaggccacccccagcagcaccttcaccggcatccggcctgcccgggtggtgagcagcaccagcgaggaggaggaggccttcacagagaagttcctgaagatcaactgcaagtacatcaccagcgggaaaggaacagtgtctggagtgctgctggtgacccccaacaacatcatgtttgacccccacaagaatgaccccctggtgcaggagaatggctgtgaggagtatggcatcatgtgccccatggaggaggtgatgtctgctgccatgtacaaggagatcctggacagcaagatcaaggagagcctgcccattgatattgaccagctgagcggccgggacttctgccacagcaagaagatgacaggcagcaacacagaggagattgacagccgcatcagagatgctggaaatgacagcgccagcacagcccccaggagcacagaggagagcctgtctgaagatgtgttcacagagagcgagctgagccccatccgggaggagctggtgtccagtgatgagctgcggcaggacaagagcagcggggccagcagcgagagcgtgcagacagtgaaccaggccgaggtggagagcctgactgtgaagtctgagagcacaggcaccccaggccacctgcggagtgacacagagcacagcaccaatgaggtgggcaccctgtgccacaagacagacctgaacaacctggagatggccatcaaggaggaccagattgctgacaacttccagggcatcagcggccccaaggaggacagcaccagcatcaagggcaacagcgaccaggacagcttcctgcacgagaacagcctgcaccaggaggagagccagaaggagaacatgccctgtggggagacagctgagttcaagcagaagcagagcgtgaacaagggcaagcagggcaaggagcagaaccaggacagccagacagaagctgaggagctgaggaagctgtggaagacccacaccatgcagcagaccaagcagcagcgggagaacatccagcaggtgtcccagaaggaggccaagcacaagatcaccagcgcagatggccacatcgagagcagcgccctgctgaaggagaagcagaggcaccggctgcacaagttcctgtgcctgcgggtgggcaagcccatgaggaagacctttgtgtcccaggccagcgccaccatgcagcagtatgcccagagggacaagaagcatgagtactggtttgctgtgccccaggagaggacagaccacctgtatgccttcttcatccagtggagccctgagatctatgcagaggacaccggggagtacacccgggagcccggcttcatcgtggtgaagaagattgaggagagcgagaccatcgaggacagcagcaaccaggccgccgcccgggagtgggagatcaccacccgggaggacatcaacagcaagcaggtggccaccgtgaaggctgacctggagagcgagagcttccggcccaacctgagtgaccccagcgagctgctgctgcctgaccagatcgagaagctgaccaagcacctgccccccaggaccatcggctacccctggaccctggtgtatggcaccgggaagcacggcaccagcctgaagaccctgtaccgcaccatgacaggcctggacacccctgtgctgatggtgatcaaggacagtgatggccaggtgtttggagccctggccagcgagcccctgaaggtgtctgatggcttctacggcaccggggagacctttgtgttcaccttctgcccagagtttgaggtgttcaagtggacaggagacaacatgttcttcatcaagggggacatggacagcctggccttcggcggcggcggcggggagtttgccctgtggctggatggagacctgtaccacggccgcagccacagctgcaagaccttcggcaacagaaccctgagcaagaaggaggacttcttcatccaggacatcgagatctgggcctttgaatag

SEQ ID NO: 196109 - DNA, 2541 bp, Artificial Sequence
  derived and/or modified sequence
atgagcgtgagcaacctgagctggctgaagaagaagagccagagcgttgacattaatgcaccggggttcaaccccctggcgggggctggcaaacagactccccaggcatccaagccccctgctcccaagacgcccatcattgaggaagaacagaacaacgccgccaacacccagaagcaccccagccgccgctcagaactgaagcgcttctacactatcgacaccggccaaaaaaagacgctcgataagaaggatggaaggagaatgagcttccaaaagcccaagggcacaattgagtacacggtggagagtagggacagtctcaacagcatcgcgttgaaattcgatacaacccctaacgaactggttcaactcaataaattattctcacgagctgttgtgaccggccaagtgctgtatgtgcccgatcctgagtacgtttcgtccgtggaaagcagtccgagcctgagtcctgtgagtccccttagtccaacatctagtgaagctgaattcgataagactaccaacccggacgtgcaccctaccgaggccacaccatcttctacctttacaggcatcagaccggccagggtggtgagctctaccagcgaggaggaagaggcgtttaccgagaagtttctgaagatcaactgtaagtatattacttctggcaaagggacagtgtccggagttcttctggtgacacccaataatatcatgttcgaccctcacaagaacgatcccctggtacaggagaacggctgtgaggagtacgggattatgtgtcctatggaggaagttatgagcgctgctatgtacaaggagattctggattccaaaatcaaagaaagtctgcctatcgacatcgatcagttgtctggtcgggacttctgtcacagcaaaaagatgaccggcagtaatactgaggagatcgactccaggattcgcgacgctggtaacgattccgccagcaccgctccacggtcaaccgaggagtccctctctgaggatgtgttcacagaaagtgagctgagccccattcgcgaggagttggtctcaagcgacgagctgcggcaagacaagagctcgggagcaagttcagaaagtgtgcaaaccgtcaatcaggctgaagtggagagcttaacagtaaaaagtgagtcgactggcacccccgggcacctgcgaagcgacaccgagcacagtaccaatgaggtgggcacattgtgccacaagaccgatctgaacaaccttgagatggctattaaagaagatcagattgccgataattttcagggcatctctgggcctaaggaagacagcacatctatcaagggcaactctgaccaggactccttcttgcacgagaactccttgcaccaggaagaaagccagaaggagaatatgccctgcggggagacggcagagtttaagcaaaaacagagcgtcaataagggtaaacaaggcaaggagcagaatcaggacagtcagacagaagcagaagagttgagaaagctgtggaaaactcatacaatgcagcagactaagcagcagcgcgagaacatccagcaggtctcccaaaaagaggccaaacataaaattacgtctgccgacggacatatcgaaagcagcgccctgttgaaagagaagcagcgtcatcggctgcacaagttcttgtgcttgagagtgggtaagcctatgcggaagacttttgtgagccaggcgtcagcaacaatgcagcaatacgcgcagagggataagaagcatgagtactggttcgcagtacctcaggagcggactgaccatctgtatgctttctttattcagtggtctcccgagatttacgctgaggatacaggagaatatactcgcgagcccggatttatcgtggtgaagaagatagaggaatcagaaacaatcgaagattcttcgaatcaggccgcagcccgagaatgggaaatcactactcgggaggatattaactctaaacaagttgccacagtgaaagccgacttagagtccgaaagcttccgccccaacttgtccgacccctcagaactcctgctcccagaccagatcgaaaagttgacaaaacatctgccacctcgcactattggatacccctggacccttgtgtacggcactggcaagcacggcacttctttgaaaactctttatagaaccatgactggcctagatacaccagttctcatggtgattaaagacagcgacggacaggtgtttggggcccttgcctcggagcccttaaaagtcagtgatggtttctacgggactggggaaaccttcgtattcacattctgcccagagtttgaggtgtttaaatggaccggggataatatgttcttcataaagggagacatggactccttggcgtttggaggaggcgggggcgaattcgctctgtggctggatggagacctctatcacggcaggtctcattcctgtaaaacattcggaaatagaaccctttctaaaaaagaggacttcttcatccaggatatagagatctgggcctttgaatag

SEQ ID NO: 196110 - DNA, 2541 bp, Artificial Sequence
  derived and/or modified sequence
atgagcgtgagcaacctgagctggctgaagaagaagagccagagcgtcgatataaacgcccctggattcaatcctctggctggcgccggcaagcagacaccgcaggccagtaaacctccagctccaaaaactccaataattgaagaagagcaaaacaacgcagcaaacacacaaaagcatccctccaggcggagtgagctgaagagattttacacaatagataccggccagaagaaaacattagacaaaaaagacggtaggcgtatgagtttccagaaacctaaaggaaccattgagtataccgtcgagtccagagacagcctcaatagtatagctttgaaattcgataccacacctaacgaactggttcaactgaacaagctctttagtagggctgtggtaactggtcaggttctttatgtccccgatcccgaatatgtaagctcagtcgaaagttccccttcgctctcaccggtctcacccctgagccctacaagcagcgaggctgaattcgacaaaactacaaatcctgatgtccaccccacagaagcgaccccgtcctccacttttactggaatcagacccgcgcgcgtcgtcagctcgacgagcgaggaagaggaggccttcaccgaaaaatttctgaaaataaactgtaagtatattacatcgggcaagggcaccgtgagcggagtgctgttggttacaccaaacaatataatgtttgatcctcataaaaacgatcccttagttcaggaaaacgggtgtgaggagtacgggataatgtgcccaatggaggaagttatgtccgcggcaatgtacaaggagattctggatagtaagatcaaggagtctctcccgatcgatatagatcaactgagtgggcgcgacttttgccatagtaagaagatgacgggttctaacacagaggagatcgacagccgtattcgcgacgcggggaacgattccgcgagcacagctcctcggagcacggaggaatctctcagcgaagatgtgttcacagaatcagagttatccccaattagagaggaactcgtatcctctgacgagcttagacaagataagtcatcaggcgcttctagtgagtctgtccagaccgtcaatcaggctgaggtggagtccctgacggtgaaatctgaaagcaccggcacacccgggcaccttaggtcagatactgagcacagcactaacgaggtaggcaccttgtgccacaaaaccgatctcaataacctggagatggcaataaaagaagatcagattgctgacaactttcagggtataagcggacccaaggaggacagtacctctatcaagggaaattccgatcaggactcgttcctgcacgaaaattctcttcatcaggaggaatcccagaaggaaaatatgccatgtggggaaaccgcagaattcaaacagaaacagtctgtcaacaagggtaaacagggaaaagagcagaatcaggactcacaaaccgaggctgaagagttgaggaagctgtggaagacacacacaatgcagcaaaccaagcaacagagagaaaatattcagcaggtgagtcagaaagaggccaagcacaagattactagcgctgacggtcacatcgagtccagtgcacttctaaaggaaaagcagcggcaccgattgcacaaatttctatgtctacgagtgggaaagcctatgaggaaaacattcgtgtctcaggccagtgcaaccatgcagcagtatgcccagcgggacaagaaacacgaatactggtttgctgttcctcaagaaagaactgatcatttatatgcgttcttcattcagtggagtccagagatctatgctgaagataccggggaatatactcgcgaaccaggcttcattgtcgtgaaaaaaattgaggaatccgagaccattgaagatagttcgaaccaggctgctgcccgcgagtgggagatcaccactagagaggatatcaattccaagcaggtggcgacagtgaaggctgaccttgagtccgagtccttcagacctaatttgtcagatccttctgagctgctgcttcccgatcaaattgagaagttgacaaagcacctccctccccgtaccatcggctacccctggacgttggtctatgggactggaaagcatggcaccagtttgaaaactctgtataggacgatgaccggactcgacaccccagtcctaatggtgattaaagactcggacgggcaggtcttcggtgccctcgcctcagagcccctcaaagtgtcagacggattctacgggaccggcgagactttcgtgtttacattttgtccagaattcgaagtattcaaatggaccggcgacaatatgtttttcatcaaaggcgacatggattccttggcttttggtggcggaggcggcgaatttgccctgtggctcgatggggatctgtatcacggtcggtctcattcatgcaagactttcgggaaccgaactctgtccaaaaaggaggatttttttatccaggacatcgagatctgggccttcgaatag

SEQ ID NO: 196111 - DNA, 4550 bp, Artificial Sequence
  derived and/or modified sequence
attcacctcgcggccacaggagctcagcgccggcgccgcgccgcccagccccgccgagaggggcgcactcgccgccgcggggcccgccgccgctcaccgcagccccctcctggcgacccgcaagtcctctcaaactgtgagtaactaagtggtttgtgcatcattccagaagcaaagctaaaatttttagcggtgttgtcgacttgacctgctaatttcctgttctggaatcgagagaagactcctcaacaagttgctgcaatgtctgtgtctaatctatcatggctgaagaaaaagtcccagtcggtggatattaatgctccagggttcaaccctttggctggtgcaggaaagcaaacaccacaagccagtaagcccccggcacccaagacccccatcattgaagaagagcagaacaatgcagcaaatactcagaaacatccttccagaaggagcgaactgaagaggttctacacaattgacactggccaaaagaagaccctagacaagaaagatggaagacgaatgtcttttcagaaacctaaagggactattgagtatactgttgaatcaagggattctttgaatagcatagccctgaagtttgatacaacacctaacgaacttgttcaattaaataagttattctcccgagcagttgttactggacaggttctgtatgttcctgatcctgaatatgtctccagtgttgagagctctccatctctaagccccgtaagtcctctgtcaccaacatcatctgaggctgaatttgataagaccactaatcctgatgtccatccaacagaagcaactccctcatctactttcactggtattcgacctgcacgagttgtatcttcaacttctgaggaggaggaagcatttactgagaaatttcttaaaattaattgcaaatatattaccagtggcaagggcacagtcagtggtgtgctgctagttacaccaaataatataatgtttgatccacataaaaatgaccctttggttcaagagaatggctgtgaggaatatggcatcatgtgtccaatggaagaggtgatgtcagctgcaatgtacaaagaaattttggatagcaaaataaaggaatctttacccatagatatagatcagctatcaggaagggacttctgccattcaaagaaaatgacaggaagtaacactgaggaaatagactcaagaatccgagatgcaggtaatgatagtgccagcactgctcctaggagcactgaggagtctctttctgaagatgtgttcacagaatcagaactttcccctatacgagaggagcttgtatcttcagatgaactgcgacaagataaatcttctggtgcgtcatcagaatctgtgcaaactgtcaatcaggctgaagtagaaagtctgacagtcaaatcagaatctactggtactcctggtcacttaagatctgatactgaacattctacaaatgaagttgggactttatgtcataaaactgatttaaataatcttgaaatggccattaaggaagatcagattgcagataactttcaaggaatatcaggtcctaaagaagacagcacaagtataaaaggtaattcagaccaggattcttttcttcatgagaattcgttacaccaagaagagagtcaaaaagaaaatatgccttgtggggaaacagcagaatttaaacaaaagcaaagtgttaacaaaggaaaacaaggaaaggagcaaaatcaggactcacagacagaggcagaagagctacgcaaactttggaaaacccatactatgcaacaaactaaacagcaaagggaaaatattcaacaagtgtcacaaaaagaagctaagcataaaattacatctgctgatggacacatagaaagttctgcacttttaaaagaaaagcaaaggcatcgattacataagttcttgtgtctcagagttggaaaaccaatgaggaaaacgtttgtatctcaagcaagtgctacaatgcaacagtatgcacagagagataagaaacatgaatattggtttgctgtgccacaagaaaggacagatcacttgtatgccttcttcattcagtggagtccagaaatatatgcagaagatactggcgaatataccagagaacctggatttatagtagtaaaaaagattgaggagtctgaaacaattgaggattctagtaatcaagcagcagccagagaatgggagattactacaagggaagacataaattcaaagcaggttgctacagtgaaagcagacctggagtctgaatcttttcgaccaaacctaagtgatcccagtgaacttttactgccagatcaaattgaaaagcttaccaagcatcttccaccaagaacaattggctatccatggactcttgtttatggtactggaaaacatggcacaagcttgaaaactctttatcgaacaatgacaggtttagacaccccagtgctgatggtgattaaagacagtgatggacaggtttttggtgcgttagcatctgagccactgaaagtgagtgatggcttttatggtactggagagacctttgtttttacattctgtccggagtttgaggtctttaagtggacaggagataatatgttttttatcaaaggagacatggattcactagctttcggtggtggaggaggagaatttgcgctttggcttgatggagatctctaccatggaagaagccattcttgtaaaacgtttgggaatcgtacactttctaagaaggaagatttctttatccaagatattgaaatctgggcttttgaataaataaaatgctctctgtcttagcaggagaatggcccaaacctgacatggacaagcattgtttggaaagttcaagaagcaatacagtgtaacatgtcacttgtgctttaaaattagtctgtatcaccatttattacagttataattttggagtttatttttcaaatcatgttcttgtcccagagttctttaggttaacactagggactgcgtccatgtactagtataacagcttgggtttgttagaatttgggcaacattttgattataatgacaacttcattttcacatgttactcagttccctaataggatggtgctcttttgttgaacctgtattgatttttttttttttaactatattgattcgtttactagaacagtctaattggggcattgaggaaatgaagactggatacttctgtatctgtgaagttggcacaggtaacatttggacatgttcatcttattcttaggaaggaaaaaatcacttgccaaaataatacatacttcatagaccactgagttctagtttttattcacactacaacattctctttaacgatgttgcaggtattctcaatttccttttaagaaaaatgaaatgtgaggagaattctggttgtaatagatgacagtacatatgatctgcaggtttgggcatatgctttcatcattaaattatctgataaagttacaagtcacaaaggagaatgagaacttaatgattctattggatttaatatattagcaagaaaacatactatttacatatgtgtagcttagtaaggcattaacataagtacaaaaactatgaaacagatgcatatttcctcaacatactgtgtcaggtatactgttttataatttggttgttttagccttattgcacaccaactcccaaaatataggttactcttgttcaaaaggaaaaaaaaaattgtgattttctttgagtggtatatgttattaattaccattagcatttgctcttataaagggcaatgattatagtagacaatattgtaactcagtagacttgttgaatatgcaaacttactgtcaagtgacctcaaaaaaaaaatgaaaagatagaatacactagtagttcttatcctcttttgtaggaaaccaataatagccattgtggcaataattcatcagttgattttaaagcttcatgttatgcaaaaaagaatcctgctgttatacatgtgacagtgactttgtgctgaaatttcagctattccagataaacattgtatatcttgtaaattaatgtttaaaggtgtagttttgttcttacagaaagtgttgattgccaggttgcttatagcactttaagttattctaaaaatgaaattataagccaaatatttggcttaagtagatttagttgtatagcacttacatatttagttcttttgaaagtttagataattatttaaagaaagcataatgctaatggaaaagaaaatctgatgttctattataatatgctattgctgaatatgaatagaaatacagggcatcatttccttgtctcattataagttagtaacaatatatagattaaatgtttacaatatagggaattgtaaataaatatatcagtttttttccccttcggtcttccacagcagtattattgtctttgtggagttgactaatgataatttaaaaatcctgtaatggatttctactaaaataaggtcatagtggcatataccaaataaaatcaaatacagaaat

SEQ ID NO: 196112 - DNA, 4294 bp, Artificial Sequence
  derived and/or modified sequence
gtcctctcaaactgtgagtaactaagtggtttgtgcatcattccagaagcaaagctaaaatttttagcggtgttgtcgacttgacctgctaatttcctgttctggaatcgagagaagactcctcaacaagttgctgcaatgtctgtgtctaatctatcatggctgaagaaaaagtcccagtcggtggatattaatgctccagggttcaaccctttggctggtgcaggaaagcaaacaccacaagccagtaagcccccggcacccaagacccccatcattgaagaagagcagaacaatgcagcaaatactcagaaacatccttccagaaggagcgaactgaagaggttctacacaattgacactggccaaaagaagaccctagacaagaaagatggaagacgaatgtcttttcagaaacctaaagggactattgagtatactgttgaatcaagggattctttgaatagcatagccctgaagtttgatacaacacctaacgaacttgttcaattaaataagttattctcccgagcagttgttactggacaggttctgtatgttcctgatcctgaatatgtctccagtgttgagagctctccatctctaagccccgtaagtcctctgtcaccaacatcatctgaggctgaatttgataagaccactaatcctgatgtccatccaacagaagcaactccctcatctactttcactggtattcgacctgcacgagttgtatcttcaacttctgaggaggaggaagcatttactgagaaatttcttaaaattaattgcaaatatattaccagtggcaagggcacagtcagtggtgtgctgctagttacaccaaataatataatgtttgatccacataaaaatgaccctttggttcaagagaatggctgtgaggaatatggcatcatgtgtccaatggaagaggtgatgtcagctgcaatgtacaaagaaattttggatagcaaaataaaggaatctttacccatagatatagatcagctatcaggaagggacttctgccattcaaagaaaatgacaggaagtaacactgaggaaatagactcaagaatccgagatgcaggtaatgatagtgccagcactgctcctaggagcactgaggagtctctttctgaagatgtgttcacagaatcagaactttcccctatacgagaggagcttgtatcttcagatgaactgcgacaagataaatcttctggtgcgtcatcagaatctgtgcaaactgtcaatcaggctgaagtagaaagtctgacagtcaaatcagaatctactggtactcctggtcacttaagatctgatactgaacattctacaaatgaagttgggactttatgtcataaaactgatttaaataatcttgaaatggccattaaggaagatcagattgcagataactttcaaggaatatcaggtcctaaagaagacagcacaagtataaaaggtaattcagaccaggattcttttcttcatgagaattcgttacaccaagaagagagtcaaaaagaaaatatgccttgtggggaaacagcagaatttaaacaaaagcaaagtgttaacaaaggaaaacaaggaaaggagcaaaatcaggactcacagacagaggcagaagagctacgcaaactttggaaaacccatactatgcaacaaactaaacagcaaagggaaaatattcaacaagtgtcacaaaaagaagctaagcataaaattacatctgctgatggacacatagaaagttctgcacttttaaaagaaaagcaaaggcatcgattacataagttcttgtgtctcagagttggaaaaccaatgaggaaaacgtttgtatctcaagcaagtgctacaatgcaacagtatgcacagagagataagaaacatgaatattggtttgctgtgccacaagaaaggacagatcacttgtatgccttcttcattcagtggagtccagaaatatatgcagaagatactggcgaatataccagagaacctggatttatagtagtaaaaaagattgaggagtctgaaacaattgaggattctagtaatcaagcagcagccagagaatgggagcttaccaagcatcttccaccaagaacaattggctatccatggactcttgtttatggtactggaaaacatggcacaagcttgaaaactctttatcgaacaatgacaggtttagacaccccagtgctgatggtgattaaagacagtgatggacaggtttttggtgcgttagcatctgagccactgaaagtgagtgatggcttttatggtactggagagacctttgtttttacattctgtccggagtttgaggtctttaagtggacaggagataatatgttttttatcaaaggagacatggattcactagctttcggtggtggaggaggagaatttgcgctttggcttgatggagatctctaccatggaagaagccattcttgtaaaacgtttgggaatcgtacactttctaagaaggaagatttctttatccaagatattgaaatctgggcttttgaataaataaaatgctctctgtcttagcaggagaatggcccaaacctgacatggacaagcattgtttggaaagttcaagaagcaatacagtgtaacatgtcacttgtgctttaaaattagtctgtatcaccatttattacagttataattttggagtttatttttcaaatcatgttcttgtcccagagttctttaggttaacactagggactgcgtccatgtactagtataacagcttgggtttgttagaatttgggcaacattttgattataatgacaacttcattttcacatgttactcagttccctaataggatggtgctcttttgttgaacctgtattgatttttttttttttaactatattgattcgtttactagaacagtctaattggggcattgaggaaatgaagactggatacttctgtatctgtgaagttggcacaggtaacatttggacatgttcatcttattcttaggaaggaaaaaatcacttgccaaaataatacatacttcatagaccactgagttctagtttttattcacactacaacattctctttaacgatgttgcaggtattctcaatttccttttaagaaaaatgaaatgtgaggagaattctggttgtaatagatgacagtacatatgatctgcaggtttgggcatatgctttcatcattaaattatctgataaagttacaagtcacaaaggagaatgagaacttaatgattctattggatttaatatattagcaagaaaacatactatttacatatgtgtagcttagtaaggcattaacataagtacaaaaactatgaaacagatgcatatttcctcaacatactgtgtcaggtatactgttttataatttggttgttttagccttattgcacaccaactcccaaaatataggttactcttgttcaaaaggaaaaaaaaaattgtgattttctttgagtggtatatgttattaattaccattagcatttgctcttataaagggcaatgattatagtagacaatattgtaactcagtagacttgttgaatatgcaaacttactgtcaagtgacctcaaaaaaaaaatgaaaagatagaatacactagtagttcttatcctcttttgtaggaaaccaataatagccattgtggcaataattcatcagttgattttaaagcttcatgttatgcaaaaaagaatcctgctgttatacatgtgacagtgactttgtgctgaaatttcagctattccagataaacattgtatatcttgtaaattaatgtttaaaggtgtagttttgttcttacagaaagtgttgattgccaggttgcttatagcactttaagttattctaaaaatgaaattataagccaaatatttggcttaagtagatttagttgtatagcacttacatatttagttcttttgaaagtttagataattatttaaagaaagcataatgctaatggaaaagaaaatctgatgttctattataatatgctattgctgaatatgaatagaaatacagggcatcatttccttgtctcattataagttagtaacaatatatagattaaatgtttacaatatagggaattgtaaataaatatatcagtttttttccccttcggtcttccacagcagtattattgtctttgtggagttgactaatgataatttaaaaatcctgtaatggatttctactaaaataaggtcatagtggcatataccaaataaaatcaaata

SEQ ID NO: 196113 - DNA, 3599 bp, Artificial Sequence
  derived and/or modified sequence
gtcctctcaaactgtgagtaactaagtggtttgtgcatcattccagaagcaaagctaaaatttttagcggtgttgtcgacttgacctgctaatttcctgttctggaatcgagagaagactcctcaacaagttgctgcaatgtctgtgtctaatctatcatggctgaagaaaaagtcccagtcggtggatattaatgctccagggttcaaccctttggctggtgcaggaaagcaaacaccacaagccagtaagcccccggcacccaagacccccatcattgaagaagagcagaacaatgcagcaaatactcagaaacatccttccagaaggagcgaactgaagaggttctacacaattgacactggccaaaagaagaccctagacaagaaagatggaagacgaatgtcttttcagaaacctaaagggactattgagtatactgttgaatcaagggattctttgaatagcatagccctgaagtttgatacaacacctaacgaacttgttcaattaaataagttattctcccgagcagttgttactggacaggttctgtatgttcctgatcctgaatatgtctccagtgttgagagctctccatctctaagccccgtaagtcctctgtcaccaacatcatctgaggctgaatttgataagaccactaatcctgatgtccatccaacagaagcaactccctcatctactttcactggtattcgacctgcacgagttgtatcttcaacttctgaggaggaggaagcatttactgagaaatttcttaaaattaattgcaaatatattaccagtggcaagggcacagtcagtggtgtgctgctagttacaccaaataatataatgtttgatccacataaaaatgaccctttggttcaagagaatggctgtgaggaatatggcatcatgtgtccaatggaagaggtgatgtcagctgcaatgtacaaagaaattttggatagcaaaataaaggaatctttacccatagatatagatcagctatcaggaagggacttctgccattcaaagaaaatgacaggaagtaacactgaggaaatagactcaagaatccgagatgcaggtaatgatagtgccagcactgctcctaggagcactgaggagtctctttctgaagatgtgttcacagaatcagaactttcccctatacgagaggagcttgtatcttcagatgaactgcgacaagataaatcttctggtgcgtcatcagaatctgtgcaaactgtcaatcaggctgaagtagaaagtctgacagtcaaatcagaatctactggtactcctggtcacttaagatctgatactgaacattctacaaatgaagttgggactttatgtcataaaactgatttaaataatcttgaaatggccattaaggaagatcagattgcagataactttcaaggaatatcaggtcctaaagaagacagcacaagtataaaaggtaattcagaccaggattcttttcttcatgagaattcgttacaccaagaagagagtcaaaaagaaaatatgccttgtggggaaacagcagaatttaaacaaaagcaaagtgttaacaaaggaaaacaaggaaaggagcaaaatcaggactcacagacagaggcagaagagctacgcaaactttggaaaacccatactatgcaacaaactaaacagcaaagggaaaatattcaacaagtgtcacaaaaagaagctaagcataaaattacatctgctgatggacacatagaaagttctgcacttttaaaagaaaagcaaaggcatcgattacataagttcttgtgtctcagagttggaaaaccaatgaggaaaacgtttgtatctcaagcaagtgctacaatgcaacagtatgcacagagagataagaaacatgaatattggtttgctgtgccacaagaaaggacagatcacttgtatgccttcttcattcagtggagtccagaaatatatgcagaagatactggcgaatataccagagaacctggatttatagtagtaaaaaagattgaggagtctgaaacaattgaggattctagtaatcaagcagcagccagagaatgggagattactacaagggaagacataaattcaaagcaggttgctacagtgaaagcagacctggagtctgaatcttttcgaccaaacctaagtgatcccagtgaacttttactgccagatcaaattgaaaagcttaccaagcatcttccaccaagaacaattggctatccatggactcttgtttatggtactggaaaacatggcacaagcttgaaaactctttatcgaacaatgacaggtttagacaccccagtgctgatggtgattaaagacagtgatggacaggtttttggtgcgttagcatctgagccactgaaagtgagtgatggcttttatggtactggagagacctttgtttttacattctgtccggagtttgaggtctttaagtggacaggagataatatgttttttatcaaaggagacatggattcactagctttcggtggtggaggaggagaatttgcgctttggcttgatggagatctctaccatggaagaagccattcttgtaaaacgtttgggaatcgtacactttctaagaaggaagatttctttatccaagatattgaaatctgggcttttgaataaataaaatgctctctgtcttagcaggagaatggcccaaacctgacatggacaagcattgtttggaaagttcaagaagcaatacagtgtaacatgtcacttgtgctttaaaattagtctgtatcaccatttattacagttataattttggagtttatttttcaaatcatgttcttgtcccagagttctttaggttaacactagggactgcgtccatgtactagtataacagcttgggtttgttagaatttgggcaacattttgattataatgacaacttcattttcacatgttactcagttccctaataggatggtgctcttttgttgaacctgtattgatttttttttttttaactatattgattcgtttactagaacagtctaattggggcattgaggaaatgaagactggatacttctgtatctgtgaagttggcacaggtaacatttggacatgttcatcttattcttaggaaggaaaaaatcacttgccaaaataatacatacttcatagaccactgagttctagtttttattcacactacaacattctctttaacgatgttgcaggtattctcaatttccttttaagaaaaatgaaatgtgaggagaattctggttgtaatagatgacagtacatatgatctgcaggtttgggcatatgctttcatcattaaattatctgataaagttacaagtcacaaaggagaatgagaacttaatgattctattggatttaatatattagcaagaaaacatactatttacatatgtgtagcttagtaaggcattaacataagtacaaaaactatgaaacagatgcatatttcctcaacatactgtgtcaggtatactgttttataatttggttgttttagccttattgcacaccaactcccaaaatataggttactcttgttc

SEQ ID NO: 196114 - DNA, 2541 bp, Artificial Sequence
  derived and/or modified sequence
atgtccgtcagcaacctctcgtggctgaaaaagaagtcccagtccgttgatattaacgcccctgggttcaacccattggccggagccggtaaacagacacctcaggcttccaaaccaccagcgccaaaaacacctattattgaggaggagcaaaataacgccgctaatacacagaagcacccctcacgcagatctgagctgaagaggttctataccatcgatacgggacagaaaaagacgctcgacaaaaaggatggtcgtcgcatgagttttcagaagcccaaagggaccatagagtatacggttgaatcccgagactcacttaacagcatagctcttaagttcgatactactccaaacgagttagtccagctcaataaattgttctccagagccgtggtcactgggcaggtgctgtatgtccccgatccagagtacgtcagtagtgtggaaagcagcccttccctgagccctgtctcccctcttagccctacgagttcagaggcagagtttgataaaacaaccaatcctgatgtccatcctacagaagcaacaccatccagcacattcaccggtataagaccagccagggtggtgagttctacgagcgaggaagaagaggccttcaccgagaagtttctcaaaattaattgtaaatatatcacatctggtaaagggacagtttccggggtgctgctagtgacaccaaataacatcatgttcgatccccataaaaacgaccctctggtccaggaaaatgggtgtgaagaatacggcatcatgtgccccatggaagaggtgatgtcggccgcaatgtataaagagatcttggactcaaagatcaaggagagtctgcctatcgacatcgaccagctatcaggccgtgacttttgccactcaaagaagatgaccggatctaacacagaagagatagattccagaattagagacgccggaaacgattccgcctctacagcacctcgttcgacagaggagagtctgtccgaggacgtctttactgagagcgaattatcacctatccgcgaggaactagtcagcagtgacgagctgcggcaagacaagagttccggggctagctccgaatcagttcagacagtgaaccaggctgaggtagagagtctgaccgtgaaatccgagtctacaggcacaccaggacacttaagatcagatacagagcattccacaaacgaagtcggcaccctctgtcataagactgacctgaacaatctcgaaatggccatcaaggaagatcagattgcagataacttccaagggatcagtgggccaaaggaggacagcaccagcattaaaggtaacagtgaccaagattctttcctgcacgagaactccctccatcaggaggagtcacagaaggagaatatgccatgtggcgaaacggctgagtttaagcagaaacaatcagtcaacaaaggaaagcagggtaaagaacagaatcaggattcacaaaccgaagctgaggaactgaggaaactctggaagacacacaccatgcagcagaccaaacaacaaagggaaaacatccagcaggtctctcagaaggaagccaaacacaagataacctccgcagatggccacattgaaagctcagccctgttaaaggagaaacaacgtcacagactccacaagttcctgtgccttagagtgggaaagcccatgcgcaagacgtttgtgtcgcaggcctcggctaccatgcagcagtacgcccagcgagacaagaagcatgaatattggtttgcagttccccaggagagaacagaccacctttacgcgttttttatccagtggtccccagagatatatgccgaagacacgggcgagtacacacgtgaacctggatttatcgtggtgaagaaaattgaggaaagtgagactattgaagatagctcgaaccaggctgcagcaagggagtgggagatcacaacccgggaagatataaacagtaaacaggtagcgactgttaaggctgatttggagtcagagagttttagaccaaacctaagcgaccccagcgagctgctccttcccgaccaaatcgagaagctaaccaagcacctgcctcccagaacaataggctatccatggacacttgtgtacggtacaggcaaacacggaaccagcctgaagacgctctaccgcacgatgaccggactcgacacccccgtgctcatggtcatcaaggactcagatggccaagtattcggggcactcgcctccgagcctctcaaagtctccgatggcttctacggaacaggagagacattcgtcttcaccttttgtcccgagtttgaagtgttcaaatggactggcgacaacatgttcttcatcaagggggacatggacagcctggccttcggcggaggaggaggggagttcgcgttgtggctggacggcgacctatatcacggcagaagccattcctgcaaaacattcgggaatcgaactctaagcaagaaagaggactttttcattcaggacatcgaaatttgggcctttgagtag

SEQ ID NO: 196115 - DNA, 2541 bp, Artificial Sequence
  derived and/or modified sequence
atgtccgtctccaatctgtcgtggctcaaaaaaaaatcccagtccgttgatatcaacgctcccggatttaacccgctcgcaggagctggtaagcagactccccaggccagcaagcctcccgctcccaaaacacctattatcgaggaggagcaaaacaacgccgctaacactcaaaaacacccttctcgaagatctgaacttaagaggttttacacaatcgacacaggtcagaaaaagactctagataaaaaggacgggcgtcgcatgagctttcagaagcctaaaggaactattgagtacacagtggagagcagggatagtctgaattctatcgccctgaaattcgataccacgcccaacgaattagtccagctgaataagctcttctctcgggctgtcgtcacagggcaagtgctctacgtgcccgacccagaatacgttagctccgtggaaagcagccccagcctttctcctgtgtctccactcagccctactagctcggaagccgagttcgacaagactacaaacccggacgtacacccaaccgaggcaacgccgagtagtacttttacaggaatccgacctgcacgcgttgtttccagcacatctgaagaagaggaggcttttaccgaaaaattcctgaaaatcaactgcaagtacatcacatctggcaaaggcactgtgagcggagtgttgttagtaacacccaacaatataatgttcgacccacacaaaaatgatcccctcgtgcaggaaaacggttgtgaggagtatgggattatgtgccccatggaggaagtgatgagcgccgctatgtacaaagagatcctggacagcaagatcaaggaaagcctgccaattgatattgaccaattgtcaggaagagacttctgccatagcaagaagatgaccggttctaacaccgaagagattgatagcaggatacgggatgctggcaatgactctgcatccaccgcccctagaagcaccgaggagagtctgagcgaggacgtgtttacagagagcgaactttcccctataagagaggagttagtgagcagtgatgagcttcggcaggataaaagcagtggcgcttcctctgaaagtgtccagacagtcaaccaggctgaggtagagagccttactgtgaagagtgagagtaccgggactccgggacacctgcgcagcgacacagagcattccaccaatgaagttgggaccctgtgtcacaagactgatctcaataatttggagatggctatcaaggaggaccagatcgccgacaattttcaaggcatcagcggaccaaaagaagacagtacatcaatcaaggggaatagcgatcaagattccttcctccacgagaattctctgcaccaggaggagtcccagaaagagaacatgccatgcggcgaaacggctgagttcaaacagaagcagtccgttaataaaggaaaacagggtaaagaacagaaccaggatagccagaccgaggcagaggagctgcgaaagctgtggaaaacccacactatgcagcagaccaaacagcaaagggagaatatccagcaggttagccagaaggaggccaagcataaaataacgagtgctgacggccacatcgaatcatctgcactattaaaggaaaagcaacgtcaccgtcttcataaattcctctgcttaagagtggggaaacccatgcgaaagacattcgtgagtcaagcaagtgccaccatgcaacagtatgctcagagagacaaaaaacatgaatattggttcgcggttccccaggagaggacggaccacctgtatgcatttttcatccagtggagtcccgaaatctacgctgaggataccggagagtacacgcgcgaacctggattcatcgtcgtgaagaagatcgaagaatctgagaccatcgaggattcatccaatcaggccgcagccagggagtgggagattaccacccgagaggacataaattcaaagcaggtggcgacagtcaaggcagacctcgaatcagagagctttcgtccgaacctgagcgatcccagtgaactcctcctgcctgaccaaatcgaaaaacttacgaaacacctgccgcctaggacaataggctatccatggaccttagtctacgggaccgggaaacatggaacttcactgaaaaccctgtacagaaccatgactggcctcgatacacctgtactgatggttataaaggattcagacggccaggtctttggagccctagctagtgaacccctcaaagtatctgacggcttctatgggactggcgaaacctttgtgtttaccttttgtccagaatttgaggtgtttaagtggaccggagataatatgtttttcattaaaggagacatggactccctggccttcggtgggggtggtggggaatttgcgttgtggctggacggagacctataccacggaaggtcacactcctgtaaaacatttgggaacagaactctctctaaaaaagaggatttctttatccaggatattgagatctgggcgttcgagtag

SEQ ID NO: 196116 - DNA, 2541 bp, Artificial Sequence
  derived and/or modified sequence
atgagcgtgagcaacctgagctggctgaagaagaagagccagagcgtggacatcaacgcccccggcttcaaccccctggccggcgccggcaagcagaccccccaggccagcaagccccccgcccccaagacccccatcatcgaggaggagcagaacaacgccgccaacacccagaagcaccccagcagaagaagcgagctgaagagattctacaccatcgacaccggccagaagaagaccctggacaagaaggacggcagaagaatgagcttccagaagcccaagggcaccatcgagtacaccgtggagagcagagacagcctgaacagcatcgccctgaagttcgacaccacccccaacgagctggtgcagctgaacaagctgttcagcagagccgtggtgaccggccaggtgctgtacgtgcccgaccccgagtacgtgagcagcgtggagagcagccccagcctgagccccgtgagccccctgagccccaccagcagcgaggccgagttcgacaagaccaccaaccccgacgtgcaccccaccgaggccacccccagcagcaccttcaccggcatcagacccgccagagtggtgagcagcaccagcgaggaggaggaggccttcaccgagaagttcctgaagatcaactgcaagtacatcaccagcggcaagggcaccgtgagcggcgtgctgctggtgacccccaacaacatcatgttcgacccccacaagaacgaccccctggtgcaggagaacggctgcgaggagtacggcatcatgtgccccatggaggaggtgatgagcgccgccatgtacaaggagatcctggacagcaagatcaaggagagcctgcccatcgacatcgaccagctgagcggcagagacttctgccacagcaagaagatgaccggcagcaacaccgaggagatcgacagcagaatcagagacgccggcaacgacagcgccagcaccgcccccagaagcaccgaggagagcctgagcgaggacgtgttcaccgagagcgagctgagccccatcagagaggagctggtgagcagcgacgagctgagacaggacaagagcagcggcgccagcagcgagagcgtgcagaccgtgaaccaggccgaggtggagagcctgaccgtgaagagcgagagcaccggcacccccggccacctgagaagcgacaccgagcacagcaccaacgaggtgggcaccctgtgccacaagaccgacctgaacaacctggagatggccatcaaggaggaccagatcgccgacaacttccagggcatcagcggccccaaggaggacagcaccagcatcaagggcaacagcgaccaggacagcttcctgcacgagaacagcctgcaccaggaggagagccagaaggagaacatgccctgcggcgagaccgccgagttcaagcagaagcagagcgtgaacaagggcaagcagggcaaggagcagaaccaggacagccagaccgaggccgaggagctgagaaagctgtggaagacccacaccatgcagcagaccaagcagcagagagagaacatccagcaggtgagccagaaggaggccaagcacaagatcaccagcgccgacggccacatcgagagcagcgccctgctgaaggagaagcagagacacagactgcacaagttcctgtgcctgagagtgggcaagcccatgagaaagaccttcgtgagccaggccagcgccaccatgcagcagtacgcccagagagacaagaagcacgagtactggttcgccgtgccccaggagagaaccgaccacctgtacgccttcttcatccagtggagccccgagatctacgccgaggacaccggcgagtacaccagagagcccggcttcatcgtggtgaagaagatcgaggagagcgagaccatcgaggacagcagcaaccaggccgccgccagagagtgggagatcaccaccagagaggacatcaacagcaagcaggtggccaccgtgaaggccgacctggagagcgagagcttcagacccaacctgagcgaccccagcgagctgctgctgcccgaccagatcgagaagctgaccaagcacctgccccccagaaccatcggctacccctggaccctggtgtacggcaccggcaagcacggcaccagcctgaagaccctgtacagaaccatgaccggcctggacacccccgtgctgatggtgatcaaggacagcgacggccaggtgttcggcgccctggccagcgagcccctgaaggtgagcgacggcttctacggcaccggcgagaccttcgtgttcaccttctgccccgagttcgaggtgttcaagtggaccggcgacaacatgttcttcatcaagggcgacatggacagcctggccttcggcggcggcggcggcgagttcgccctgtggctggacggcgacctgtaccacggcagaagccacagctgcaagaccttcggcaacagaaccctgagcaagaaggaggacttcttcatccaggacatcgagatctgggccttcgagtag

SEQ ID NO: 196117 - protein, 1416 aa, Artificial Sequence
  derived and/or modified sequence
MKSLKSRLRRQDVPGPASSGAAAASAHAADWNKYDDRLMKAAERGDVEKVTSILAKKGVNPGKLDVEGRSVFHVVTSKGNLECLNAILIHGVDITTSDTAGRNALHLAAKYGHALCLQKLLQYNCPTEHADLQGRTALHDAAMADCPSSIQLLCDHGASVNAKDVDGRTPLVLATQMSRPTICQLLIDRGADVNSRDKQNRTALMLGCEYGCRDAVEVLIKNGADISLLDALGHDSSYYARIGDNLDILTLLKTASENTNKGRELWKKGPSLQQRNLTHMQDEVNVKSHQREHQNIQDLEIENEDLKERLRKIQQEQRILLDKVNGLQLQLNEEVMVADDLESEREKLKSLLAAKEKQHEESLRTIEALKNRFKYFESDHLGSGSHFSNRKEDMLLKQGQMYMADSQCTSPGIPAHMQSRSMLRPLELSLPSQTSYSENEILKKELEAMRTFCESAKQDRLKLQNELAHKVAECKALALECERVKEDSDEQIKQLEDALKDVQKRMYESEGKVKQMQTHFLALKEHLTSEAASGNHRLTEELKDQLKDLKVKYEGASAEVGKLRNQIKQNEMIVEEFKRDEGKLIEENKRLQKELSMCEMEREKKGRKVTEMEGQAKELSAKLALSIPAEKFENMKSSLSNEVNEKAKKLVEMEREHEKSLSEIRQLKRELENVKAKLAQHVKPEEHEQVKSRLEQKSGELGKKITELTLKNQTLQKEIEKVYLDNKLLKEQAHNLTIEMKNHYVPLKVSEDMKKSHDAIIDDLNRKLLDVTQKYTEKKLEMEKLLLENDSLSKDVSRLETVFVPPEKHEKEIIALKSNIVELKKQLSELKKKCGEDQEKIHALTSENTNLKKMMSNQYVPVKTHEEVKMTLNDTLAKTNRELLDVKKKFEDINQEFVKIKDKNEILKRNLENTQNQIKAEYISLAEHEAKMSSLSQSMRKVQDSNAEILANYRKGQEEIVTLHAEIKAQKKELDTIQECIKVKYAPIVSFEECERKFKATEKELKDQLSEQTQKYSVSEEEVKKNKQENDKLKKEIFTLQKDLRDKTVLIEKSHEMERALSRKTDELNKQLKDLSQKYTEVKNVKEKLVEENAKQTSEILAVQNLLQKQHVPLEQVEALKKSLNGTIENLKEELKSMQRCYEKEQQTVTKLHQLLENQKNSSVPLAEHLQIKEAFEKEVGIIKASLREKEEESQNKMEEVSKLQSEVQNTKQALKKLETREVVDLSKYKATKSDLETQISSLNEKLANLNRKYEEVCEEVLHAKKKEISAKDEKELLHFSIEQEIKDQKERCDKSLTTITELQRRIQESAKQIEAKDNKITELLNDVERLKQALNGLSQLTYTSGNPTKRQSQLIDTLQHQVKSLEQQLADADRQHQEVIAIYRTHLLSAAQGHMDEDVQEALLQIIQMRQGLVC

SEQ ID NO: 196118 - DNA, 4251 bp, Artificial Sequence
  derived and/or modified sequence
atgaagagcctgaagagcagactgagaagacaggacgtgcccggccccgccagcagcggcgccgccgccgccagcgcccacgccgccgactggaacaagtacgacgacagactgatgaaggccgccgagagaggcgacgtggagaaggtgaccagcatcctggccaagaagggcgtgaaccccggcaagctggacgtggagggcagaagcgtgttccacgtggtgaccagcaagggcaacctggagtgcctgaacgccatcctgatccacggcgtggacatcaccaccagcgacaccgccggcagaaacgccctgcacctggccgccaagtacggccacgccctgtgcctgcagaagctgctgcagtacaactgccccaccgagcacgccgacctgcagggcagaaccgccctgcacgacgccgccatggccgactgccccagcagcatccagctgctgtgcgaccacggcgccagcgtgaacgccaaggacgtggacggcagaacccccctggtgctggccacccagatgagcagacccaccatctgccagctgctgatcgacagaggcgccgacgtgaacagcagagacaagcagaacagaaccgccctgatgctgggctgcgagtacggctgcagagacgccgtggaggtgctgatcaagaacggcgccgacatcagcctgctggacgccctgggccacgacagcagctactacgccagaatcggcgacaacctggacatcctgaccctgctgaagaccgccagcgagaacaccaacaagggcagagagctgtggaagaagggccccagcctgcagcagagaaacctgacccacatgcaggacgaggtgaacgtgaagagccaccagagagagcaccagaacatccaggacctggagatcgagaacgaggacctgaaggagagactgagaaagatccagcaggagcagagaatcctgctggacaaggtgaacggcctgcagctgcagctgaacgaggaggtgatggtggccgacgacctggagagcgagagagagaagctgaagagcctgctggccgccaaggagaagcagcacgaggagagcctgagaaccatcgaggccctgaagaacagattcaagtacttcgagagcgaccacctgggcagcggcagccacttcagcaacagaaaggaggacatgctgctgaagcagggccagatgtacatggccgacagccagtgcaccagccccggcatccccgcccacatgcagagcagaagcatgctgagacccctggagctgagcctgcccagccagaccagctacagcgagaacgagatcctgaagaaggagctggaggccatgagaaccttctgcgagagcgccaagcaggacagactgaagctgcagaacgagctggcccacaaggtggccgagtgcaaggccctggccctggagtgcgagagagtgaaggaggacagcgacgagcagatcaagcagctggaggacgccctgaaggacgtgcagaagagaatgtacgagagcgagggcaaggtgaagcagatgcagacccacttcctggccctgaaggagcacctgaccagcgaggccgccagcggcaaccacagactgaccgaggagctgaaggaccagctgaaggacctgaaggtgaagtacgagggcgccagcgccgaggtgggcaagctgagaaaccagatcaagcagaacgagatgatcgtggaggagttcaagagagacgagggcaagctgatcgaggagaacaagagactgcagaaggagctgagcatgtgcgagatggagagagagaagaagggcagaaaggtgaccgagatggagggccaggccaaggagctgagcgccaagctggccctgagcatccccgccgagaagttcgagaacatgaagagcagcctgagcaacgaggtgaacgagaaggccaagaagctggtggagatggagagagagcacgagaagagcctgagcgagatcagacagctgaagagagagctggagaacgtgaaggccaagctggcccagcacgtgaagcccgaggagcacgagcaggtgaagagcagactggagcagaagagcggcgagctgggcaagaagatcaccgagctgaccctgaagaaccagaccctgcagaaggagatcgagaaggtgtacctggacaacaagctgctgaaggagcaggcccacaacctgaccatcgagatgaagaaccactacgtgcccctgaaggtgagcgaggacatgaagaagagccacgacgccatcatcgacgacctgaacagaaagctgctggacgtgacccagaagtacaccgagaagaagctggagatggagaagctgctgctggagaacgacagcctgagcaaggacgtgagcagactggagaccgtgttcgtgccccccgagaagcacgagaaggagatcatcgccctgaagagcaacatcgtggagctgaagaagcagctgagcgagctgaagaagaagtgcggcgaggaccaggagaagatccacgccctgaccagcgagaacaccaacctgaagaagatgatgagcaaccagtacgtgcccgtgaagacccacgaggaggtgaagatgaccctgaacgacaccctggccaagaccaacagagagctgctggacgtgaagaagaagttcgaggacatcaaccaggagttcgtgaagatcaaggacaagaacgagatcctgaagagaaacctggagaacacccagaaccagatcaaggccgagtacatcagcctggccgagcacgaggccaagatgagcagcctgagccagagcatgagaaaggtgcaggacagcaacgccgagatcctggccaactacagaaagggccaggaggagatcgtgaccctgcacgccgagatcaaggcccagaagaaggagctggacaccatccaggagtgcatcaaggtgaagtacgcccccatcgtgagcttcgaggagtgcgagagaaagttcaaggccaccgagaaggagctgaaggaccagctgagcgagcagacccagaagtacagcgtgagcgaggaggaggtgaagaagaacaagcaggagaacgacaagctgaagaaggagatcttcaccctgcagaaggacctgagagacaagaccgtgctgatcgagaagagccacgagatggagagagccctgagcagaaagaccgacgagctgaacaagcagctgaaggacctgagccagaagtacaccgaggtgaagaacgtgaaggagaagctggtggaggagaacgccaagcagaccagcgagatcctggccgtgcagaacctgctgcagaagcagcacgtgcccctggagcaggtggaggccctgaagaagagcctgaacggcaccatcgagaacctgaaggaggagctgaagagcatgcagagatgctacgagaaggagcagcagaccgtgaccaagctgcaccagctgctggagaaccagaagaacagcagcgtgcccctggccgagcacctgcagatcaaggaggccttcgagaaggaggtgggcatcatcaaggccagcctgagagagaaggaggaggagagccagaacaagatggaggaggtgagcaagctgcagagcgaggtgcagaacaccaagcaggccctgaagaagctggagaccagagaggtggtggacctgagcaagtacaaggccaccaagagcgacctggagacccagatcagcagcctgaacgagaagctggccaacctgaacagaaagtacgaggaggtgtgcgaggaggtgctgcacgccaagaagaaggagatcagcgccaaggacgagaaggagctgctgcacttcagcatcgagcaggagatcaaggaccagaaggagagatgcgacaagagcctgaccaccatcaccgagctgcagagaagaatccaggagagcgccaagcagatcgaggccaaggacaacaagatcaccgagctgctgaacgacgtggagagactgaagcaggccctgaacggcctgagccagctgacctacaccagcggcaaccccaccaagagacagagccagctgatcgacaccctgcagcaccaggtgaagagcctggagcagcagctggccgacgccgacagacagcaccaggaggtgatcgccatctacagaacccacctgctgagcgccgcccagggccacatggacgaggacgtgcaggaggccctgctgcagatcatccagatgagacagggcctggtgtgctag

SEQ ID NO: 196119 - DNA, 4251 bp, Artificial Sequence
  derived and/or modified sequence
atgaagtcgctgaaatccaggctgcggagacaggatgtccctggacctgcctcttcaggggcagccgctgctagtgcccacgcagccgattggaacaagtacgacgaccggttgatgaaagccgccgaacgcggagacgtggagaaagtcacctccattctggccaagaaaggagtgaacccaggaaaactagacgtcgaaggcaggagtgtttttcacgtggtgacatccaagggcaatctcgagtgtttgaatgctatcttaattcatggggtcgatatcacaaccagtgatacggctgggagaaacgccttgcacttggcggccaaatacgggcacgccttatgtctgcagaaactactgcagtacaattgtcccaccgagcacgcagacctgcagggacgcaccgctctgcacgacgcggccatggcagattgcccatctagcattcaactgctttgcgaccacggcgccagcgtcaacgcaaaggacgtcgacggacggaccccgttagtgttagcaacgcagatgtcccggcccactatctgtcagctgctgatcgacaggggggctgatgtgaactcaagggataaacagaaccgcacagctctcatgttaggctgcgagtacggttgccgagatgccgtggaggtcctcatcaagaatggagctgacatcagtctcctcgacgccctggggcatgactcaagttactacgcccgcattggcgacaatctggatattttaacacttcttaagacagctagtgagaacaccaataaggggcgggagttatggaaaaaaggtcctagtctgcagcaaagaaacctgacccatatgcaggatgaggtaaacgtgaagtctcaccaaagagaacaccagaacattcaggacctagagattgagaatgaagatttaaaagaacggctcagaaagattcagcaagaacaacggattttactggacaaggtcaacggtctgcaactccagttaaacgaggaagtaatggtggctgacgacctcgagagcgagcgagaaaagctaaaaagtctgctggcggctaaagaaaagcagcatgaggagtcactgaggacgatagaagccttaaagaatagatttaagtatttcgaatccgatcatctgggttctggaagtcatttctcgaacaggaaggaagacatgctgctgaaacagggtcaaatgtacatggctgattcacagtgcaccagccccggaattccagcgcacatgcagtctcgctctatgctcaggccactggagctttccctgccgtctcagacctcatacagcgagaacgagattcttaaaaaggaactggaagctatgaggacattttgcgaatctgctaagcaagatcggttaaagcttcaaaacgagttggcgcacaaggtggcggagtgtaaggccttggccctcgaatgtgagagagtgaaagaggactctgacgagcagattaaacagctggaagacgctctgaaggacgtgcaaaaacggatgtatgagagcgaaggtaaggtcaagcagatgcagacccactttctcgccttgaaggagcaccttactagcgaagctgcaagcggaaatcacagactgacagaagaactgaaggaccaacttaaggatctgaaggtgaagtacgaaggagcctctgcagaggtgggaaagcttcggaatcagataaaacagaatgaaatgatcgtcgaggaatttaagcgtgatgaaggtaagttgatcgaggaaaataagaggctgcagaaggagctcagtatgtgtgagatggagcgagagaaaaaagggagaaaagtaacagagatggaaggacaggctaaggagttaagcgctaaactggcgctgagcatccctgctgagaaatttgagaacatgaaatcttctctgagtaatgaagttaatgaaaaggctaagaaactcgtggaaatggaaagggaacacgagaaatctttgagcgagatcaggcaactgaaacgggaacttgagaatgtaaaagccaaactggcccagcacgtcaagccagaggagcacgagcaggtgaagtcccgactcgagcagaagagcggggaacttgggaaaaagatcaccgaactgaccttaaagaaccagaccctgcagaaggagatcgaaaaagtttacttggataacaagctactcaaagaacaggcgcacaaccttactatagaaatgaaaaatcattatgtccctctgaaggtgagtgaggatatgaaaaagagccacgacgccatcattgatgatctgaatagaaagctactggatgtgacccagaaatacaccgagaaaaagctggagatggagaagctcctgctcgaaaacgatagtctgtctaaggatgtgtctagattggaaacagtgttcgtgccccccgagaaacacgagaaggaaatcatcgcgctcaaaagcaacattgtggagctgaaaaaacagctcagcgaactgaagaaaaaatgtggagaggatcaggagaaaattcacgccttaactagcgaaaataccaatttgaaaaaaatgatgagtaaccaatacgtacctgtgaagacccatgaggaggttaaaatgaccctgaatgatacacttgccaaaaccaaccgcgaattgctggacgttaaaaagaaatttgaagatattaaccaggagttcgtaaagatcaaggataagaatgaaatcctgaaacggaaccttgagaatactcagaatcagatcaaggctgaatacatctcactggcagaacatgaagctaagatgtcctctctgtcacagtctatgagaaaggtccaggactctaatgcagaaatccttgcgaattataggaagggccaggaggagattgtgaccctgcatgcagaaataaaagctcagaaaaaagagttggatacgatccaggagtgtatcaaagtgaagtatgctcccattgtctcatttgaagagtgcgagcggaaatttaaggctacagaaaaggaattgaaagaccaactttcagagcagacgcaaaaatactctgtgagcgaagaagaagttaaaaagaacaaacaggaaaacgacaagctgaaaaaggaaatatttacattacaaaaggatctccgggacaagacagtcttaattgaaaagtcccatgagatggaaagagctcttagccggaaaactgatgagcttaacaagcagctcaaggacctgtcccagaaatatacggaagttaaaaacgtgaaggagaagctggtcgaggagaacgccaagcagacctcagagatacttgccgtccagaacctgcttcagaagcagcacgtcccattggagcaggtcgaggctctgaagaagagtctaaacggcactatcgagaatttgaaggaggagcttaagtctatgcaacgatgttatgagaaggagcaacaaaccgtgacaaagcttcatcagctgctggaaaatcagaagaattcttccgtcccactggcggaacatttgcagattaaagaagccttcgagaaggaagttggaatcatcaaggcttcgcttagggaaaaggaggaggaatctcagaacaagatggaggaagttagcaagttgcaaagcgaggttcagaataccaagcaagctctgaaaaagctggagacacgagaggtcgttgatcttagcaagtacaaagccaccaagtctgaccttgagactcagatcagttctctgaacgaaaagctggccaatctgaaccggaaatatgaagaagtgtgtgaagaggtcttgcatgccaagaaaaaggagatctctgcaaaggatgagaaagaattactccactttagcattgaacaggaaatcaaggatcagaaggagcgttgtgacaagtccctgacgactattacagagctgcagcggcggatccaggaaagcgccaagcagatcgaggctaaggataacaagataaccgagctgcttaacgacgtggagagactcaagcaggctctcaacgggctgagtcaacttacatacacatctgggaatcccacgaaaaggcagagccagctgatcgatacactgcagcatcaagtgaaatccctcgaacagcaactggccgatgctgatcgccagcaccaggaagtgatcgccatttaccgcactcatctgttgagcgccgcccagggacatatggacgaggacgtgcaggaggcactgctgcaaattattcaaatgcgccagggccttgtgtgttag

SEQ ID NO: 196120 - DNA, 4251 bp, Artificial Sequence
  derived and/or modified sequence
atgaagagcctgaagagccggctgcggcggcaggatgtgcccggccctgccagcagtggagctgctgctgccagcgcccacgccgctgactggaacaagtatgatgaccggctgatgaaggctgctgagagaggagatgtggagaaggtgaccagcatcctggccaagaagggcgtgaaccctgggaagctggatgtggagggccgcagcgtcttccacgtggtgaccagcaagggcaacctggagtgcctgaatgccatcctgatccacggcgtggacatcaccaccagtgacacagctggaagaaatgccctgcacctggccgccaagtatggccacgccctgtgcctgcagaagctgctgcagtacaactgccccacagaacatgctgacctgcagggccgcacagccctgcatgatgctgccatggctgactgccccagcagcatccagctgctgtgtgaccacggggcctctgtgaatgccaaggatgtggatggccgcacccccctggtgctggccacccagatgagccggcccaccatctgccagctgctgattgacagaggagcagatgtgaacagccgggacaagcagaacagaacagccctgatgctgggctgtgaatatggctgcagagatgctgtggaggtgctgatcaagaatggagctgacatcagcctgctggatgccctgggccatgacagcagctactatgcccgcatcggggacaacctggacatcctgaccctgctgaagacagccagcgagaacaccaacaagggccgggagctgtggaagaagggccccagcctgcagcagaggaacctgacccacatgcaggatgaggtgaatgtgaagagccaccagcgggagcaccagaacatccaggacctggagattgaaaatgaagacctgaaggagcggctgaggaagatccagcaggagcagaggatcctgctggacaaggtgaatggcctgcagctgcagctgaatgaggaggtgatggtggctgatgacctggagagcgagcgggagaagctgaagagcctgctggccgccaaggagaagcagcacgaggagagcctgcggaccatcgaggccctgaagaaccgcttcaagtactttgaaagtgaccacctgggcagcggcagccacttcagcaacaggaaggaggacatgctgctgaagcagggccagatgtacatggctgacagccagtgcaccagccctggcatcccagcccacatgcagagccgctccatgctgcggcccctggagctgagcctgcccagccagaccagctacagtgaaaatgagatcctgaagaaggagctggaggccatgaggaccttctgtgagagcgccaagcaggaccggctgaagctgcagaatgagctggcccacaaggtggccgagtgcaaggccctggccctggagtgtgagcgggtgaaggaggacagtgatgagcagatcaagcagctggaggatgccctgaaggatgtgcagaagaggatgtatgaaagtgagggcaaggtgaagcagatgcagacccacttcctggccctgaaggagcacctgaccagcgaggccgccagcggcaaccaccggctgacagaggagctgaaggaccagctgaaggacctgaaggtgaagtatgaaggagccagcgctgaggtgggcaagctgaggaaccagatcaagcagaatgagatgattgtggaggagttcaagagagatgagggcaagctgattgaggagaacaagaggctgcagaaggagctgtccatgtgtgagatggagcgggagaagaagggcaggaaggtgacagagatggagggccaggccaaggagctgagcgccaagctggccctgagcatcccagctgagaagtttgagaacatgaagagcagcctgagcaatgaggtgaatgagaaggccaagaagctggtggagatggagcgggagcacgagaagagcctgtctgagatccggcagctgaagcgggagctggagaatgtgaaggccaagctggcccagcacgtgaagccagaggagcacgagcaggtgaagagccggctggagcagaagagcggggagctgggcaagaagatcacagagctgaccctgaagaaccagaccctgcagaaggagattgagaaggtgtacctggacaacaagctgctgaaggagcaggcccacaacctgaccatcgagatgaagaaccactacgtgcccctgaaggtgtctgaggacatgaagaagagccatgatgccatcattgatgacctgaacaggaagctgctggatgtgacccagaagtacacagagaagaagctggagatggagaagctgctgctggagaatgacagcctgagcaaggatgtgtcccggctggagaccgtgtttgtgcccccagagaagcatgagaaggagatcatcgccctgaagagcaacatcgtggagctgaagaagcagctgtctgagctgaagaagaagtgtggggaggaccaggagaagatccacgccctgaccagcgagaacaccaacctgaagaagatgatgagcaaccagtatgtgcctgtgaagacccatgaggaggtgaagatgaccctgaatgacaccctggccaagaccaaccgggagctgctggatgtgaagaagaagtttgaggacatcaaccaggagtttgtgaagatcaaggacaagaatgagatcctgaagaggaacctggagaacacccagaaccagatcaaggccgagtacatcagcctggccgagcacgaggccaagatgagcagcctgagccagagcatgaggaaggtgcaggacagcaatgctgagatcctggccaactacaggaagggccaggaggagatcgtgaccctgcatgctgagatcaaggcccagaagaaggagctggacaccatccaggagtgcatcaaggtgaagtatgcccccatcgtgtcctttgaagaatgtgagaggaagttcaaggccacagagaaggagctgaaggaccagctgtctgagcagacccagaagtacagcgtgtctgaggaggaggtgaagaagaacaagcaggagaatgacaagctgaagaaggagatcttcaccctgcagaaggacctgcgggacaagacagtgctgattgagaagagccatgagatggagcgggccctgagcaggaagacagatgagctgaacaagcagctgaaggacctgagccagaagtacacagaggtgaagaatgtgaaggagaagctggtggaggagaatgccaagcagaccagcgagatcctggccgtgcagaacctgctgcagaagcagcacgtgcccctggagcaggtggaggccctgaagaagagcctgaatggcaccatcgagaacctgaaggaggagctgaagtccatgcagcgctgctatgagaaggagcagcagacagtgaccaagctgcaccagctgctggagaaccagaagaacagctctgtgcccctggccgagcacctgcagatcaaggaggcctttgagaaggaggtgggcatcatcaaggccagcctgcgggagaaggaggaggagagccagaacaagatggaggaggtgtccaagctgcagagcgaggtgcagaacaccaagcaggccctgaagaagctggagacccgggaggtggtggacctgagcaagtacaaggccaccaagagtgacctggagacccagatcagcagcctgaatgagaagctggccaacctgaacagaaaatatgaggaggtgtgtgaggaggtgctgcacgccaagaagaaggagatcagcgccaaggatgagaaggagctgctgcacttcagcattgagcaggagatcaaggaccagaaggagcgctgtgacaagagcctgaccaccatcacagagctgcagaggcgcatccaggagagcgccaagcagatcgaggccaaggacaacaagatcacagagctgctgaatgatgtggagcggctgaagcaggccctgaatggcctgagccagctgacctacaccagcggcaaccccaccaagaggcagagccagctgattgacaccctgcagcaccaggtgaagagcctggagcagcagctggctgatgctgaccggcagcaccaggaggtgattgccatctaccgcacccacctgctgtctgctgcccagggccacatggatgaagatgtgcaggaggccctgctgcagatcatccagatgaggcagggcctggtgtgctag

SEQ ID NO: 196121 - DNA, 4251 bp, Artificial Sequence
  derived and/or modified sequence
atgaagagcctgaagagccggctgcggcggcaggacgtgcccggccctgccagtagtggagcagcggcagccagcgcgcatgccgctgattggaacaaatatgatgacaggctgatgaaggcagcagaacgcggcgacgtggaaaaagtgacgagtatcctggctaaaaagggcgtgaatccaggtaagctggatgtggaggggagaagtgttttccacgttgtcactagtaaaggcaacctcgaatgtctgaacgccattctgatacacggcgtggatattacaacatctgatactgcaggccgtaatgccctccatctcgccgctaaatacggacatgcactttgtctgcaaaagttgctccagtataattgtcccacagagcatgcggatctgcaaggaaggaccgctctgcatgatgctgctatggcagactgtccatccagtatccagctgctgtgcgaccacggcgcaagcgtcaatgctaaagacgtggacggacggaccccactggtactcgccactcagatgtctagacctacaatttgtcagctcctgatcgatcgcggtgcagacgtgaacagccgcgacaagcaaaacaggactgcgcttatgctaggctgtgagtacggctgtagggatgccgtggaagttctaattaagaatggcgcggatatttccctgcttgacgctttgggacatgattctagctactatgcgcggatcggggataatctggacatattgacgttgctgaagactgccagtgaaaacacaaacaagggcagagaactttggaaaaaagggccaagcctccaacagagaaacctcacacacatgcaggacgaagtcaacgtcaaatctcatcaaagggaacatcaaaatatacaggacctggaaattgaaaacgaagatcttaaagagagacttcgtaagattcaacaggagcagaggattcttctggacaaagtcaacgggctccagctccagctgaatgaggaggttatggtggcagatgacctcgagagcgaacgcgagaagcttaaaagcctgctggcagccaaggagaagcaacatgaggagagcctgagaacaattgaagccctaaagaatagatttaaatacttcgagtccgaccaccttggtagcgggtcccatttttctaacaggaaagaggacatgttactgaagcaagggcagatgtacatggcggatagtcagtgtacatcgccaggaataccagcgcacatgcagagccgttcaatgttgagaccattagaactttctttgcctagtcaaacctcttacagcgagaatgagattttgaagaaggaattggaggcgatgcgaaccttctgcgagtccgccaagcaggatagactgaaactgcagaatgagctggctcacaaagtagctgaatgcaaagctctggctctggaatgcgaacgcgtcaaggaagattccgatgaacagatcaaacagctcgaagatgccttgaaagacgttcagaagaggatgtacgaatcggaagggaaggtcaagcagatgcagactcactttcttgcgcttaaagaacacctcacttccgaggctgcatctggaaatcatcgtctgacggaggaactgaaggaccagctgaaggaccttaaagtgaagtacgaaggcgcaagcgcggaggtaggaaaactgcgcaatcagataaagcagaacgaaatgattgtggaggaatttaaacgggacgagggcaagctcattgaggaaaataaaagactgcaaaaagagctgagtatgtgtgagatggagcgagagaaaaaagggcggaaggtaaccgagatggaggggcaggccaaagagctgagtgccaagctcgctttgtctattccagcggagaagtttgagaacatgaaatcctccctttcaaacgaagttaatgaaaaggccaaaaaactggttgaaatggaacgggagcacgaaaagagcctctccgaaattcggcaactgaagcgcgagctggaaaacgttaaagcgaaattggcacaacatgtaaaaccagaagagcacgaacaagtgaaaagtcgcttggaacagaagtcaggtgaactgggaaagaagatcacggaactgactctcaaaaatcagaccttacagaaggagattgagaaagtgtatttggataacaagctactcaaggaacaggcccacaatttaactatagagatgaaaaatcattatgtgcctctgaaagttagcgaggacatgaagaagagtcatgacgcgatcatagacgatttaaaccggaaactgctcgatgtgacccaaaagtatacagagaaaaagctggaaatggagaagctgcttctggaaaatgattctctgtcaaaggacgtgtcccggctggagacagtgttcgttcctccagaaaaacacgagaaggaaatcatcgccctcaagagcaatatcgtcgagctaaaaaagcagctctccgagctcaaaaaaaaatgcggtgaagatcaggagaagattcatgcgttaacaagcgaaaacaccaatctcaaaaagatgatgagcaaccaatatgttcccgtcaaaacacatgaagaagtgaagatgacactaaatgatacattggccaaaacgaaccgcgaattacttgacgtgaaaaagaaattcgaagatattaaccaagaattcgtcaaaatcaaggataagaacgagatcctgaagaggaacctcgagaacacacagaaccagattaaggctgagtacatcagcctggccgagcatgaggcaaagatgagctcactgtcacagtccatgcggaaagtccaggactccaacgctgaaatcctcgcaaactatcgcaagggccaagaggagatagttaccctccacgccgagatcaaggctcagaaaaaggagctagatacaatacaggagtgtatcaaggtcaagtacgcaccaatagtgagctttgaagagtgtgaacggaaatttaaagccactgagaaggagctcaaagaccagctcagtgagcagacacaaaagtactctgtgtctgaggaagaggtcaaaaagaataagcaggaaaacgataaactcaaaaaggagatttttacgttacagaaagacctgcgagataagactgtactaattgagaagtcccatgaaatggaaagagctctctccagaaaaacggatgagctgaacaaacagttgaaagatttgagtcagaaatatacagaggttaagaatgttaaagaaaaactggtagaggagaacgctaagcagacctccgaaattctggccgtgcaaaaccttcttcagaaacagcacgttcctctggagcaagttgaggccttgaagaagagtctcaacggtactattgaaaatttgaaggaagagctcaagtcgatgcaacggtgttatgagaaagaacagcagaccgtaaccaagctgcatcagctcctggagaatcagaagaatagctccgtgcctctcgctgagcacctgcaaattaaggaggcattcgagaaagaagtaggtattattaaggctagcttgcgtgaaaaggaggaggagtcacagaataagatggaggaggtcagtaagctgcagtcggaggtgcaaaacaccaagcaggccttaaagaaactggagacacgggaagtcgtggacttgagcaaatataaagctaccaaatctgacttggaaacgcagatctcttcactcaatgaaaagctggcgaatttaaatagaaagtacgaggaggtgtgtgaagaggtgttacacgctaaaaaaaaggagatctccgccaaagatgagaaagaactgctccacttctccatcgagcaggaaatcaaggaccaaaaggagcgctgcgacaagagcctgacaactataacagagctccagagaaggatacaggagagcgctaagcagatcgaggcgaaggataacaagatcacagagctcctcaacgacgtggaacggctgaagcaggccctgaacggactgtcccagctcacctatacaagcggcaaccctaccaagcgacagagtcagctgatagacaccctccagcaccaggtcaagagtctggaacagcagttggcagacgccgaccgacagcaccaggaggtgatcgcgatttacagaacacatctcctgtccgcagcacaggggcatatggatgaggacgtgcaggaggccttactgcagataatacagatgagacagggcttggtatgctag

SEQ ID NO: 196122 - DNA, 4251 bp, Artificial Sequence
  derived and/or modified sequence
atgaagagtctgaagagtcgcctccggagacaagacgtgccaggccctgcctcttccggagccgcagctgctagtgcgcacgctgctgactggaataaatacgacgacaggctcatgaaggctgccgagcgtggtgatgtagagaaggtaacctccattctggctaagaagggggtgaacccaggaaagctggatgtagaagggagaagcgtttttcatgtggtgacatcaaagggtaatctggaatgcctgaatgctatactgatccacggcgtggacataaccacttctgataccgccggacgaaatgcgttacacctggcggcaaagtacggtcacgccttgtgtctacagaaactactgcagtataattgtccaacagaacatgctgatctgcaggggcgtaccgcgctccacgacgccgcaatggcggactgtcccagttcgatccaactcctttgtgatcacggcgctagtgtgaatgcaaaagacgtagacgggaggacacccctggttctggccacccaaatgagtaggccgaccatctgtcagctcctcatcgatcggggagcagatgtcaatagcagagacaaacagaacaggaccgcacttatgctggggtgtgagtatggctgcagagatgcagtcgaggtgctaatcaaaaatggagccgacatctccctgttggatgccctcggccacgattcctcctactacgcacggataggcgacaacctggatatactgacattgctgaagaccgcgtctgaaaataccaataagggcagggaattgtggaagaagggcccaagcctgcaacaaaggaacctgacacatatgcaggacgaggttaacgttaagtcccaccaacgcgagcaccagaacatacaagacctagagattgagaatgaagaccttaaggagcggctcagaaagattcaacaagaacagcgtattctgctggacaaggtgaacggcttgcaactgcagctgaatgaagaggtgatggtcgcggacgacctcgagagtgagagagagaaactcaaatctttgcttgcagccaaggaaaagcaacacgaggagtctctcagaacaattgaagcactcaagaatcgatttaagtacttcgaaagtgatcatcttggaagcgggtcccatttttctaatcgcaaggaggacatgctgctgaagcagggacagatgtacatggccgactcgcagtgcacatctcctggaattccagcccacatgcagagcaggagcatgcttcgccctcttgagctgtccttgccaagtcagacttcatattctgagaacgaaattctgaagaaggagctggaagcaatgagaactttctgtgaaagtgccaagcaggatcggctgaaactgcagaacgaactcgcccacaaagtggccgaatgtaaggcactggccctggaatgcgagcgagtgaaagaagattcagacgagcagatcaagcagctcgaagatgccttaaaggacgtgcagaaaaggatgtatgagagtgagggcaaagtgaagcaaatgcagactcacttcctcgccctaaaagaacatctaacctcagaagctgcatctggaaatcacaggctgactgaggagctgaaagaccagctgaaggacctgaaggtgaaatacgagggggcatccgccgaggttggcaagctgcggaaccagatcaaacagaatgaaatgattgtggaggaatttaagcgggacgaaggtaaactgatcgaggagaataagcggttacagaaagagctctcaatgtgcgagatggaacgagagaaaaagggcaggaaggtcaccgagatggagggccaggcgaaagaactgtctgccaagctggccctatctattccagctgaaaaatttgagaacatgaagagcagtctgtccaacgaggtaaatgagaaggcgaagaagttggtggaaatggaacgggagcacgagaagtctctcagtgaaatccgccagctcaagagagaactcgagaatgtcaaggccaaattggcacagcatgtaaaaccagaagagcatgaacaggtaaaatctcgtcttgaacagaagagcggagagctaggcaaaaaaattactgaattaactctgaaaaaccagacactccagaaggagattgagaaagtgtaccttgataacaaattactgaaagaacaggcccacaacttaactatcgagatgaagaaccactatgtacctcttaaggtaagcgaggacatgaagaaatcccatgacgctattatcgacgacctgaaccgaaaactgttggatgttacacagaagtacacagagaagaaactggaaatggagaaactcctacttgagaacgattccctgtctaaggacgtctcccgactggaaacggtgtttgtcccacccgagaaacacgaaaaagaaatcattgcccttaaaagcaacatcgttgagctgaagaagcagctgtcagaactgaaaaagaaatgcggtgaggatcaggaaaagattcatgccctcacttcggagaatacgaatctgaagaagatgatgagcaatcagtacgtcccagtaaaaactcacgaggaggtgaagatgaccttgaacgacactctagccaagaccaacagagagctgctggatgtgaagaaaaaattcgaggatatcaatcaggagtttgtcaagattaaagacaagaatgaaatcctgaaaagaaacttggagaacacccaaaatcagatcaaagccgagtacatttcactggcagagcacgaagccaaaatgtcaagccttagtcaaagcatgcgtaaggttcaggatagcaatgctgagatcctggccaattacaggaagggccaggaggaaattgttacactccacgcagagattaaggcccagaagaaggaacttgataccatacaggagtgcattaaggtcaaatatgcccctatcgtgtcgttcgaagaatgtgagcgcaaattcaaggctacagaaaaggaactgaaggatcaattgtcagaacagacacagaaatatagtgtgagtgaggaagaagttaaaaagaacaaacaggagaatgacaagctgaaaaaggagatcttcacactgcagaaagaccttcgcgacaaaacagtactgattgagaagtcccatgagatggagcgtgccttgtccaggaagacagacgagttaaataagcagctgaaggacctctcacagaaatatacggaggtaaagaatgtaaaggagaagctagtggaagagaacgccaaacagacatccgagatccttgccgtgcaaaatctgttacagaagcagcacgtgccattggaacaagttgaggccttaaagaagagcctgaatggcaccatcgagaaccttaaggaagagctcaagagcatgcaaagatgttacgaaaaagaacagcagactgtaacaaagctgcaccaacttttagagaaccagaagaatagctctgtgcccctcgccgagcacctgcagattaaagaggcctttgagaaagaagtaggaatcatcaaggcctctttacgcgaaaaggaagaagagtcccaaaataaaatggaagaggtgtctaaactccagtccgaggtgcagaatacaaagcaagccttgaagaaacttgagacccgggaggtggtcgatttgagcaagtataaggccacgaagtcagatctggagacacagatatctagcttaaatgaaaagctggctaacctcaacaggaaatacgaggaggtctgcgaggaggtcctacacgctaaaaagaaagaaatctccgccaaggacgagaaagaattgttgcactttagtatcgaacaggagatcaaagatcagaaagagcggtgcgacaagtctttgaccacaatcaccgaattgcagcggagaatccaggagtccgcaaagcagattgaagctaaagacaacaagattacggaactgttgaacgatgtcgaaaggcttaaacaagcccttaacgggcttagccagctcacctataccagcgggaatccaacaaaacgccagtcccagctcattgacacccttcagcaccaggtcaaatctctggagcaacagctggccgatgccgataggcagcaccaagaggtgattgctatttaccgaacccacctgctgtccgctgctcaagggcacatggacgaggacgtgcaagaggctctgcttcagatcatccagatgagacaggggctggtctgttag

SEQ ID NO: 196123 - DNA, 6939 bp, Artificial Sequence
  derived and/or modified sequence
aattggctacgggaggggagccccgcctcaggcctgtcgacgtctgctgcccggggcccgcaggtggcaggcaggtggggctggtacagcccgcgccgcctctgctgcagccgctgccgtctactccttgcgcgctggcactccgcagcctttaaggttcgcgcgggggccaggcaagagttagccatgaagagcctcaagtcccgcctgaggaggcaggacgtgcccggccccgcgtcgtctggcgccgccgccgccagcgcgcatgcagcagattggaataaatatgatgaccgattgatgaaagcagcagaaaggggggatgtagaaaaagtgacctcaatccttgctaaaaagggggtcaatccaggcaaactagatgtggaaggcagatctgtcttccatgttgtgacctcaaaggggaatcttgagtgtttgaatgccatccttatacatggagttgatattacaaccagtgacactgcagggagaaatgctcttcacctggctgctaagtatggacatgcattgtgcctacaaaaacttctacagtacaattgtcccactgagcatgcagacctgcagggaagaactgcacttcacgatgccgcaatggcagattgtccttctagcatacagctgctttgtgaccatggggcctctgtgaatgccaaagatgtagacgggcggacaccacttgttctggctactcagatgagtaggccaacaatatgtcaactgctgatagatagaggagcggatgttaattccagagacaaacaaaacagaactgccctcatgctaggttgcgaatatggttgcagagatgcagtagaagtcttaattaaaaatggtgctgatataagcttgctggatgcgcttggccatgatagttcttactatgcaagaattggtgacaatctggacattctaaccttgttgaagactgcatcggaaaataccaacaaagggagagaactttggaagaaagggccatctttgcaacagcgaaatttgacacacatgcaagatgaagtaaatgtgaagtcacatcagagggagcatcaaaatattcaggatttggagattgaaaatgaagatttgaaagagaggttgagaaaaattcagcaagaacaaagaatacttttggataaagtcaatggtttacagttacagctgaatgaggaagttatggttgctgatgatctggaaagcgagagagaaaagctgaagtcccttttggcagctaaagaaaagcaacatgaagaaagcttaaggactattgaggctctgaaaaatagatttaaatattttgagagtgatcatttaggatcaggaagtcatttcagtaaccgaaaagaagatatgcttcttaaacaaggtcagatgtatatggcagactcacagtgtacttccccaggtataccagcccatatgcaaagcagatctatgttaagacctctggaactatctttacccagtcaaacgtcatactctgaaaatgaaattttaaagaaagagttagaagcaatgcgaactttctgtgagtcagcaaaacaagaccgactgaagctccaaaatgaactggcacacaaagtggcagaatgcaaagctttagcattagaatgtgaaagggtcaaggaggattcagatgaacagataaagcaattagaagatgcattaaaagatgtgcagaagaggatgtatgagtcagaaggtaaagttaaacaaatgcagacccattttcttgcccttaaagaacacttaacaagtgaagcagcctcagggaatcacagactaaccgaggaactgaaggatcagttgaaagacttgaaagtaaaatatgaaggtgcttcagcagaagtggggaaattaagaaaccaaatcaaacaaaatgagatgatagtagaagagtttaagagggatgaaggcaagctgatagaagaaaataagcgattacagaaggaacttagtatgtgtgaaatggagcgagagaagaaaggaagaaaggtcacagagatggaaggccaggcaaaagaattgtcagcgaagttggccctttccattccagctgaaaaatttgaaaacatgaagagctcattatcaaatgaagtgaatgagaaagcaaaaaaattagtagaaatggaaagagaacatgaaaaatcacttagtgaaattagacagttaaagagagaacttgagaatgttaaggccaagcttgctcagcacgtcaaaccagaggaacatgaacaggttaagagcagattagaacagaaatcaggagaacttgggaagaagatcactgagttaacattgaaaaatcagacactacaaaaggaaattgaaaaagtttatttggataataagctcctcaaggagcaagcacataacttaacaattgaaatgaaaaatcattatgttcctttaaaagtaagtgaagacatgaaaaagtcacatgatgcaattattgatgatcttaatagaaagcttttagatgtaacacaaaaatatacagaaaagaagttggaaatggagaaattgctactggaaaatgacagcttaagtaaggatgtaagccgcctagaaactgtgtttgtacctcctgagaaacatgaaaaagagataatagctctgaaatccaatattgttgaacttaagaaacagctgtctgaacttaagaaaaaatgtggtgaagaccaggagaaaatacacgctctcacatctgaaaacactaacttgaagaagatgatgagtaatcagtatgtgccagttaaaacccatgaagaggttaaaatgacactgaatgacacgttagccaaaactaacagagaattattagatgtgaagaaaaaatttgaagatataaatcaggaatttgtaaaaataaaagataagaatgaaatattaaaaagaaacctggaaaacactcagaaccaaataaaagctgagtacatcagcctggcagagcacgaggcaaagatgagctcgctaagtcagagcatgagaaaggtgcaggatagtaatgctgaaatcttggccaactacagaaaaggccaagaagagattgtgacactgcatgccgaaattaaagcccagaagaaggagctcgacacaatacaagaatgcattaaggtaaaatacgccccaattgtcagctttgaggagtgcgagagaaaatttaaagcaacagagaaagaactaaaagaccagttatcagagcagacacaaaagtatagtgtcagtgaagaagaagtcaagaaaaacaagcaagagaatgacaagttaaagaaggagatttttacccttcagaaagatttgagagataagacagttctcattgagaagtctcatgaaatggaaagagcattaagcagaaaaacagacgagctaaacaaacagttaaaagacttgtcacagaaatacacggaagtaaagaatgtgaaagagaagctagtagaagaaaatgccaaacagacttctgagatacttgcagtgcaaaatcttttgcaaaaacaacatgttccattggaacaggttgaggctctgaaaaaatctcttaatggcacaattgaaaatctaaaggaagaactgaagagtatgcaaaggtgttacgagaaagagcagcagacagtgaccaaactgcatcaattgttggagaatcaaaagaactcttctgtacccctggcagagcatttgcagattaaagaagcatttgagaaagaagttggaatcataaaagccagcttgagagaaaaggaagaagaaagccaaaacaaaatggaagaagtctccaaacttcagtcggaggttcagaatactaaacaagcattaaaaaaattagagactagagaggtagttgacttgtctaaatataaagcaacaaaaagtgatttggagacacagatttctagcttaaatgaaaaattggccaatctgaatagaaagtatgaggaagtatgtgaggaagttttgcatgccaaaaagaaggaaatatctgcaaaagatgagaaggaattactgcatttcagcattgagcaagaaattaaggatcagaaggaacgatgtgataagtccttaacaacaatcacagagttacaaagaagaatacaagaatctgctaaacaaatagaagcaaaagataataagataactgaactgcttaatgatgtggaaagattaaaacaggcactcaatggcctttcccaactcacctacacaagtgggaaccccaccaagaggcagagccagctgattgacactctgcagcaccaagtgaaatctctggagcaacagctggccgatgctgacagacagcaccaagaagtaattgcaatttatcggacacaccttcttagtgctgcacagggtcacatggatgaagatgttcaggaggctctgctccagatcatacaaatgcggcaggggcttgtgtgctagccgttagcactgactgccagtatctgttttatcttgctggtgctgaacattctttgtgcaactccatggtctttctgggccttactgtgctggtataattaaaataaaatatattttgttctattggtaggtttttttttaaaattagatgaatatgttagtctttttcaatatcagtttgaatcttattttctgtatgtgttaattttacaaataggcaaacaacataactttgccctggattgactacatatttttaaaccttcaagtccctaataaaacatgagccatctgagtgagtccatatgaagcgaggttaggctgaaataattgcttaaagatgtctttcagagaaattaatttggttggtggccacttttaggtggatcaaaagacctttcagatcctcagaaccttgagacataatacagttgtgaggaatgtgttgtaacttggctggccaagttacatgttacagtatctttactgaggtaacttcattagtgtctttggccttttttgtaggtatagatattttttctttttacactaataacttttatgccttttaaaataaatttattttcataaatggtttgcagtgctaaattacatttagattaagaacaggcaggggtggaatatatcaggaatttataataaaattgccttaatctctacaacagtatcttaatttttacttgcggtgactattcttgccacaatattggagaataatgatagatgatatactagatttttcaaagtgtgaaaacctttagactttttttagcaattagtttgacattcgctactatagtaaccaagcactcattatatatgcatcctccaaatgtttcatgcttatttataggaaagttatattaatgagattaataatgtgaaatacagttttcctgcaaaattagcattagagaattgattttagataacagatttttaaagttttagagaaaagtacagtaatacagtaaactgaaagagtatatagatagcaataaaataacataagtggacatgtttatagtaaatactctgaagtaaacaaccgtttttattaactgcatctcattagggaaagtttatatgtcttgttattttttattaacattttatttaccattcagagtgaaaattactaatttgagtattaacaaataactgaataaatggatcattacagttaggttttctcaaattgcaaaatttgccttagcaattatctttgaacatcccgaaccagatttttaaatcccatttttgtttaatagggtaaaaataccatcaaaatgacttctcataccaaagaataagccatcatattttttcggtgttgaaacaacattgaaagtcagaattggatttgtttttaattctttatacggtttacataagcaatatctgtctctttaattattatgattaatgtcgtccttcagcatgagttctgtttcacaagttttgggccacctatttcaataaaaaataaaatataaattaaaaaagttgccgggggtggtggctcatgcctgtaatcccagcactttgggaggctgagggaggtagatcacctgaggtcagaagttcgagaccagccttaccaatatggtgaagccccatctctactaaaaatacaaaaattagccctgcatggtggcaggtgcctgtagtcccaggtactcgggaggctgagacaggagaatcgcttgaacctgggaggcggaggttgcagtgagccaagatctcgccactgcactccagcttgggcaatagcaagactccatctcaaaataaaataaaataaaacttagagcaaagtttaaaactgagtattcatattaagtgttttattttccatattagagatgggaagggaaccttatgtgtattttattttgttttcaaccatcaataaagttttctctagaatattgttttgaacatccttgtaaaagatttgcgagttaaactattttatttactgtctgtgagagcattgggagtaggaaacgatggactccaaagtacaagggagaatacccattttcattcagctatctggagtaaaatatcaagtacttccttcaactaatcttgtctcattcactcaccttttgatatcgaaggcagaaattgcgtttacaacactgaagaccaaagctttttaattagtaaacaagcggaacatagataatggacaatgctggccactgccattctgtgttcagaaagactatgagacctgaacatatggccaagaggaaagaagagtgacgttgtctaagatgtaatgagtgctctctgagagaatcactcaattcctattggagtgcaatccttacttgagaactttattactcttgttctgtgtagttttttttttttgtcacttccccatcagaaaagcatattctttttgatagagggtcagtgttataaataattgtcttttgaaataaaatcaaatattcatgcattgaa

SEQ ID NO: 196124 - DNA, 828 bp, Artificial Sequence
  derived and/or modified sequence
atgggcaacttcagaggccacgccctgcccggcaccttcttcttcatcatcggcctgtggtggtgcaccaagagcatcctgaagtacatctgcaagaagcagaagagaacctgctacctgggcagcaagaccctgttctacagactggagatcctggagggcatcaccatcgtgggcatggccctgaccggcatggccggcgagcagttcatccccggcggcccccacctgatgctgtacgactacaagcagggccactggaaccagctgctgggctggcaccacttcaccatgtacttcttcttcggcctgctgggcgtggccgacatcctgtgcttcaccatcagcagcctgcccgtgagcctgaccaagctgatgctgagcaacgccctgttcgtggaggccttcatcttctacaaccacacccacggcagagagatgctggacatcttcgtgcaccagctgctggtgctggtggtgttcctgaccggcctggtggccttcctggagttcctggtgagaaacaacgtgctgctggagctgctgagaagcagcctgatcctgctgcagggcagctggttcttccagatcggcttcgtgctgtacccccccagcggcggccccgcctgggacctgatggaccacgagaacatcctgttcctgaccatctgcttctgctggcactacgccgtgaccatcgtgatcgtgggcatgaactacgccttcatcacctggctggtgaagagcagactgaagagactgtgcagcagcgaggtgggcctgctgaagaacgccgagagagagcaggagagcgaggaggagatgtag

SEQ ID NO: 196125 - DNA, 828 bp, Artificial Sequence
  derived and/or modified sequence
atgggaaacttcaggggccacgcactgccaggaacttttttcttcatcatcggattgtggtggtgtacgaaatccattcttaagtacatctgcaagaaacagaagagaacatgctacctgggcagcaagaccctattttatcggctcgaaattctggagggcattacaatcgttggtatggctttaactggaatggctggtgagcagtttatacccggcgggccacacctgatgctctacgattataaacaggggcactggaaccagctgcttggctggcatcattttacaatgtacttctttttcggactgcttggggtcgcagatattctctgcttcacaatatcctcgttacctgtgtctctgaccaaactgatgctgagcaatgccctctttgtcgaggcattcatattctataatcatacgcacggtcgggagatgttagatattttcgtccatcagctacttgtgttagtcgtgttcttaaccggcctagtagccttcctggagtttctagtgaggaacaacgttttattagagctgctgagatcatctctgatcctgttgcagggatcctggttttttcagatcggttttgtgctctaccctccgagcggaggacccgcctgggacctgatggaccatgaaaatatcctgttccttacgatttgcttctgttggcattatgccgtcacgatcgtgattgtgggcatgaactacgcctttattacctggttggtgaaaagccgactcaaaagactgtgttcatctgaggttgggctgctgaagaatgcggaacgtgaacaggagtccgaggaggagatgtag

SEQ ID NO: 196126 - DNA, 828 bp, Artificial Sequence
  derived and/or modified sequence
atgggcaacttccggggccacgccctgcccggcaccttcttcttcatcatcggcctgtggtggtgcaccaagagcatcctgaagtacatctgcaagaagcagaagaggacctgctacctgggcagcaagaccctcttctaccgcctggagatcctggagggcatcaccatcgtgggcatggccctgaccggcatggccggggagcagttcatccctgggggcccccacctgatgctgtatgactacaagcagggccactggaaccagctgctgggctggcaccacttcaccatgtacttcttcttcggcctgctgggcgtggccgacatcctgtgcttcaccatcagcagcctgcctgtgtccctgaccaagctgatgctgagcaatgccctgtttgtggaggccttcatcttctacaaccacacccacggccgggagatgctggacatctttgtgcaccagctgctggtgctggtggtgttcctgaccggcctggtggccttcctggagttcctggtgaggaacaacgtgctgctggagctgctgcggagcagcctcatcctgctgcagggctcctggttcttccagattggatttgtgctgtacccaccttctgggggccctgcctgggacctgatggaccacgagaacatcctcttcctgaccatctgcttctgctggcactatgctgtgaccatcgtgattgtgggcatgaactatgccttcatcacctggctggtgaagagccggctgaagaggctgtgcagcagcgaggtgggcctgctgaagaatgctgagcgggagcaggagagcgaggaggagatgtag

SEQ ID NO: 196127 - DNA, 828 bp, Artificial Sequence
  derived and/or modified sequence
atgggcaacttccggggccacgccctgcccggcaccttcttcttcattatcgggctttggtggtgtacaaaaagcatacttaagtacatctgtaagaaacagaagagaacttgttacttgggttccaagacactcttttacagactggagatcctcgagggcatcaccattgtggggatggccttgacgggtatggccggggaacagttcatcccagggggtccccacctgatgctctatgactataaacaggggcattggaaccagcttctggggtggcaccacttcaccatgtacttcttcttcggattgctgggagttgcagatatactctgtttcacaatctcgtcattacctgtgagtcttacaaaactgatgctatcgaatgccctgttcgttgaagctttcatattctataaccatacacacggccgggaaatgctagatatattcgtgcatcagctgctcgtgcttgtggttttcctgacagggttagtggcatttttagagttcctggtgcggaataacgtgctcctggaactgttgcgctcatctcttatcctgttgcagggaagctggtttttccagattggattcgtgttatatccccccagcggaggacccgcctgggacctgatggaccacgagaacatccttttcctcacaatttgtttttgctggcattatgctgttaccatcgtgatcgtggggatgaactacgcttttataacgtggctggtaaagtcaagattgaagcgactgtgttcctcagaagtgggactcctgaaaaacgccgaaagagaacaggagtctgaggaggaaatgtag

SEQ ID NO: 196128 - DNA, 828 bp, Artificial Sequence
  derived and/or modified sequence
atgggtaatttccgtggtcacgcactacctgggacgttcttctttatcatcgggctgtggtggtgcactaaatcaattttgaagtatatatgcaagaagcagaagagaacatgttatctggggtcaaagacactgttctacaggttggaaatactcgaagggattaccatcgtggggatggcgttgacaggaatggccggtgagcagttcatccctggtgggccacacctgatgttgtacgattacaagcagggccactggaatcaactccttggatggcatcatttcaccatgtattttttctttgggctgctgggggtggccgatattctgtgctttaccatctcatccctcccagtgagcctgactaagctgatgctttctaacgccctctttgtggaagcatttatcttttataatcatactcacggcagggagatgttggacatcttcgtgcatcagttgctcgtgctggtggtatttttgacggggctggtggcattcctcgaatttctggtacgcaataacgtcttactcgaactacttaggagttcactcatccttctgcagggatcgtggtttttccagattggcttcgtactgtatccaccctcaggtggcccagcatgggacctgatggaccacgagaatattttatttctgacaatctgtttctgttggcactacgctgttaccatagtgatcgtgggaatgaattacgcctttataacttggttggtgaagtccagattaaaacgcctgtgcagttctgaagtcggtctgctgaagaacgcagagagagaacaggagtcggaggaggagatgtag

SEQ ID NO: 196129 - protein, 421 aa, Artificial Sequence
  derived and/or modified sequence
MQALRHVVCALSGGVDSAVAALLLRRRGYQVTGVFMKNWDSLDEHGVCTADKDCEDAYRVCQILDIPFHQVSYVKEYWNDVFSDFLNEYEKGRTPNPDIVCNKHIKFSCFFHYAVDNLGADAIATGHYARTSLEDEEVFEQKHVKKPEGLFRNRFEVRNAVKLLQAADSFKDQTFFLSQVSQDALRRTIFPLGGLTKEFVKKIAAENRLHHVLQKKESMGMCFIGKRNFEHFLLQYLQPRPGHFISIEDNKVLGTHKGWFLYTLGQRANIGGLREPWYVVEKDSVKGDVFVAPRTDHPALYRDLLRTSRVHWIAEEPPAALVRDKMMECHFRFRHQMALVPCVLTLNQDGTVWVTAVQAVRALATGQFAVFYKGDECLGSGKILRLGPSAYTLQKGQRRAGMATESPSDSPEDGPGLSPLL

SEQ ID NO: 196130 - protein, 131 aa, Artificial Sequence
  derived and/or modified sequence
MKNWDSLDEHGVCTADKDCEDAYRVCQILDIPFHQVSYVKEYWNDVFSDFLNEYEKGRTPNPDIVCNKHIKFSCFFHYAVDNLGADAIATGHYARTSLEDEEVFEQKHVKKPEGLFRNRFEVRNARFPRMP

SEQ ID NO: 196131 - DNA, 1266 bp, Artificial Sequence
  derived and/or modified sequence
atgcaggccctgagacacgtggtgtgcgccctgagcggcggcgtggacagcgccgtggccgccctgctgctgagaagaagaggctaccaggtgaccggcgtgttcatgaagaactgggacagcctggacgagcacggcgtgtgcaccgccgacaaggactgcgaggacgcctacagagtgtgccagatcctggacatccccttccaccaggtgagctacgtgaaggagtactggaacgacgtgttcagcgacttcctgaacgagtacgagaagggcagaacccccaaccccgacatcgtgtgcaacaagcacatcaagttcagctgcttcttccactacgccgtggacaacctgggcgccgacgccatcgccaccggccactacgccagaaccagcctggaggacgaggaggtgttcgagcagaagcacgtgaagaagcccgagggcctgttcagaaacagattcgaggtgagaaacgccgtgaagctgctgcaggccgccgacagcttcaaggaccagaccttcttcctgagccaggtgagccaggacgccctgagaagaaccatcttccccctgggcggcctgaccaaggagttcgtgaagaagatcgccgccgagaacagactgcaccacgtgctgcagaagaaggagagcatgggcatgtgcttcatcggcaagagaaacttcgagcacttcctgctgcagtacctgcagcccagacccggccacttcatcagcatcgaggacaacaaggtgctgggcacccacaagggctggttcctgtacaccctgggccagagagccaacatcggcggcctgagagagccctggtacgtggtggagaaggacagcgtgaagggcgacgtgttcgtggcccccagaaccgaccaccccgccctgtacagagacctgctgagaaccagcagagtgcactggatcgccgaggagccccccgccgccctggtgagagacaagatgatggagtgccacttcagattcagacaccagatggccctggtgccctgcgtgctgaccctgaaccaggacggcaccgtgtgggtgaccgccgtgcaggccgtgagagccctggccaccggccagttcgccgtgttctacaagggcgacgagtgcctgggcagcggcaagatcctgagactgggccccagcgcctacaccctgcagaagggccagagaagagccggcatggccaccgagagccccagcgacagccccgaggacggccccggcctgagccccctgctgtag

SEQ ID NO: 196132 - DNA, 1266 bp, Artificial Sequence
  derived and/or modified sequence
atgcaggcccttagacatgttgtttgcgctctgtccggaggcgtggattccgccgtcgcagctctcttgcttagaaggcgaggctaccaggtgaccggtgtgtttatgaaaaattgggactcactcgatgagcacggagtttgtacggctgataaggactgtgaagatgcctacagggtttgccagatattggatattccctttcatcaggtgtcctacgtcaaagaatactggaacgacgttttttccgatttcctgaacgagtatgagaagggacgaacaccgaatcctgacatcgtttgtaacaagcacatcaaattttcctgtttttttcattacgctgtggataatctgggagccgacgcaatcgctactggtcactacgctagaacttcgcttgaggacgaggaagtgttcgagcaaaaacacgtcaagaagccggagggtttgtttagaaatcggtttgaggtcaggaatgccgtgaagctattgcaggcagccgatagcttcaaggaccagaccttttttctgtcgcaggtttcgcaggacgcattacggaggactatttttccactgggcgggcttaccaaggagtttgtaaagaagattgccgccgagaacaggttgcaccacgtgttgcaaaagaaggagagtatgggaatgtgtttcattgggaagcgcaacttcgaacactttctgctgcaatatctgcagccacggcctgggcactttatttccatagaggataataaggtcctgggaacacacaagggctggtttctgtatacactcggacagagagcgaatatcggcgggctgagggaaccctggtacgtcgtggaaaaggacagcgttaaaggagacgtgttcgttgccccccgcactgatcaccccgccctgtatcgagatctactgcgaacctcaagggtacattggatagccgaagagccgcctgcggcactggtgagggataagatgatggagtgccacttccggttccgccaccaaatggcgctggtaccatgcgtcctcactctgaatcaggatggtactgtgtgggttaccgccgtccaagccgtgagggccttagccacaggacagtttgccgtgttttataagggggatgagtgcctcggctccggtaagatcctacgtttaggcccatccgcttataccttacagaagggacaaagaagggcaggtatggccaccgaatctccctcagacagtcctgaagacggacctggcttgagtcctcttttgtag

SEQ ID NO: 196133 - DNA, 1266 bp, Artificial Sequence
  derived and/or modified sequence
atgcaggccctgcggcacgtggtgtgtgccctgagcggcggcgtggacagcgctgtggccgccctgctgctgcggcggcggggctaccaggtgactggagtcttcatgaagaactgggacagcctggatgaacatggagtgtgcacagctgacaaggactgtgaagatgcctacagagtgtgccagatcctggacatccccttccaccaggtgtcctatgtgaaggagtactggaatgatgtgttcagtgacttcctgaatgaatatgaaaaaggaagaacacccaacccagacatcgtgtgcaacaagcacatcaagttcagctgcttcttccactatgctgtggacaacctgggcgcagatgccatcgccaccggccactacgcccggaccagcctggaggatgaggaggtgtttgagcagaagcacgtgaagaagccagagggcctcttcaggaacagatttgaggtgagaaatgctgtgaagctgctgcaggccgctgacagcttcaaggaccagaccttcttcctgagccaggtgtcccaggatgccctgcggaggaccatcttccccctgggcggcctgaccaaggagtttgtgaagaagattgctgctgagaaccggctgcaccacgtgctgcagaagaaggagagcatgggcatgtgcttcatcggcaagaggaactttgagcacttcctgctgcagtacctgcagcccaggcctggccacttcatcagcattgaggacaacaaggtgctgggcacccacaagggctggttcctgtacaccctgggccagagggccaacatcggcggcctgcgggagccctggtacgtggtggagaaggacagcgtgaagggagatgtgtttgtggcccccaggacagaccacccagccctgtacagagacctgctgcggaccagccgggtgcactggattgctgaggagcccccagctgccctggtgcgggacaagatgatggagtgccacttccgcttccgccaccagatggccctggtgccctgtgtgctgaccctgaaccaggacggcaccgtgtgggtgacagctgtgcaggccgtgcgggccctggccaccggccagtttgctgtgttctacaagggagatgagtgcctgggcagcggcaagatcctgcggctgggccccagcgcctacaccctgcagaagggccagaggcgggccggcatggccacagagagccccagcgacagcccagaagatggccctggcctgagccccctgctgtag

SEQ ID NO: 196134 - DNA, 1266 bp, Artificial Sequence
  derived and/or modified sequence
atgcaggccctgcggcacgtggtgtgcgccctgagcggcggcgtggattccgccgttgcagcccttttactgcgtcgtcgcggctatcaggtcaccggggtctttatgaaaaactgggactccctagacgagcatggagtttgtaccgccgacaaggattgcgaggatgcatatagagtctgtcagatattggatatcccttttcatcaggtgagttatgtgaaggagtactggaacgacgtattttcggactttcttaatgaatacgagaaaggacgcacgcctaacccggacatcgtttgtaacaaacatatcaagttctcttgtttctttcactatgcagttgacaatctgggagcagacgccatcgccacgggacactacgcgagaacctctctggaagacgaggaggttttcgagcaaaagcatgtgaaaaagccggaaggcctttttagaaatcgcttcgaggtccggaatgccgtgaagttactgcaggctgcggactcatttaaggaccagaccttttttctctctcaagtttctcaggatgctctgcgtaggaccatattccccctgggcggccttactaaagagttcgttaagaagattgcagccgagaataggctacaccacgtccttcagaagaaagagagcatgggtatgtgttttatcggcaagcgtaattttgaacattttctgctgcaatatctgcagccgagaccaggacactttatctcaattgaggataacaaggtcctcgggacgcacaagggctggttcctctacacactgggacagcgggccaacattggcgggcttagagaaccctggtacgtggtcgaaaaggattcagtgaaaggagacgtatttgttgccccacgcactgaccatcccgcactgtacagggatctgttgcgcacctcccgagtgcactggattgctgaggaaccaccagcagctctggtccgcgataagatgatggaatgccacttccgtttccgacaccagatggccctggtgccttgtgttctaacacttaatcaggatggaacagtctgggtgaccgcagtacaggccgttagggctcttgcgacaggtcaattcgccgtcttttataaaggtgacgagtgcctggggtctgggaaaattttaagattgggtccatctgcatataccctgcaaaaggggcagcggagggcaggcatggctacagaatctccctccgactcgcctgaagatggcccaggcttgtccccgcttctgtag

SEQ ID NO: 196135 - DNA, 1266 bp, Artificial Sequence
  derived and/or modified sequence
atgcaagccctgcgccatgtggtctgtgctttaagcggtggagtcgatagcgcagttgccgcactgctgttacggaggagggggtatcaggtcactggcgtgttcatgaaaaattgggactcactagacgagcacggtgtgtgtaccgcagacaaggattgtgaagacgcctatcgcgtctgccagatactggacattccctttcaccaagtctcatatgtgaaggaatattggaacgacgtgttcagtgatttcctgaacgaatacgaaaagggaagaactccgaaccctgacatcgtgtgtaataagcacattaagttttcttgttttttccattatgccgtggataacttgggcgctgacgcaattgccactggacactatgccaggactagtctggaggatgaggaagtatttgagcagaaacacgttaagaagcccgagggcctatttagaaatcgcttcgaagtgcgaaacgctgttaaactattgcaagccgctgactcttttaaagaccagaccttttttctgtcacaggtcagccaggatgccctgaggagaacaatcttcccgctcgggggactgacaaaggagtttgtcaagaaaatagcagcagagaaccgccttcaccatgtgctccagaaaaaagaaagtatgggcatgtgcttcataggaaagcggaatttcgagcattttctcttacaatacctgcagcccagacctgggcattttatcagtatagaggacaacaaggttttgggaacccacaagggctggtttctttatactctcgggcaacgagcaaatattgggggattgagggagccctggtatgttgtagaaaaagattccgtcaaaggtgatgtctttgttgcgcctcgtactgatcatccagccttgtatcgcgatctgctgaggacaagtcgggtgcactggatagccgaggagccaccagccgctctggtccgagataaaatgatggagtgtcacttccggtttcggcatcaaatggctctggtgccatgtgtgctgaccctaaatcaggatgggaccgtgtgggtgacggccgtgcaagcagtgcgggctctggcaaccggccagttcgcggtgttctataaaggggacgagtgtctgggtagcggaaagatcttgcgattgggcccttctgcatacacactgcagaagggccagcggagagcaggcatggcaacagaaagtcccagcgatagtcccgaggacggtcctggcctgagtccacttctgtag

SEQ ID NO: 196136 - DNA, 1940 bp, Artificial Sequence
  derived and/or modified sequence
ggctggggggcttagaattttatttttggtttacagcgcagaagaagagcagtgaggccggggcgcgggtggggagggcaaggcggcggctcaaaaaaaaagccagcccctcgcggcccgacagagtctcggcgccccgcgggtcggtggagcctcaggggtgagcgcaggccggagacaggggaacccgccgcgggacaggggaaggccggacggaacgcgggtaagctgccgcagcttccggccgggccactagcgcggaccctacggccggggcgggacttccggcaaggcgcggaagcggcggtagctgcagctggcgaagttgggcgactggcggatgcaggccttgcggcacgtcgtgtgcgccctgtccggcggcgtggacagcgccgtggccgcgctgctgctgaggcggagaggttaccaggtgacaggggtgtttatgaagaactgggactcactggatgaacatggggtctgtactgccgacaaagactgtgaagatgcttacagagtttgccagatcttagacatccctttccatcaagtgtcctacgtaaaggagtattggaatgatgtgttcagtgactttttgaatgagtatgaaaaaggaaggactcccaatcctgacatagtttgcaacaagcacatcaaatttagttgcttttttcattatgctgtggataatcttggggcagatgccattgccacaggtcactatgcaagaacttccctggaagatgaagaagtctttgagcagaagcacgttaagaagcccgaagggcttttcagaaatcggtttgaagttagaaatgcggtaaaactcctccaggcagctgacagctttaaagaccagaccttctttctcagccaggtttcccaggatgccctgaggagaaccatcttccctctggggggattaacgaaagagtttgtaaagaaaatcgctgctgagaatagacttcatcatgtgcttcagaagaaagagagcatgggcatgtgtttcatcgggaagaggaattttgaacatttccttcttcagtatctgcagcctcgacctggtcactttatttccatagaagacaataaggttctgggaacacataaaggttggttcctgtataccttgggccagagagcaaacataggtggcctgagagagccctggtacgtggtggagaaggacagcgtcaagggtgacgtgtttgtggccccccggacagaccacccagccctgtacagggacctgctgaggaccagccgcgtgcactggattgcggaggagcctcccgcagcactggtccgggacaagatgatggagtgccacttccgattccgccaccagatggcactagtgccctgtgtgctgaccctcaatcaagatggcaccgtgtgggtgacagctgtgcaggctgtgcgtgcccttgccacaggacagtttgctgtgttctacaagggggacgagtgcctgggcagcgggaagatcctgcggctggggccgtctgcctacacgctccagaagggccagcgcagagctgggatggccactgagagccccagtgacagcccagaagatggtccaggcctgagtcccttgctctgacagagatggatctgctagaaggaacctggagagcaggacccatggctgggcggctggtgagcagtccaggtgcccaagggccagcttgctgctgcccaaagcagaggaagccgggctggctgagggtccgaaaagcctgcaggggcccggcgagccccaggaagagcctcagctccaggctggggctctggctgctggagcatctgctggctggtggggtggcccgagttccccttcaccgcccccagggagggtttcccacctcagagtacaccgaggggacctgcagagggggctgtcgggacagcgtggaataaacattatttcaaggaca

SEQ ID NO: 196137 - DNA, 1401 bp, Artificial Sequence
  derived and/or modified sequence
gtgcacgtctcctccctccctgggccgctggttgcgcgcgggtcggcaggaggataccccgtcctctgactttggttcggaggctcctcgccctccacctgtgtagtcggaggtgtgcgcgactgcagctccgactacctgggagcagttccgcgcccctctccacccacgcgcgcccacccacagttaccaggtgacaggggtgtttatgaagaactgggactcactggatgaacatggggtctgtactgccgacaaagactgtgaagatgcttacagagtttgccagatcttagacatccctttccatcaagtgtcctacgtaaaggagtattggaatgatgtgttcagtgactttttgaatgagtatgaaaaaggaaggactcccaatcctgacatagtttgcaacaagcacatcaaatttagttgcttttttcattatgctgtggataatcttggggcagatgccattgccacaggtcactatgcaagaacttccctggaagatgaagaagtctttgagcagaagcacgttaagaagcccgaagggcttttcagaaatcggtttgaagttagaaatgccaggtttcccaggatgccctgaggagaaccatcttccctctggggggattaacgaaagagtttgtaaagaaaatcgctgctgagaatagacttcatcatgtgcttcagaagaaagagagcatgggcatgtgtttcatcgggaagaggaattttgaacatttccttcttcagtatctgcagcctcgacctggtcactttatttccatagaagacaataaggttctgggaacacataaaggtgaggtgcagactctgccacttgtcatctgaaatgcctagagctgtggcgtttcagctctgggagactagaccagagttcctgtcgtcccttccacttggctggagaattgtagaaggctctgtggggcggccgggggcgggcacggcctagggtggaacagttgccttgatggtggctgggtgcacttccagatgtggcctcagctgagatgctggagttcatgaaaagcgcgcctctgacttggaaggactatactctgtgagttacgtatcaagtccctgtaaaaagaatgatttccttcctgtgtaaggaaaatgttaaactacacaaaactccactctgattcagggagtaaggtggacgtcccggcatggtgtgaatgattaaggaccacatgcagcgatgggatcaggcgtccgcgctggccagagtgctgctcgctcatgtgcagacccttactgcggtgaggcctgcgtgagcctgtgctgtgcctggtgtcaggggacaggctccgagtcagtcacagtgtgcagtcctgctgtggggacagagtgcagccattgttgggttagtacagt

SEQ ID NO: 196138 - DNA, 1775 bp, Artificial Sequence
  derived and/or modified sequence
ggctggggggcttagaattttatttttggtttacagcgcagaagaagagcagtgaggccggggcgcgggtggggagggcaaggcggcggctcaaaaaaaaagccagcccctcgcggcccgacagagtctcggcgccccgcgggtcggtggagcctcaggggtgagcgcaggccggagacaggggaacccgccgcgggacaggggaaggccggacggaacgcgggtaagctgccgcagcttccggccgggccactagcgcggaccctacggccggggcgggacttccggcaaggcgcggaagcggcggtagctgcagctggcgaagttgggcgactggcggatgcaggccttgcggcacgtcgtgtgcgccctgtccggcggcgtggacagcgccgtggccgcgctgctgctgaggcggagaggttaccaggtgacaggggtgtttatgaagaactgggactcactggatgaacatggggtctgtactgccgacaaagactgtgaagatgcttacagagtttgccagatcttagacatccctttccatcaagtgtcctacgtaaaggagtattggaatgatgtgttcaggggcagatgccattgccacaggtcactatgcaagaacttccctggaagatgaagaagtctttgagcagaagcacgttaagaagcccgaagggcttttcagaaatcggtttgaagttagaaatgccaggtttcccaggatgccctgaggagaaccatcttccctctggggggattaacgaaagagtttgtaaagaaaatcgctgctgagaatagacttcatcatgtgcttcagaagaaagagagcatgggcatgtgtttcatcgggaagaggaattttgaacatttccttcttcagtatctgcagcctcgacctggtcactttatttccatagaagacaataaggttctgggaacacataaaggttggttcctgtataccttgggccagagagcaaacataggtggcctgagagagccctggtacgtggtggagaaggacagcgtcaagggtgacgtgtttgtggccccccggacagaccacccagccctgtacagggacctgctgaggaccagccgcgtgcactggattgcggaggagcctcccgcagcactggtccgggacaagatgatggagtgccacttccgattccgccaccagatggcactagtgccctgtgtgctgaccctcaatcaagatggcaccgtgtgggtgacagctgtgcaggctgtgcgtgcccttgccacaggacagtttgctgtgttctacaagggggacgagtgcctgggcagcgggaagatcctgcggctggggccgtctgcctacacgctccagaagggccagcgcagagctgggatggccactgagagccccagtgacagcccagaagatggtccaggcctgagtcccttgctctgacagagatggatctgctagaaggaacctggagagcaggacccatggctgggcggctggtgagcagtccaggtgcccaagggccagcttgctgctgcccaaagcagaggaagccgggctggctgagggtccgaaaagcctgcaggggcccggcgagccccaggaagagcctcagctccaggctggggctctggctgctggagcatctgctggctggtggggtggcccgagttccccttcaccgcccccagggagggtttcccacctcagagtacaccgaggggacctgcagagggggctgtcgggacagcgtggaataaacattatttcaagg

SEQ ID NO: 196139 - DNA, 1882 bp, Artificial Sequence
  derived and/or modified sequence
ggctggggggcttagaattttatttttggtttacagcgcagaagaagagcagtgaggccggggcgcgggtggggagggcaaggcggcggctcaaaaaaaaagccagcccctcgcggcccgacagagtctcggcgccccgcgggtcggtggagcctcaggggtgagcgcaggccggagacaggggaacccgccgcgggacaggggaaggccggacggaacgcgggtaagctgccgcagcttccggccgggccactagcgcggaccctacggccggggcgggacttccggcaaggcgcggaagcggcggtagctgcagctggcgaagttgggcgactggcggatgcaggccttgcggcacgtcgtgtgcgccctgtccggcggcgtggacagcgccgtggccgcgctgctgctgaggcggagaggttaccaggtgacaggggtgtttatgaagaactgggactcactggatgaacatggggtctgtactgccgacaaagactgtgaagatgcttacagagtttgccagatcttagacatccctttccatcaagtgtcctacgtaaaggagtattggaatgatgtgttcagtgactttttgaatgagtatgaaaaaggaaggactcccaatcctgacatagtttgcaacaagcacatcaaatttagttgcttttttcattatgctgtggataatcttggggcagatgccattgccacaggtcactatgcaagaacttccctggaagatgaagaagtctttgagcagaagcacgttaagaagcccgaagggcttttcagaaatcggtttgaagttagaaatgccaggtttcccaggatgccctgaggagaaccatcttccctctggggggattaacgaaagagtttgtaaagaaaatcgctgctgagaatagacttcatcatgtgcttcagaagaaagagagcatgggcatgtgtttcatcgggaagaggaattttgaacatttccttcttcagtatctgcagcctcgacctggtcactttatttccatagaagacaataaggttctgggaacacataaaggttggttcctgtataccttgggccagagagcaaacataggtggcctgagagagccctggtacgtggtggagaaggacagcgtcaagggtgacgtgtttgtggccccccggacagaccacccagccctgtacagggacctgctgaggaccagccgcgtgcactggattgcggaggagcctcccgcagcactggtccgggacaagatgatggagtgccacttccgattccgccaccagatggcactagtgccctgtgtgctgaccctcaatcaagatggcaccgtgtgggtgacagctgtgcaggctgtgcgtgcccttgccacaggacagtttgctgtgttctacaagggggacgagtgcctgggcagcgggaagatcctgcggctggggccgtctgcctacacgctccagaagggccagcgcagagctgggatggccactgagagccccagtgacagcccagaagatggtccaggcctgagtcccttgctctgacagagatggatctgctagaaggaacctggagagcaggacccatggctgggcggctggtgagcagtccaggtgcccaagggccagcttgctgctgcccaaagcagaggaagccgggctggctgagggtccgaaaagcctgcaggggcccggcgagccccaggaagagcctcagctccaggctggggctctggctgctggagcatctgctggctggtggggtggcccgagttccccttcaccgcccccagggagggtttcccacctcagagtacaccgaggggacctgcagagggggctgtcgggacagcgtggaataaacattatttcaagg

SEQ ID NO: 196140 - protein, 459 aa, Artificial Sequence
  derived and/or modified sequence
MASSASLETMVPPACPRAGASPATSKTLAFSIERIMAKTSEPRAPFEPRPGALEADGSQGKKLLNLCSPLPCMIPLQPLGYEVPSKTLLSYSELWKSSLRAGGGGGGGGGGGGGGGGAPVCGASGLCKTNCGVCCKAELGLAPSALPAGRVIKPQVINQAVGLPASGSLYYFNYLDSTAYPPSELLSGHLFPSGLLNAQAPAALAAHPKLFLLENAKLAGLAADKFPHPAPYPHKERLPAPLEQVLKENSALTAERGGVKGHSKLPGGSADGKPKNFTCEVCGKVFNAHYNLTRHMPVHTGARPFVCKVCGKGFRQASTLCRHKIIHTQEKPHKCNQCGKAFNRSSTLNTHIRIHAGYKPFVCEFCGKGFHQKGNYKNHKLTHSGEKQYKCTICNKAFHQVYNLTFHMHTHNDKKPFTCATCGKGFCRNFDLKKHVRKLHDSVGPAAPSAKDLTRTVQS

SEQ ID NO: 196141 - DNA, 1380 bp, Artificial Sequence
  derived and/or modified sequence
atggcatcatcagctagcctggagacgatggtcccgcccgcctgccctagagcaggagccagccccgcaacgagcaagaccctggctttcagcattgagcgcatcatggccaagacttctgaaccacgtgctccgtttgagccgaggccgggcgccttggaagccgatggatctcagggaaaaaagctactgaatttatgcagccccctgccctgcatgattcccctgcaaccacttggttatgaggttccttccaagacgcttctgagctattccgaactttggaagtcttcactccgcgctggaggcggcggcggcgggggcggcgggggaggtggcggcggcggcggggcacccgtatgtggtgcgagtggattatgcaagacgaactgcggtgtctgctgtaaggccgaattgggcctcgctccttccgcactcccagcgggaagggtgattaaaccgcaggtaatcaatcaggctgtggggctgccagcaagcgggtccctgtactatttcaactacctcgattcaaccgcttaccccccttcggaacttctctcaggccacttgtttccctctggactcctgaatgcccaggcaccggccgctctggccgcccatccgaagctgttcctgctcgaaaacgctaaattagcaggcctggcggcagataagttcccccaccccgccccctacccccacaaagaacgcctccctgcccccttagagcaagtcctgaaagagaattctgccctgaccgccgaacgtggaggggtgaagggacattccaagctgcctgggggatccgctgatgggaagccgaagaacttcacttgtgaagtttgtgggaaggtttttaatgcccactataacttaacaaggcacatgcccgttcataccggggcccgccctttcgtgtgtaaagtgtgcggcaagggatttcggcaggctagcactctctgtagacataaaataattcacacccaagagaaaccccataaatgcaatcagtgtgggaaggccttcaatagaagtagcaccctcaacacgcacatccgaatacatgctggatataaaccttttgtgtgtgagttctgcggaaaaggctttcaccagaaaggcaactacaaaaatcataaacttacccattccggagagaagcaatataaatgtaccatctgcaacaaggcatttcatcaagtgtacaatctgacctttcacatgcatactcacaatgataaaaaaccatttacatgtgctacgtgcggcaagggcttctgtagaaactttgacctcaagaagcacgtgaggaagctgcacgattctgtcggcccagcggccccaagcgctaaggacctgacccgtaccgttcagtcttag

SEQ ID NO: 196142 - DNA, 1380 bp, Artificial Sequence
  derived and/or modified sequence
atggccagctcagcctccctcgaaaccatggtccctccagcatgcccccgcgccggggctagcccagctacaagtaagacactcgccttcagtatcgagaggataatggccaagaccagcgaacccagagctccctttgagcctcggccgggagccctggaggccgatggcagtcaggggaaaaaactcctgaacctgtgttctccgttgccatgcatgattccacttcagcctctcggctacgaagtgccctcaaaaactttgctaagttactccgagctgtggaagagctcactgcgagctggcgggggagggggaggtgggggcggagggggtgggggtgggggcggtgcacctgtgtgtggtgcatcaggtctttgcaaaaccaactgtggcgtgtgttgcaaagctgaactggggctggctcctagcgctttgccggctggcagagtcataaagcctcaagtgattaaccaggccgtcgggttgcctgccagcgggtcactctactattttaactatctggactctaccgcttatcccccctctgaattgttgtctggccatctattcccaagtgggcttctgaacgcccaggcacccgctgcactagctgcacatcccaagctgtttctgttggaaaatgccaaactagcaggcctcgccgcggacaagtttccccatcctgctccttatccccataaggagcgcttgcccgcgcctctcgagcaagtgcttaaggagaactctgctttaaccgctgagcgtgggggcgtgaaaggccattccaaacttccgggaggatctgctgatggcaaaccaaaaaattttacttgcgaggtgtgcggaaaagtgtttaatgcccactataatctgacccgtcacatgcctgtgcataccggggcacgtccgtttgtgtgtaaagtgtgcggcaagggttttcgccaggctagcacattgtgtcggcacaagatcatccatacccaggagaagccgcacaagtgcaaccagtgtgggaaggcttttaacagatcatcaaccctaaacacacacatcagaatccatgcagggtacaaaccctttgtgtgcgagttttgtggcaaagggtttcaccaaaagggcaactataagaaccataaattgacacattccggagagaagcagtataagtgcaccatttgtaacaaagcctttcatcaagtgtataatctgacatttcatatgcacactcataatgacaagaagccttttacctgcgcaacatgcggtaaagggttctgtagaaatttcgatcttaagaaacacgtgcgaaaactccatgatagcgtcgggccggctgcaccttctgccaaggatctgactagaaccgttcagagttag

SEQ ID NO: 196143 - DNA, 1380 bp, Artificial Sequence
  derived and/or modified sequence
atggcgtcttccgccagtttagagaccatggtccctccagcctgtccccgagctggcgcctcgcccgccacctctaaaaccttggcattctccatcgaaagaatcatggcgaagactagtgagcctcgggctcctttcgaacctcgtccaggcgcccttgaggccgatgggtcgcaggggaaaaaactcctcaacctatgcagtcccctgccttgcatgatccctctccagccacttgggtatgaggttccttcaaagactctgctctcttacagtgaattgtggaaatcctcactacgggctggaggcggcggaggcgggggcggtgggggcggcggcggaggcgggggtgcaccagtctgtggcgcttctggcctgtgtaagactaactgcggggtgtgttgcaaagcggagctgggtcttgccccgtctgcacttccggcggggcgggtcatcaagccccaggtcattaaccaggctgttgggcttccggccagcggctcactatattattttaattaccttgacagtacggcctatccaccatccgaactactttccggacacctgtttccatccggactgctgaacgcccaggccccagcagccttggcagcacatcctaaactctttctgctggagaacgccaagttagcaggcttggccgccgacaaattcccgcatcccgcaccctaccctcacaaggagcggctgcccgctccactggagcaagtcctgaaagaaaattccgccctcacagccgaaaggggaggcgtaaaaggtcacagcaagctaccagggggatccgccgacgggaagcccaagaacttcacttgcgaggtgtgtggcaaggtgttcaacgcccattataatctaacccggcacatgcctgttcacactggggccagacctttcgtgtgtaaggtgtgcggcaaagggttccgtcaggcatcaaccttgtgccggcacaagatcatccatacccaggagaaaccacataagtgcaaccagtgcgggaaggcatttaataggagttccacattgaatactcacattcggattcatgctggctacaagcctttcgtatgcgagttctgtggaaagggatttcaccagaaaggtaattataagaatcacaagcttactcacagcggagagaaacagtacaagtgcaccatctgcaataaagcgttccatcaggtatacaacttgacgttccacatgcacacacacaacgacaagaagccatttacatgcgccacttgtgggaagggcttctgcaggaactttgatctcaagaaacacgtaagaaagctgcacgactccgtcggacccgccgcacccagtgccaaggatttgactcggactgtccaaagctag

SEQ ID NO: 196144 - DNA, 1380 bp, Artificial Sequence
  derived and/or modified sequence
atggccagcagcgccagcctggagaccatggtgcccccagcctgcccccgggccggggccagccctgccaccagcaagaccctggccttcagcattgaaagaatcatggccaagaccagcgagccccgggccccctttgagcccaggcctggggccctggaggctgatggcagccagggcaagaagctgctgaacctgtgcagccccctgccctgcatgatccccctgcagcccctgggctatgaggtgcccagcaagaccctgctgagctacagcgagctgtggaagagcagcctgcgggccggcggcggcggcggcggcggcggcggcggcggcggcggcggcggcggggcccctgtgtgtggggccagcggcctgtgcaagaccaactgtggggtgtgctgcaaggccgagctgggcctggcccccagcgccctgcctgctggccgggtcatcaagccccaggtgatcaaccaggccgtgggcctgcctgccagcggcagcctgtactacttcaactacctggacagcacagcctacccaccttctgagctgctgagcggccacctgttccccagcggcctgctgaatgcccaggccccagctgccctggccgcccaccccaagctgttcctgctggagaatgccaagctggccggcctggccgctgacaagttcccccacccagccccctacccccacaaggagcggctgcctgcccccctggagcaggtgctgaaggagaacagcgccctgacagctgagcggggcggcgtgaagggccacagcaagctgcccggcggcagcgcagatggcaagcccaagaacttcacctgtgaggtgtgtgggaaggtgttcaatgcccactacaacctgaccaggcacatgcctgtgcacactggagcccggccctttgtgtgcaaggtgtgtgggaagggcttccggcaggccagcaccctgtgccgccacaagatcatccacacccaggagaagccccacaagtgcaaccagtgtgggaaggccttcaacagaagcagcaccctgaacacccacatccgcatccacgccggctacaagccctttgtgtgtgagttctgtgggaagggcttccaccagaagggcaactacaagaaccacaagctgacccacagcggggagaagcagtacaagtgcaccatctgcaacaaggccttccaccaggtgtacaacctgaccttccacatgcacacccacaatgacaagaagcccttcacctgtgccacctgtgggaagggcttctgcaggaactttgacctgaagaagcacgtgaggaagctgcatgacagcgtgggccctgctgcccccagcgccaaggacctgaccaggacagtgcagagctag

SEQ ID NO: 196145 - DNA, 1380 bp, Artificial Sequence
  derived and/or modified sequence
atggccagcagcgccagcctggagaccatggtgccccccgcctgccctagggccggggcgtccccagccacgtccaaaactcttgcgttcagcatcgaacgtattatggccaagacgtccgagccaagagctcccttcgaacccagacccggcgcactggaggcagatggatcccagggcaaaaagttgctcaacctttgcagcccgctcccatgtatgattcccttgcagccactgggctatgaggtgccctccaagacattgctgtcttattcagagctgtggaagtcttccctaagggcaggaggtggaggcgggggggggggcggcgggggcggcgggggcggaggagctcctgtttgtggggcttctggcctgtgcaagaccaattgcggcgtctgttgtaaggctgagctgggcctggcgccatccgctctgcccgcaggccgtgtgatcaaacctcaagtcattaatcaggccgtcgggttgcctgcctctggctctctgtactactttaattacctcgattcgacagcctacccaccctctgagctgctgagcggccaccttttccctagtggattgctaaatgcacaggcccccgccgctctagcagcccaccccaaactattcctattagagaacgcaaaacttgctggcctcgctgccgacaaattccctcacccagcaccctatccccacaaggaaaggttgccagccccactagagcaggtgctcaaagagaacagcgccctgaccgctgaaagaggcggagttaagggtcattctaaattacctggagggagtgcggacggtaagcccaaaaatttcacttgtgaggtctgcggaaaggtgttcaacgctcactacaatctaactcggcatatgcctgtgcacactggtgccaggccttttgtatgcaaagtctgtgggaaaggatttcgccaagcctccacgttgtgccgacacaaaataatccacacacaagaaaagccgcacaagtgcaatcagtgcggcaaagcatttaaccgctcatctacactgaatactcacattaggattcatgctggttacaaacccttcgtgtgcgagttctgcggaaagggtttccatcagaaaggtaactataagaatcacaagctgacgcacagtggcgaaaaacaatacaagtgcaccatttgtaataaggcgtttcaccaggtttataatttgacctttcatatgcatacccacaacgacaaaaagccttttacatgcgccacttgcggcaagggtttctgccgcaattttgacctgaagaagcatgtaaggaagctgcacgactcagtgggtcccgccgccccgtccgcaaaggatctaactcgcacggtgcaatcttag

SEQ ID NO: 196146 - DNA, 1380 bp, Artificial Sequence
  derived and/or modified sequence
atggccagcagcgccagcctggagaccatggtgccccccgcctgcccacgcgccggcgcttccccagccacttcgaaaaccctcgctttctccattgagcggatcatggccaaaaccagcgaaccacgggcacctttcgagcctaggcccggagccctggaggctgacggcagtcaaggcaaaaaattgcttaatctttgtagtcccctcccatgtatgattcccctgcagccattggggtacgaggtgccatccaagactctgctctcctatagtgagctgtggaaatcttcgttacgagctgggggtggcggtggaggtggcggaggcggggggggcggaggtggaggggccccagtgtgtggggcttcaggcctgtgcaagaccaattgtggtgtgtgttgcaaagcagaacttggtctagcaccaagtgcgttgcctgccgggagggtgataaagccccaggtgatcaaccaggcagtcggacttccagcttcggggtccctctattacttcaactatcttgatagcaccgcctaccctccaagcgagctcctgtcaggacatctcttcccaagcgggttgctgaatgcccaggccccggctgccttagccgcccacccaaagttattcctgctcgagaatgccaagctcgctggcctcgctgccgacaaatttccacaccctgctccttacccccacaaggagcgactccccgcaccactggaacaggtactgaaggagaatagcgcactcacagcagagaggggtggtgtgaagggccactctaaactccccggaggtagcgcagacggcaagcccaaaaatttcacatgcgaagtgtgcggcaaagtgtttaacgctcactataatttgactcgccacatgcctgtccatacaggtgctaggcctttcgtgtgtaaggtctgcggtaaaggattcagacaagccagtaccctatgccggcataaaattatccatactcaagagaagcctcacaagtgtaaccagtgcggcaaagctttcaacaggtctagcaccctaaacacccacatcagaattcacgctggttacaagccgtttgtttgcgaattttgcgggaaggggttccaccaaaaaggaaattacaaaaaccataagctcacacattcaggtgagaaacaatataagtgcactatttgcaataaggccttccaccaggtgtataatctcacctttcacatgcatactcataacgataagaagccctttacgtgcgccacttgcggaaagggcttctgtcgcaattttgaccttaaaaaacacgtccgtaagctacacgactctgtgggtccggccgctccgagcgcaaaagatctgacgcggactgtccagagctag

SEQ ID NO: 196147 - DNA, 1380 bp, Artificial Sequence
  derived and/or modified sequence
atggccagcagcgccagcctggagaccatggtgccccccgcctgcccacgcgctggagcaagccctgcaactagcaaaacactagctttctctatagaaagaatcatggcaaaaacatctgaaccacgggctccctttgagccaagacccggtgccctcgaagcggacggcagccaggggaagaagctgctgaacctgtgcagccctctgccatgtatgattcccctccagccccttggctacgaagtgccttctaaaacccttctatcctacagtgaactgtggaagtcttctctgcgggccggcggaggaggaggcggggggggaggggggggtggagggggcggaggggcaccagtatgtggggccagcgggctgtgtaagactaactgcggtgtctgctgcaaggccgagctcgggcttgccccaagtgccctgcctgctggaagggttataaaacctcaagtgatcaaccaggctgtcgggctcccggccagcggctctctctattattttaactacctcgacagtactgcgtaccccccaagtgagctcctaagcggccacttattcccaagcggcctgctgaacgcacaagcccccgctgctctggctgcccatcctaaacttttcttgctggaaaacgcgaagctagctggcctcgcagcagataaatttccccacccagcaccataccctcacaaggaacgtttacctgcgccgctggagcaggttctgaaggagaactcagcactcacagccgaacggggcggcgtgaagggccactccaagctacctggtggctcagcagacggaaagccaaagaactttacctgcgaagtttgcggaaaggttttcaatgcacattacaatctgaccaggcatatgccagtgcacacaggggcacgccccttcgtgtgtaaagtttgtgggaaggggtttcggcaggcttccaccctctgccgacacaagattatccacacccaggagaagcctcacaagtgcaatcaatgcggcaaggcttttaatcggagttccaccctcaatactcacatacgtatccacgccggatacaagcccttcgtttgcgagttttgcggcaaagggttccaccagaagggaaactacaaaaaccacaagctcactcattctggcgagaagcagtacaaatgtactatctgtaacaaagcttttcatcaggtgtacaacctgacatttcacatgcacacacacaatgacaagaaacccttcacttgtgccacttgcgggaagggcttctgcagaaactttgacctgaagaagcacgttagaaaactccacgactcagttggccccgccgccccaagtgccaaggatttgacccggacagtccagtcatag

SEQ ID NO: 196148 - DNA, 1380 bp, Artificial Sequence
  derived and/or modified sequence
atggcttcatctgcctcactggaaactatggttccaccagcttgccctcgagctggcgcttctcctgccacctccaagacacttgccttctcaatcgagcggattatggctaaaaccagcgaacccagggccccttttgagccgcgtcccggagccctggaggccgacggatctcaaggcaaaaaattactcaatctatgtagccccctgccctgtatgatcccactccaaccactggggtatgaagtgcctagcaaaacacttttgtcttattctgaactgtggaagtcaagcctacgcgctggtgggggagggggaggtggcggaggcggaggaggaggcggtggcggtgcaccggtatgcggtgccagcggcttatgtaaaaccaattgcggtgtttgctgtaaagctgagcttggcctggccccatcggcactgcccgctggaagagtgataaaacctcaggttatcaaccaggctgtcggactgccagcctctgggtctctctactactttaactacctcgacagcaccgcctaccctccttccgagttactgtctggtcaccttttcccctcaggactgctgaatgcccaggcccctgccgcactcgccgctcacccaaaattgttcctgctcgagaatgctaagcttgctggactggctgccgacaaattcccacacccggcaccctatccacataaggagcgcctgccagcccctcttgagcaggtgttgaaagagaattccgccctgactgcagaaagaggcggagtaaaaggtcattctaagctccctgggggaagtgcagacggcaagccgaagaactttacctgcgaggtttgtggcaaagtgtttaatgcccactacaatctgactagacatatgccagtgcacaccggcgcacgaccttttgtgtgtaaagtctgtggcaagggctttaggcaagcaagtaccctctgccgtcataagatcattcatacccaggaaaagccacataaatgtaatcagtgtggaaaggcctttaacaggtcgtctacattaaatactcacattaggattcacgcaggttacaagccctttgtctgtgagttttgcggaaagggctttcaccagaagggcaattataagaatcacaagttaactcatagtggcgaaaagcagtacaagtgcaccatctgcaacaaagcctttcatcaggtctacaacctcacattccatatgcacactcacaatgacaaaaagccgttcacatgcgccacatgcgggaaggggttctgtcgtaatttcgacctgaaaaaacacgtcagaaagctgcatgatagcgtgggtccggcagccccatcagccaaagatcttacccgaactgtacagagctag

SEQ ID NO: 196149 - DNA, 1380 bp, Artificial Sequence
  derived and/or modified sequence
atggcgtcttccgcctcgctggaaacaatggtccctccagcctgtccacgagcaggagccagcccggcaacttcaaagacactggctttctccatcgaaagaatcatggctaaaactagtgaaccaagagccccttttgaaccacgcccaggcgctttggaggccgatggcagccagggaaagaagctgttaaatctctgcagcccgcttccatgtatgattccactgcagcctctcggctatgaggtcccatcaaagacgctactcagttacagtgagctgtggaaaagcagcctgagggcaggcggaggtggcggaggcggaggtggaggaggcggtggcggagggggagctcccgtctgtggggcttcaggactgtgtaaaaccaattgtggagtctgttgcaaagccgaattaggtctcgccccaagcgcgctccctgccggacgcgtgatcaaaccccaagtgatcaaccaggctgtgggactgcccgcaagtggctccctatactacttcaattacctagatagcacagcctaccccccttcggaactgctgagtggtcatctatttccttctggcctgttaaatgcacaggcaccagccgcattagctgcccaccccaaactctttctattggaaaatgctaaactcgcgggtttggcggcagacaaatttccccatcccgcaccttatccgcataaagaacgactgcctgctccactggagcaagtgctcaaagagaactctgcactaacggcggagaggggaggtgtcaaaggccatagcaaactgccaggcggatctgccgatggtaagcccaaaaactttacctgcgaagtgtgtggcaaggtctttaacgcccactataatctgacccgccacatgccagttcacaccggggctaggccattcgtgtgcaaggtatgcggtaaaggcttccggcaggcctccacactttgtcgccataaaataatccatacccaggaaaagcctcataaatgcaatcagtgtggcaaggccttcaacaggagttccacactcaacacccacatacgcattcacgctggatacaagcccttcgtttgcgagttctgcgggaaagggtttcaccagaaaggaaattataaaaatcacaaactcacacattcaggcgaaaaacagtataagtgtactatatgtaacaaggcctttcatcaggtgtataatctgactttccacatgcacacccataacgacaagaaaccattcacctgcgcaacttgtggcaaaggtttctgcagaaacttcgacttgaaaaaacacgttagaaaattacacgatagcgttggcccagccgcacccagcgcgaaggatttgactaggacggttcagtcttag

SEQ ID NO: 196150 - DNA, 1380 bp, Artificial Sequence
  derived and/or modified sequence
atggcctctagtgcttccctagagactatggttccaccggcttgccctagggccggtgcttcccctgctacttctaagactttagctttctctatagaaaggatcatggcgaagacttctgaaccacgcgcaccgttcgagccaagacctggagcgctggaggccgacggatcgcaggggaaaaaactcctgaatttatgtagtccccttccttgtatgatccccctgcagccgctcggttacgaagtgccgagcaaaaccctcctgagctactcggaactgtggaagtcttccctgcgagccggtggaggtggtggcggtggcggaggaggtggagggggaggtggcggtgccccagtgtgcggggcttcaggcctgtgcaaaaccaattgcggggtctgctgcaaggcggaactgggcctagcaccatccgctctacccgcaggcagagtcatcaagccccaggtgataaatcaggccgtgggactcccggcttccggaagcctctactactttaactacctcgactccactgcttacccgcctagcgaactgctgagcggacacttgttcccaagtggcctcctgaacgcacaggccccagctgcgctcgccgctcaccccaagctgttcctgcttgaaaacgcaaaactggctggcctggcagcagacaagttcccacaccccgctccctacccacataaggagaggctccctgcgcctctggagcaagtgctgaaagaaaattcagcactgacggccgagcggggtggggtcaagggccactctaagctgcctggaggtagcgccgacgggaaacctaagaactttacttgtgaagtttgtggcaaagtgtttaacgcccactacaatctgacacgccacatgcccgttcataccggagcacggccattcgtgtgcaaggtctgcggaaaaggctttcgccaagcatccacactgtgccgtcacaagatcattcatactcaggagaagcctcacaagtgcaaccagtgcgggaaggccttcaaccggagctctaccctgaacacacacatcagaattcatgctggatataaaccattcgtgtgcgagttctgcggcaagggcttccatcagaagggaaattacaagaatcataagctcacgcactccggagagaaacaatataagtgtacgatctgtaacaaagcattccaccaagtttacaatctgacgttccacatgcacactcacaatgacaagaaaccgtttacctgcgcaacctgcggcaagggattttgccgcaattttgacctgaagaagcatgttcgtaagctgcacgacagcgttggcccagcggctccctcagccaaggacttaacgaggaccgtccaaagttag

SEQ ID NO: 196151 - DNA, 1380 bp, Artificial Sequence
  derived and/or modified sequence
atggccagcagcgccagcctggagaccatggtgccccccgcctgccccagagccggcgccagccccgccaccagcaagaccctggccttcagcatcgagagaatcatggccaagaccagcgagcccagagcccccttcgagcccagacccggcgccctggaggccgacggcagccagggcaagaagctgctgaacctgtgcagccccctgccctgcatgatccccctgcagcccctgggctacgaggtgcccagcaagaccctgctgagctacagcgagctgtggaagagcagcctgagagccggcggcggcggcggcggcggcggcggcggcggcggcggcggcggcggcgcccccgtgtgcggcgccagcggcctgtgcaagaccaactgcggcgtgtgctgcaaggccgagctgggcctggcccccagcgccctgcccgccggcagagtgatcaagccccaggtgatcaaccaggccgtgggcctgcccgccagcggcagcctgtactacttcaactacctggacagcaccgcctacccccccagcgagctgctgagcggccacctgttccccagcggcctgctgaacgcccaggcccccgccgccctggccgcccaccccaagctgttcctgctggagaacgccaagctggccggcctggccgccgacaagttcccccaccccgccccctacccccacaaggagagactgcccgcccccctggagcaggtgctgaaggagaacagcgccctgaccgccgagagaggcggcgtgaagggccacagcaagctgcccggcggcagcgccgacggcaagcccaagaacttcacctgcgaggtgtgcggcaaggtgttcaacgcccactacaacctgaccagacacatgcccgtgcacaccggcgccagacccttcgtgtgcaaggtgtgcggcaagggcttcagacaggccagcaccctgtgcagacacaagatcatccacacccaggagaagccccacaagtgcaaccagtgcggcaaggccttcaacagaagcagcaccctgaacacccacatcagaatccacgccggctacaagcccttcgtgtgcgagttctgcggcaagggcttccaccagaagggcaactacaagaaccacaagctgacccacagcggcgagaagcagtacaagtgcaccatctgcaacaaggccttccaccaggtgtacaacctgaccttccacatgcacacccacaacgacaagaagcccttcacctgcgccacctgcggcaagggcttctgcagaaacttcgacctgaagaagcacgtgagaaagctgcacgacagcgtgggccccgccgcccccagcgccaaggacctgaccagaaccgtgcagagctag

SEQ ID NO: 196152 - protein, 468 aa, Artificial Sequence
  derived and/or modified sequence
MGTQEGWCLLLCLALSGAAETKPHPAEGQWRAVDVVLDCFLAKDGAHRGALASSEDRARASLVLKQVPVLDDGSLEDFTDFQGGTLAQDDPPIIFEASVDLVQIPQAEALLHADCSGKEVTCEISRYFLQMTETTVKTAAWFMANMQVSGGGPSISLVMKTPRVTKNEALWHPTLNLPLSPQGTVRTAVEFQVMTQTQSLSFLLGSSASLDCGFSMAPGLDLISVEWRLQHKGRGQLVYSWTAGQGQAVRKGATLEPAQLGMARDASLTLPGLTIQDEGTYICQITTSLYRAQQIIQLNIQASPKVRLSLANEALLPTLICDIAGYYPLDVVVTWTREELGGSPAQVSGASFSSLRQSVAGTYSISSSLTAEPGSAGATYTCQVTHISLEEPLGASTQVVPPERRTALGVIFASSLFLLALMFLGLQRRQAPTGLGLLQAERWETTSCADTQSSHLHEDRTARVSQPS

SEQ ID NO: 196153 - DNA, 1407 bp, Artificial Sequence
  derived and/or modified sequence
atgggcacccaggagggctggtgcctgctgctgtgcctggccctgagcggcgccgccgagaccaagccccaccccgccgagggccagtggagagccgtggacgtggtgctggactgcttcctggccaaggacggcgcccacagaggcgccctggccagcagcgaggacagagccagagccagcctggtgctgaagcaggtgcccgtgctggacgacggcagcctggaggacttcaccgacttccagggcggcaccctggcccaggacgacccccccatcatcttcgaggccagcgtggacctggtgcagatcccccaggccgaggccctgctgcacgccgactgcagcggcaaggaggtgacctgcgagatcagcagatacttcctgcagatgaccgagaccaccgtgaagaccgccgcctggttcatggccaacatgcaggtgagcggcggcggccccagcatcagcctggtgatgaagacccccagagtgaccaagaacgaggccctgtggcaccccaccctgaacctgcccctgagcccccagggcaccgtgagaaccgccgtggagttccaggtgatgacccagacccagagcctgagcttcctgctgggcagcagcgccagcctggactgcggcttcagcatggcccccggcctggacctgatcagcgtggagtggagactgcagcacaagggcagaggccagctggtgtacagctggaccgccggccagggccaggccgtgagaaagggcgccaccctggagcccgcccagctgggcatggccagagacgccagcctgaccctgcccggcctgaccatccaggacgagggcacctacatctgccagatcaccaccagcctgtacagagcccagcagatcatccagctgaacatccaggccagccccaaggtgagactgagcctggccaacgaggccctgctgcccaccctgatctgcgacatcgccggctactaccccctggacgtggtggtgacctggaccagagaggagctgggcggcagccccgcccaggtgagcggcgccagcttcagcagcctgagacagagcgtggccggcacctacagcatcagcagcagcctgaccgccgagcccggcagcgccggcgccacctacacctgccaggtgacccacatcagcctggaggagcccctgggcgccagcacccaggtggtgccccccgagagaagaaccgccctgggcgtgatcttcgccagcagcctgttcctgctggccctgatgttcctgggcctgcagagaagacaggcccccaccggcctgggcctgctgcaggccgagagatgggagaccaccagctgcgccgacacccagagcagccacctgcacgaggacagaaccgccagagtgagccagcccagctag

SEQ ID NO: 196154 - DNA, 1407 bp, Artificial Sequence
  derived and/or modified sequence
atgggaacgcaagagggctggtgccttctcctttgcctggcgctaagcggtgccgccgagaccaaaccacaccctgcagagggccagtggagggcagtggatgtggtcctggactgcttccttgccaaggacggcgcccataggggagcacttgcctcctctgaggacagggcccgtgcgtcattggtactcaaacaggtcccagtcctggacgatggcagcctagaggatttcacggactttcaaggcggcactctggcgcaggacgatcctcctatcatctttgaagcctccgtggatctcgtgcagatcccacaggccgaagctctccttcacgcggactgctctggcaaggaagttacatgtgagattagccggtacttcctgcagatgaccgagactaccgtaaaaacagccgcatggtttatggccaacatgcaggtttcgggcggcggacccagtatttcccttgtgatgaagactccccgcgtcactaaaaacgaagcattgtggcaccctaccctgaatcttccactgtcaccccaaggcaccgtgcggacagcggtagaattccaggtaatgacacagactcaaagcctgagcttccttttggggagcagcgcctccctagactgcggctttagcatggctcccggtcttgacctgatctctgtcgaatggcgcctgcagcacaaggggcgcggccagctcgtgtacagctggaccgctggacagggtcaggctgtgcggaaaggagctacacttgagcctgcccaattggggatggcccgagacgctagcctgactttaccgggccttaccattcaggatgagggcacttatatctgccaaattaccaccagcctttaccgggctcaacaaatcattcaacttaacatccaagccagccccaaggttcgactttccttggcaaacgaggccctgctgcccactctcatttgcgacatcgcaggatactatccacttgacgtagttgtgacatggacgcgcgaggagctcggcggaagccccgcacaggtttctggtgcttcgtttagcagtctaagacagtccgtcgcaggcacctactctattagttctagcttgaccgccgaacccggctctgcaggagccacatatacctgtcaggtgacccatatctcactggaggagccgctgggagccagcacccaggtggtgccccctgaaaggcgaacagccttgggggtaatttttgctagctcactctttctgcttgctctgatgttcttgggcctgcagaggaggcaggcacccactggtttgggtctattgcaagctgagcgctgggagactacttcctgtgccgacacacaatcatcacacttgcacgaagaccgaacagcaagggttagccaaccctcctag

SEQ ID NO: 196155 - DNA, 1407 bp, Artificial Sequence
  derived and/or modified sequence
atgggcacccaggagggctggtgcctgctgctgtgcctggccctgagcggggctgctgagaccaagccccaccctgctgagggccagtggagggctgtggatgtggtgctggactgcttcctggccaaggatggagcccacagaggagccctggccagcagtgaagatcgggcccgggccagcctggtgctgaagcaggtgcctgtgctggatgatggcagcctggaggacttcacagacttccagggcggcaccctggcccaggatgatcctcccatcatctttgaggcctctgtggacctggtgcagatcccccaggccgaggccctgctgcatgctgactgcagcggcaaggaggtgacctgtgagatcagccgctacttcctgcagatgacagagaccaccgtgaagacagctgcctggttcatggccaacatgcaggtgtctgggggcggccccagcatcagcctggtgatgaagaccccccgggtgaccaagaatgaggccctgtggcaccccaccctgaacctgcccctgagcccccagggcaccgtgaggacagctgtggagttccaggtgatgacccagacccagagcctgtccttcctgctgggcagcagcgccagcctggactgtggcttctccatggcccctggcctggacctgatctctgtggagtggaggctgcagcacaagggccggggccagctggtgtacagctggacagctggccagggccaggccgtgaggaaaggagccaccctggagcccgcccagctgggcatggccagagatgccagcctgaccctgcccggcctgaccatccaggatgagggcacctacatctgccagatcaccaccagcctgtaccgggcccagcagatcatccagctgaacatccaggccagccccaaggtgcggctgagcctggccaatgaggccctgctgcccaccctcatctgtgacattgctggctactaccccctggatgtggtggtgacctggacccgggaggagctgggcggcagccctgcccaggtgtctggggccagcttcagcagcctgcggcagagcgtggccggcacctacagcatcagcagcagcctgacagctgagcccggcagcgctggggccacctacacctgccaggtgacccacatcagcctggaggagcccctgggcgccagcacccaggtggtgcccccagagaggagaacagccctgggcgtcatctttgccagcagcctcttcctgctggccctgatgttcctgggcctgcagaggcggcaggcccccaccggcctgggcctgctgcaggccgagcgctgggagaccaccagctgtgccgacacccagagcagccacctgcacgaggacagaacagcccgggtgtcccagcccagctag

SEQ ID NO: 196156 - DNA, 1407 bp, Artificial Sequence
  derived and/or modified sequence
atgggcacccaggagggctggtgcctgctgctgtgcctggccctgagcggcgccgctgagactaaaccgcaccctgcggaaggccagtggcgggcagtggacgtagtactggactgctttctcgcgaaggatggggcgcaccgtggcgccctggcatccagtgaggaccgcgcgcgggcctccctggtcctcaaacaagtccctgttctggatgatggcagtttggaggacttcacagactttcagggcggaaccctcgcccaggacgaccctccaattatatttgaggcaagcgttgaccttgtgcagatcccccaggccgaggccctcttgcatgctgactgcagtggtaaggaagtcacttgcgagatctccaggtatttcctgcagatgaccgaaacaacagtgaaaacagcagcttggtttatggcaaacatgcaggtctctgggggcgggccgagcatttccctggtgatgaaaaccccccgcgtgactaagaacgaagccctgtggcaccccacattgaacctgcccttatcaccccaggggactgtcaggacagcagttgagtttcaggttatgacacagacccagtctctgtcgttcctgctgggttcgtccgcatccctggattgcggattctcaatggcccctggcttggacctgatcagtgtggaatggcggttacagcacaagggccgcggccagcttgtgtatagctggacagctggacagggccaggccgtaagaaaaggggcaactctggaacctgcccagctgggtatggcaagggacgcctcgctgactctccccgggctaactattcaagatgaaggaacctacatttgtcagatcactacatcactgtacagagctcagcagataatccagctgaacatccaagctagccccaaggtgcgtctatctctcgccaacgaagctctgctgcccacactgatctgtgacatagctggttattaccccctggacgtagtggttacttggacccgagaggagcttggaggctcacccgcccaggtgtccggtgcctctttttccagtctaagacagagcgttgcgggaacgtatagtatttctagctcccttacagcagagcctggcagcgctggcgctacctacacctgtcaggtgacgcacatctctttagaggagcctctgggagcgtctacacaggtggtaccccccgagcggagaactgctctcggagtaatatttgcctcatctctgtttctgttagcactcatgttcctcgggttgcaacgtaggcaggctcctacagggttaggactgctccaagctgaaagatgggagactacttcctgcgccgacacccagtctagccaccttcacgaggatcgcacagcacgcgtctcgcaaccaagctag

SEQ ID NO: 196157 - DNA, 1407 bp, Artificial Sequence
  derived and/or modified sequence
atgggaactcaggagggttggtgcctgctcctttgtctcgccttaagtggagcagccgagactaaaccacacccagccgaaggccaatggcgtgccgtggatgtggtcttagattgtttcctcgccaaggatggggctcatcggggagcccttgcttcctctgaagatcgagctcgcgcaagtttggttttgaagcaggtgcccgtgctggatgatgggtcactagaagacttcaccgacttccaaggtggaaccctcgcacaggatgacccacctattatcttcgaggcttccgtcgatttggtccagattccgcaggccgaagctcttctccacgctgattgttcaggaaaggaagtgacgtgtgagattagccgctattttttgcagatgaccgagaccacggtaaagaccgctgcttggtttatggctaatatgcaggtttccggcggaggaccaagcattagcctagtcatgaaaacccctcgtgtaacaaaaaacgaggcattatggcaccccacattaaatttgcctctgagtccccagggcaccgtgcgcacagccgtggagtttcaggtgatgacacagacccagtctcttagttttctcctaggctcttctgcttctcttgactgcggtttcagtatggcacccggactggatctgatctctgtggaatggagactccagcataagggtagaggacagttggtctactcctggacagccggacagggacaggcagtgcgtaagggcgctactctcgaaccagcgcagctagggatggccagggacgctagtttgaccctcccaggactcaccatacaggacgaggggacgtacatttgccagatcacgactagcttatatagggcgcagcagatcattcagctgaatatccaggcatcacccaaggtcagattatcactagctaatgaggctctgcttcctaccctgatctgcgacatcgctggatactatcccttggatgtggtcgtgacttggacccgggaagaattaggaggcagtccagcacaggtttcgggggcaagcttctcctccctgcgccagtctgtggccggaacttacagcatttcgtcttcgttaacagctgagcccggatccgcaggtgcgacctatacttgtcaggtaactcacatttctctcgaggaaccgttaggagccagtacccaagtggtcccccctgaaagacggactgcactcggcgtcatttttgctagctctctcttcttattggctctcatgttccttggcctccagcggagacaggcccctacggggttgggcctgttgcaagctgagcgttgggaaacaactagctgtgcagacacccaaagcagccatctccacgaggacagaactgctcgcgtgtctcagcctagctag

SEQ ID NO: 196158 - DNA, 1741 bp, Artificial Sequence
  derived and/or modified sequence
gtgaaagtgaaagaaaagtcggcagcagagggaacagggaagaaacctaaaggctgcaggctgccaggtgtgcttggagagcccccttcttccgccgggcctcgcaagcagcgtaggactgtggagaagggcggtgggcaaggagggaactcgagagcagcctccatgggcacacaggagggctggtgcctgctgctctgcctggctctatctggagcagcagaaaccaagccccacccagcagaggggcagtggcgggcagtggacgtggtcctagactgcttcctggcgaaggacggtgcgcaccgtggagctctcgccagcagtgaggacagggcaagggcctcccttgtgctgaagcaggtgccagtgctggacgatggctccctggaggacttcaccgatttccaagggggcacactggcccaagatgacccacctattatctttgaggcctcagtggacctggtccagattccccaggccgaggccttgctccatgctgactgcagtgggaaggaggtgacctgtgagatctcccgctactttctccagatgacagagaccactgttaagacagcagcttggttcatggccaacatgcaggtctctggagggggacctagcatctccttggtgatgaagactcccagggtcaccaagaatgaggcgctctggcacccgacgctgaacttgccactgagcccccaggggactgtgcgaactgcagtggagttccaggtgatgacacagacccaatccctgagcttcctgctggggtcctcagcctccttggactgtggcttctccatggcaccgggcttggacctcatcagtgtggagtggcgactgcagcacaagggcaggggtcagttggtgtacagctggaccgcagggcaggggcaggctgtgcggaagggcgctaccctggagcctgcacaactgggcatggccagggatgcctccctcaccctgcccggcctcactatacaggacgaggggacctacatttgccagatcaccacctctctgtaccgagctcagcagatcatccagctcaacatccaagcttcccctaaagtacgactgagcttggcaaacgaagctctgctgcccaccctcatctgcgacattgctggctattaccctctggatgtggtggtgacgtggacccgagaggagctgggtggatccccagcccaagtctctggtgcctccttctccagcctcaggcaaagcgtggcaggcacctacagcatctcctcctctctcaccgcagaacctggctctgcaggtgccacttacacctgccaggtcacacacatctctctggaggagccccttggggccagcacccaggttgtcccaccagagcggagaacagccttgggagtcatctttgccagcagtctcttccttcttgcactgatgttcctggggcttcagagacggcaagcacctacaggacttgggctgcttcaggctgaacgctgggagaccacttcctgtgctgacacacagagctcccatctccatgaagaccgcacagcgcgtgtaagccagcccagctgacctaaagcgacatgagactactagaaagaaacgacacccttccccaagcccccacagctactccaacccaaacaacaaccaagccagtttaatggtaggaatttgtattttttgcctttgttcagaatacatgacattggtaaatatgccacatgcctttggtggaagt

SEQ ID NO: 196159 - protein, 429 aa, Artificial Sequence
  derived and/or modified sequence
MTAALAVVTTSGLEDGVPRSRGEGTGEVVLERGPGAAYHMFVVMEDLVEKLKLLRYEEEFLRKSNLKAPSRHYFALPTNPGEQFYMFCTLAAWLINKAGRPFEQPQEYDDPNATISNILSELRSFGRTADFPPSKLKSGYGEHVCYVLDCFAEEALKYIGFTWKRPIYPVEELEEESVAEDDAELTLNKVDEEFVEEETDNEENFIDLNVLKAQTYHLDMNETAKQEDILESTTDAAEWSLEVERVLPQLKVTIRTDNKDWRIHVDQMHQHRSGIESALKETKGFLDKLHNEITRTLEKISSREKYINNQLENLVQEYRAAQAQLSEAKERYQQGNGGVTERTRLLSEVMEELEKVKQEMEEKGSSMTDGAPLVKIKQSLTKLKQETVEMDIRIGIVEHTLLQSKLKEKSNMTRNMHATVIPEPATGFY

SEQ ID NO: 196160 - DNA, 1290 bp, Artificial Sequence
  derived and/or modified sequence
atgacagccgcccttgctgtcgtcactaccagtggactggaggatggtgtgccgcgttctcgcggggagggcactggggaggtcgttctagaacgaggccctggtgcggcatatcacatgttcgtggtgatggaggacttagtcgagaagctgaagcttttgcggtatgaggaagaattcctaagaaagtcgaaccttaaggcaccttctcgccactacttcgccttgccgaccaaccccggagagcagttctacatgttttgtacacttgcagcgtggctgattaataaagctgggcgtccctttgaacagcctcaggaatatgacgatcctaatgccaccatttcgaacatcctatccgaactccgaagttttgggcgcacagccgatttcccaccaagcaagctgaagagtggttacggggagcacgtgtgctatgttctcgactgtttcgcagaagaggctctcaagtacattggtttcacctggaagaggcctatttatccagttgaggagctggaagaagaaagtgtcgctgaggacgatgccgaactgactctcaataaggtggatgaggaatttgtcgaggaagagacagataatgaagaaaatttcattgacttaaatgtcctgaaagctcaaacttatcacctggatatgaatgagactgcaaagcaagaggatatactggagtccactacggatgcagctgagtggagtctcgaggtggagcgtgtgctgccgcagcttaaggtgaccatccgcacagacaataaggactggcggatccatgtcgatcaaatgcatcagcatcggtctggcattgaaagtgcactcaaagaaaccaaggggttcttagataaattgcataatgagattacgaggaccctagagaaaatatcatctagggagaaatacataaataatcaactggagaacctggtccaggagtatagagcagcacaagcccagcttagcgaggctaaggagcgctatcagcagggcaacgggggtgtgaccgagcgtaccagactcctttctgaagtgatggaagaactcgaaaaagtcaagcaagagatggaggagaagggctcatcaatgactgacggggcccccctggtgaagataaaacagagcctcacaaaactgaaacaggagaccgtggagatggacatacggattgggatagtggaacataccctcctgcagtctaaactgaaggaaaagtccaatatgacacggaatatgcatgctacggtgattcctgagcctgccacgggcttttattag

SEQ ID NO: 196161 - DNA, 3203 bp, Artificial Sequence
  derived and/or modified sequence
atgaggggcggggctgcttcccgaccaccatttccacagaggcagggcaagaagagggccacaggtgacgtcattcaggaaagccgccctgattggagggaaggaggcggagtctagtttccctggtgacggattgtccggtggtcgcctggtaaccggtcgtggctgtactggcggcggcagggctggcggcttaggccgcagaggtctgtgggcctgagcccacgctggactctgtccgttctgcgatgactgctgctctggccgtcgtcacgacgtcgggtttggaagatggggtgcctaggtcccgtggcgaagggaccggggaagtggtcttggagcgggggcccggcgcggcctaccacatgttcgtggtgatggaggacttggtggagaagctgaagctgctccgctacgaggaggagttcctccggaagagcaacctgaaggccccgtccagacactattttgcactgcctaccaaccctggcgaacagttctacatgttttgtactcttgctgcttggttgattaataaagcgggacgtccctttgagcagcctcaagaatatgatgaccctaatgcaacaatatctaacatactatccgagcttcggtcatttggaagaactgcagattttcctccttcaaaattaaagtcaggttatggagaacatgtatgctatgttcttgattgcttcgctgaagaagcattgaaatatattggtttcacctggaaaaggccaatatacccagtagaagaattagaagaagaaagcgttgcagaagatgatgcagaattaacattaaataaagtggatgaagaatttgtggaagaagagacagataatgaagaaaactttattgatctcaacgttttaaaggcccagacatatcacttggatatgaacgagactgccaaacaagaagatattttggaatccacaacagatgctgcagaatggagcctagaagtggaacgtgtactaccgcaactgaaagtcacgattaggactgacaataaggattggagaatccatgttgaccaaatgcaccagcacagaagtggaattgaatctgctctaaaggagaccaagggatttttggacaaactccataatgaaattactaggactttggaaaagatcagcagccgagaaaagtacatcaacaatcagcttgagaatttggttcaagaatatcgtgcagctcaagcccagctgagtgaggcaaaggagcgataccagcagggaaatggaggagtgacggaaagaaccagactcctctctgaggttatggaagaattagaaaaggtaaaacaagaaatggaagaaaagggcagcagcatgactgatggtgctcctttggtgaagattaaacagagcttaacaaaactgaagcaagaaactgtagagatggacattagaattggcattgtggaacacacactactccaatcaaagctgaaggagaagtccaacatgactaggaacatgcatgccacagttattccagaaccagcaacaggcttttattaaaacatactggttttcatgtttctgattagttgggttttttatatcaaactatatttcatgttgcatagatttcaaaacataattttatgttcaatgggtatttttttacatatacatactcacatattatatcatggtgattatgatggttaaagcctttacactgaatgtaatgtttaataaagaaattacaaattctcactttctaagaagctttcactaatcattacctatgttaaagctcccacctggtggctcatttttcatagcattccttgtgtaagccaaggtatatgacctgcgttttctgcagatgctgctgctgtcacaacatgaactgctgacacagtcctttaccttgctccacctctgcagtgatcataagtgctttgtgcccagaggccactgaagatggtaggcaggattctttccaagaacccaaactgcctttgcctcagctttatggttacctaaaattgccactttttttaggttaaaaaaaacttcagtatcctcattaacatttgaagttggtttcttatgaatatttcgtggctaaaatgattttatagggaatctatcttctaggatctaagccactaaataaaaggataaatgaatgatgataagtcagtcactcatgtttgactctgttcttagaatgaagagaaggtgcatatgcatgtctcaatttctacctttttctgtggtatcggctatactagggaaccattttgtagaagaaggaacgatgacaggtcgcatgaagatcagcctctagtactgatgatctttacttatgcatcttcctgagcaactttctaggctaggatttctaaattggtgaaaaaagcagcattagagtgccagaattagcactggggaaaactggccaggggaacacaaagcaggagacagcctgcgttaattttttttttttaataattttcaaaagcagtggtagaaaatttgataagaatgctttatgtttaggacaacaaaaataattttaaaaagttattttttaccctaatacttttctccactgaatattattatttttttcttagctttttctttctagatgtattccccaacatgctcacatacacagatctttccctttccttactagacctctctttagtttaagataagtttagacaggagaaagtgtatgtaaactacctgaaaggatgacaatcaatacaatgacaaatatgccagtttatttaatttgtttaaaaaaaaaaaggcagaaaacccaccatgggaaaataagcattttttaaaatctgaagttgctcttttcctgtgtggtctttgggaggagtctaatacaaaaactgaaaacctttggtcctgggaatttattttcatggctgttgtcatggctgagtagttttttgatgaattcaatcaatgcagagaacgcttttagataaatcagaactctccttaaaatgcatttcaatcagaagcaaagtacacccattatttatgcagacatgtaaaaaatctaaaaattcttgcaatgagtagtataagccacctatttttacttccttctctgaaatattccagttaactcagcttgggttctgtgctcctcctctcttcctatagaacactgtgcataccttgaataaagagcttattatacta

SEQ ID NO: 196162 - DNA, 1290 bp, Artificial Sequence
  derived and/or modified sequence
atgacagctgccctggccgtggtgaccaccagcggcctggaggatggagtgcccaggagcagaggagagggcactggagaggtggtgctggagcggggccctggggccgcctaccacatgtttgtggtgatggaggacctggtggagaagctgaagctgctgcgctatgaggaggagttcctgaggaagagcaacctgaaggcccccagccgccactactttgccctgcccaccaaccctggagagcagttctacatgttctgcaccctggccgcctggctgatcaacaaggccggccggccctttgagcagccccaggagtatgatgaccccaatgccaccatcagcaacatcctgtctgagctgcggagctttggaagaacagctgacttcccccccagcaagctgaagagcggctacggggagcacgtgtgctacgtgctggactgctttgctgaggaggccctgaagtacatcggcttcacctggaagaggcccatctaccctgtggaggagctggaggaggagagcgtggccgaggatgatgctgagctgaccctgaacaaggtggatgaggagtttgtggaggaggagacagacaatgaggagaacttcatcgacctgaatgtgctgaaggcccagacctaccacctggacatgaatgaaacagccaagcaggaggacatcctggagagcaccacagatgctgctgagtggagcctggaggtggagcgggtgctgccccagctgaaggtgaccatcagaacagacaacaaggactggaggatccacgtggaccagatgcaccagcacaggtctggaattgaaagtgccctgaaggagaccaagggcttcctggacaagctgcacaatgagatcaccaggaccctggagaagatcagcagccgggagaagtacatcaacaaccagctggagaacctggtgcaggagtaccgggccgcccaggcccagctgtctgaggccaaggagcgctaccagcagggcaatggaggagtgacagagaggacccggctgctgtctgaggtgatggaggagctggagaaggtgaagcaggagatggaggagaagggcagctccatgacagatggagcccccctggtgaagatcaagcagagcctgaccaagctgaagcaggagaccgtggagatggacatccgcatcggcatcgtggagcacaccctgctgcagagcaagctgaaggagaagagcaacatgaccaggaacatgcacgccaccgtcatccctgagcccgccaccggcttctactag

SEQ ID NO: 196163 - DNA, 1290 bp, Artificial Sequence
  derived and/or modified sequence
atgaccgccgccctggccgtggtgaccaccagcggcctggaggacggagtgccacgcagcaggggcgagggaacaggcgaggtggtgctagaaaggggccctggagctgcttaccacatgtttgtggtaatggaggacctggtggagaagctgaagttgctgagatatgaggaggaatttttgaggaaatccaatctcaaagccccgagccgacactactttgccctgccaactaatcctggggaacagttttatatgttctgcacactcgccgcttggttaattaataaggctgggcggccattcgaacaacctcaggaatatgatgaccctaacgccactatttcaaacatcctctccgaattgagatctttcggacgcactgcggacttcccgccatccaaattgaaatctggatacggagagcacgtgtgctatgtgctggactgcttcgcagaggaagctctgaaatacatcggattcacctggaagcgccctatatatcctgtggaggaactggaggaagagagtgtcgctgaggatgacgctgagctgactctgaataaagtggacgaggagttcgtggaagaggagacggacaacgaagaaaactttattgatctaaatgtgctgaaggctcaaacatatcatctggatatgaacgagacagctaagcaggaagacatcctggaatctacaactgacgcagctgagtggtctctggaggttgagcgagtgctgccccagttgaaggtgacgattagaactgacaacaaggattggcgaattcatgtggatcaaatgcaccagcacagatccggcatcgagtccgcactcaaggagaccaaggggttcctcgataagttacacaatgagattacacgaacactggaaaagattagttcccgggagaagtacataaataatcagctagagaacttggtgcaggagtatagggcggcacaagcccaactgtcggaggccaaagagagataccagcaggggaatggcggtgtcaccgaaagaactagactactgagtgaggtaatggaagaattggagaaggttaaacaggagatggaggagaagggtagcagcatgaccgacggggcccccctggtcaagataaaacagagtctgactaagctgaagcaagaaaccgttgagatggatattcgcatcggaatcgtggaacataccctgctgcagtctaaacttaaagagaaaagtaatatgacaagaaacatgcatgcgactgtgatccccgagcccgcaaccggattttactag

SEQ ID NO: 196164 - DNA, 1290 bp, Artificial Sequence
  derived and/or modified sequence
atgaccgcagctctggccgtggtaacaacctccggcctggaagatggcgttcctagaagcagaggagagggcaccggggaggtggtgctcgagcgtggacccggagccgcataccacatgttcgtggtgatggaggatcttgtcgagaaactcaagttgctcagatatgaggaggagttcttgagaaaatccaatctcaaggctccaagtcgccactatttcgccttacccacaaatcccggtgagcagttttacatgttttgcacgttggcggcttggctaatcaataaagctggcaggccattcgagcagccccaagagtatgatgatcccaatgctacgatttctaacattcttagcgaactgcgtagcttcggcagaacagccgacttccccccaagcaagctaaaatcaggatatggggagcacgtgtgttacgtccttgattgttttgccgaagaggcacttaagtacatcggctttacgtggaagcgacccatttatccagtggaggagctcgaagaagagagcgtcgctgaagatgacgcggaactcacgctcaataaagtcgacgaagagtttgtggaggaagaaactgacaacgaggaaaattttattgacctaaatgtgctcaaggctcagacataccacttagatatgaatgaaactgccaaacaggaggacattcttgagtccaccaccgacgccgcagagtggtctctggaggtagaaagagtgctgcctcagctgaaagtgacgattcgcactgacaacaaggattggcgcattcatgttgaccagatgcaccagcatcgcagcggaattgagagtgcactcaaagagactaaggggtttctggacaaactgcacaatgagatcaccagaaccttggagaaaatcagttccagggagaaatacatcaacaaccagctggagaatctcgtgcaagaatatcgagcagctcaagcacagctcagcgaagctaaagaacggtaccagcaggggaacggtggggtgaccgagcgcaccaggctcctgtctgaggtgatggaagagctcgaaaaggttaaacaagagatggaggagaagggaagctccatgacagacggtgcccctcttgtgaagatcaaacagagccttaccaagttaaagcaggagaccgtcgaaatggacatccgtattggcatcgtcgagcatactctccttcagtccaaattgaaggagaagagtaatatgacccgcaacatgcacgccactgtcattccagagccagctaccggattttactag

SEQ ID NO: 196165 - DNA, 1290 bp, Artificial Sequence
  derived and/or modified sequence
atgaccgccgccctggccgtggtgaccaccagcggcctggaggacggcgtgcccagaagcagaggcgagggcaccggcgaggtggtgctggagagaggccccggcgccgcctaccacatgttcgtggtgatggaggacctggtggagaagctgaagctgctgagatacgaggaggagttcctgagaaagagcaacctgaaggcccccagcagacactacttcgccctgcccaccaaccccggcgagcagttctacatgttctgcaccctggccgcctggctgatcaacaaggccggcagacccttcgagcagccccaggagtacgacgaccccaacgccaccatcagcaacatcctgagcgagctgagaagcttcggcagaaccgccgacttcccccccagcaagctgaagagcggctacggcgagcacgtgtgctacgtgctggactgcttcgccgaggaggccctgaagtacatcggcttcacctggaagagacccatctaccccgtggaggagctggaggaggagagcgtggccgaggacgacgccgagctgaccctgaacaaggtggacgaggagttcgtggaggaggagaccgacaacgaggagaacttcatcgacctgaacgtgctgaaggcccagacctaccacctggacatgaacgagaccgccaagcaggaggacatcctggagagcaccaccgacgccgccgagtggagcctggaggtggagagagtgctgccccagctgaaggtgaccatcagaaccgacaacaaggactggagaatccacgtggaccagatgcaccagcacagaagcggcatcgagagcgccctgaaggagaccaagggcttcctggacaagctgcacaacgagatcaccagaaccctggagaagatcagcagcagagagaagtacatcaacaaccagctggagaacctggtgcaggagtacagagccgcccaggcccagctgagcgaggccaaggagagataccagcagggcaacggcggcgtgaccgagagaaccagactgctgagcgaggtgatggaggagctggagaaggtgaagcaggagatggaggagaagggcagcagcatgaccgacggcgcccccctggtgaagatcaagcagagcctgaccaagctgaagcaggagaccgtggagatggacatcagaatcggcatcgtggagcacaccctgctgcagagcaagctgaaggagaagagcaacatgaccagaaacatgcacgccaccgtgatccccgagcccgccaccggcttctactag

SEQ ID NO: 196166 - protein, 142 aa, Artificial Sequence
  derived and/or modified sequence
MKLNEKFSEGWRKPNASWKSSCSKNSSDRDKLSLPHKKLERGSWRVWQPRSTLCRTLDKTEEERAKREELERILEENNRKIAEAQAKLAEEQLRIVEEQRKIHEERMKLEQERQRQQKEEQKIILGKGKSRPKLSFSLKTQD

SEQ ID NO: 196167 - protein, 273 aa, Artificial Sequence
  derived and/or modified sequence
MGRSRSRSSSRSKHTKSSKHNKKRSRSRSRSRDKERVRKRSKSRESKRNRRRESRSRSRSTNTAVSRRERDRERASSPPDRIDIFGRTVSKRSSLDEKQKREEEEKKAEFERQRKIRQQEIEEKLIEEETARRVEELVAKRVEEELEKRKDEIEREVLRRVEEAKRIMEKQLLEELERQRQAELAAQKAREEEERAKREELERILEENNRKIAEAQAKLAEEQLRIVEEQRKIHEERMKLEQERQRQQKEEQKIILGKGKSRPKLSFSLKTQD

SEQ ID NO: 196168 - protein, 223 aa, Artificial Sequence
  derived and/or modified sequence
MGRSRSRSSSRSKHTKSSKHNKKRASSPPDRIDIFGRTVSKRSSLDEKQKREEEEKKAEFERQRKIRQQEIEEKLIEEETARRVEELVAKRVEEELEKRKDEIEREVLRRVEEAKRIMEKQLLEELERQRQAELAAQKAREVTLGRLESRDSPWQNFQCWVLPPAQFRKRWNTDYLIPFSSKLNIAAKVNFLAYSEVLTDNLKVGSFYKTYSRILFDLMELAI

SEQ ID NO: 196169 - DNA, 429 bp, Artificial Sequence
  derived and/or modified sequence
atgaaactgaatgaaaagttctccgaggggtggaggaaacccaatgcgagctggaaaagctcttgctctaaaaacagctctgacagagacaaactttctttgccacacaagaaactggagcgaggctcctggagagtgtggcagcctcggtctacattatgcaggaccctggataaaaccgaagaagagagggccaaacgcgaagaattggaacgcatcctggaggagaataatcgtaaaatcgccgaggcccaggctaagctggctgaggagcagctgaggattgtcgaagagcagcgaaaaatccacgaggagagaatgaagctcgagcaggagagacaacgccagcaaaaagaggagcagaaaatcatattgggcaagggcaagtctagacccaaattgtcattctctctcaagacccaagattag

SEQ ID NO: 196170 - DNA, 822 bp, Artificial Sequence
  derived and/or modified sequence
atggggcgcagtaggtctcgctctagttcgcgcagcaagcacacaaagtcttctaagcataacaaaaagagaagtaggtcaagatcccggagcagagataaagagagagtaaggaagcggtctaaaagccgggagtcaaaacgcaataggcggcgcgagagcagatcacggagtcgttcaacaaacacagcagtgtccagaagggagcgggaccgcgagcgagcgagttctcctcccgaccgcatcgatatttttggtaggaccgtatccaagcggagctctctggatgaaaagcagaaaagggaggaagaggagaagaaggctgagtttgagcgtcagaggaaaatcagacagcaggagattgaggaaaagctgatcgaggaagagaccgcacgcagggtggaagagctggtggctaagcgggtagaggaggagctggaaaagcggaaggacgaaattgagcgcgaggttctgcgtcgagtcgaggaagcgaaacgcatcatggagaaacagttgctcgaagagctagaacgacagagacaggcggagctggccgctcaaaaggcccgtgaagaagaggaacgggctaaacgtgaggaactggagagaatactggaggagaacaataggaaaatagctgaggcacaagccaagctcgcagaagaacagcttagaatagtggaagagcagagaaaaatccacgaagagagaatgaagcttgagcaggagagacagagacaacaaaaggaggaacagaagatcatcctgggcaaggggaagtctcgccccaagctgtctttttctctcaagacacaggactag

SEQ ID NO: 196171 - DNA, 672 bp, Artificial Sequence
  derived and/or modified sequence
atggggcgttcaaggtcaaggagtagtagcagatctaaacatacgaagagctctaaacacaacaaaaagcgtgcatccagcccgcccgatcgcatcgatatcttcggtaggactgtatcaaagaggtcaagtcttgatgagaagcagaagcgcgaagaagaagagaagaaggccgagttcgaacggcaacgcaagatacggcagcaagagattgaagagaagctgattgaggaagaaacagccaggagggtagaagagttagtggccaaaagggttgaagaggagctggaaaaacgtaaagacgaaattgagcgggaggtgttaaggcgagttgaagaagctaaaaggatcatggagaaacagctgctggaagaactagagcggcagcggcaggcagagctcgctgcccaaaaagcgcgagaggtgactctgggacggctggaaagtcgagatagcccttggcagaacttccagtgttgggtcttgcccccagcccagttcaggaagcgctggaacacagattatctcattcctttctcttccaagctgaacatcgccgcgaaagttaatttcctagcatattctgaggttctgacggacaacctcaaggttggtagtttttacaagacatattctagaattctctttgatttgatggaactggccatctag

SEQ ID NO: 196172 - DNA, 429 bp, Artificial Sequence
  derived and/or modified sequence
atgaagctgaatgagaagttcagcgagggctggaggaagcccaatgcctcctggaagagcagctgcagcaagaacagcagtgaccgggacaagctgagcctgccccacaagaagctggagcggggctcctggagggtgtggcagcccaggagcaccctgtgcaggaccctggacaagacagaggaggagcgggccaagcgggaggagctggagcgcatcctggaggagaacaacaggaagattgctgaggcccaggccaagctggccgaggagcagctgagaattgtggaggagcagaggaagatccacgaggagaggatgaagctggagcaggagcggcagaggcagcagaaggaggagcagaagatcatcctgggcaagggcaagagccggcccaagctgtccttcagcctgaagacccaggactag

SEQ ID NO: 196173 - DNA, 822 bp, Artificial Sequence
  derived and/or modified sequence
atgggccgcagccgcagccgcagcagcagccgcagcaagcacaccaagagcagcaagcacaacaagaagaggagccgcagccgcagccgcagccgggacaaggagcgggtgaggaagaggagcaagagccgggagagcaagaggaacagaagaagagagagccgcagccgcagccgcagcaccaacacagctgtgtccagaagagagcgggaccgggagcgggccagcagccccccagacagaattgacatctttggaagaacagtgtccaagaggagcagcctggatgagaagcagaagcgggaggaggaggagaagaaggccgagtttgagcggcagaggaagatccggcagcaggagattgaggagaagctgattgaggaggagacagcccggcgggtggaggagctggtggccaagagggtggaggaggagctggagaagaggaaggatgaaattgagcgggaggtgctgcggcgggtggaggaggccaagaggatcatggagaagcagctgctggaggagctggagcggcagaggcaggccgagctggccgcccagaaggcccgggaggaggaggagcgggccaagcgggaggagctggagcgcatcctggaggagaacaacaggaagattgctgaggcccaggccaagctggccgaggagcagctgcgcatcgtggaggagcagaggaagatccacgaggagaggatgaagctggagcaggagcggcagaggcagcagaaggaggagcagaagatcatcctgggcaagggcaagagccggcccaagctgtccttcagcctgaagacccaggactag

SEQ ID NO: 196174 - DNA, 672 bp, Artificial Sequence
  derived and/or modified sequence
atgggccgcagccgcagccgcagcagcagccgcagcaagcacaccaagagcagcaagcacaacaagaagagggccagcagccccccagacagaattgacatctttggaagaacagtgtccaagaggagcagcctggatgagaagcagaagcgggaggaggaggagaagaaggccgagtttgagcggcagaggaagatccggcagcaggagattgaggagaagctgattgaggaggagacagcccggcgggtggaggagctggtggccaagagggtggaggaggagctggagaagaggaaggatgaaattgagcgggaggtgctgcggcgggtggaggaggccaagaggatcatggagaagcagctgctggaggagctggagcggcagaggcaggccgagctggccgcccagaaggcccgggaggtgaccctgggccgcctggagagccgggacagcccctggcagaacttccagtgctgggtgctgcccccagcccagttcaggaagcgctggaacacagactacctgatccccttcagcagcaagctgaacattgctgccaaggtgaacttcctggcctacagcgaggtgctgacagacaacctgaaggtgggcagcttctacaagacctacagccgcatcctgtttgacctgatggagctggccatctag

SEQ ID NO: 196175 - DNA, 207 bp, Artificial Sequence
  derived and/or modified sequence
atgaagctgaacgagaagttcagcgagggctggcggaagcccaacgcatcctggaagtcttcgtgttctaagaactccagcgacagggacaaactgtctctgccacacaaaaaacttgagagagggtcctggcgggtttggcagccccgatcaacgctgtgccgcacccttgataaaaccgaggaggagcgcgctaagcgtgagtag

SEQ ID NO: 196176 - DNA, 429 bp, Artificial Sequence
  derived and/or modified sequence
atgaagctgaacgagaagttcagcgagggctggcggaagcccaacgcatcatggaagtcgagctgtagtaagaattccagcgacagagataagttatcgctcccacacaagaagttggaacgtggaagctggcgcgtctggcaaccccggtccacactgtgtcgcacactggacaagacagaggaagagcgggccaaaagagaggagctagagcggattcttgaggaaaacaatcggaagatcgccgaagcgcaggccaaacttgccgaagaacagctgaggatcgtggaggaacaaagaaaaattcatgaggagaggatgaaactcgaacaggaacgtcaaagacaacagaaggaagagcagaagatcatccttgggaagggcaagtctagacctaaactgagcttctcactgaaaacacaggattag

SEQ ID NO: 196177 - DNA, 822 bp, Artificial Sequence
  derived and/or modified sequence
atgggccggagccggagccggagcagcagccggagcaagcacaccaaatcctcaaagcacaacaaaaagagatcccgatcccgcagccggagtagagacaaggagagagttaggaaacgcagcaagagtcgcgagagcaagcgaaaccggagaagggagagccgatccaggtctagatcaactaatactgctgtgagcaggagagagcgcgatagagagagagcatccagcccacccgatcgcatcgatatcttcgggcgcaccgtctcaaagcgctccagtctcgatgagaagcagaagcgggaggaagaggaaaaaaaggctgagtttgagagacagaggaaaatccgtcagcaagaaatcgaggagaagctgattgaagaggaaactgcccgcagggtagaggaacttgtggctaagagggtagaagaagaattagagaaaaggaaagacgaaatcgaacgtgaagtcctccggcgagttgaagaagccaagcgaattatggaaaagcagctactagaagagctggagaggcaaaggcaggccgagctcgctgcacagaaggctcgtgaagaggaggagagagctaagcgagaggagctcgagagaatcctagaagaaaacaataggaagattgccgaggcccaagcaaagcttgcagaagagcagcttcgcatcgtggaggaacaacgaaagattcatgaggaacgcatgaaactggaacaggaacgccaacgtcaacagaaagaggaacagaagataatactgggcaaaggaaaaagtcggcctaagctgagttttagtctgaagacgcaggactag

SEQ ID NO: 196178 - DNA, 672 bp, Artificial Sequence
  derived and/or modified sequence
atgggccggagccggagccggagcagcagccggagcaagcacaccaagtcgtcaaagcacaataaaaagcgagcaagtagcccccctgacagaatcgacatctttgggagaaccgtaagtaagagaagcagtctcgatgagaagcagaagagagaggaggaagagaaaaaagcggaatttgagcgacaaagaaagatcagacagcaggaaattgaggagaagctgattgaagaggagaccgctcgacgggtcgaggaactggtcgccaagcgagtcgaggaagaactggagaaacgaaaagacgaaatagagagagaagtcctgcggagggtggaggaggctaagagaattatggaaaagcaactgctcgaagaactggagagacagagacaggccgagctggctgcccagaaggctagggaggtcaccctcggccggcttgaaagtcgggactctccttggcagaatttccaatgttgggtgcttccccctgctcagttccggaagcggtggaacacggattacctgattcctttctcctcgaaacttaatatcgccgcaaaagtcaatttcctcgcttattcagaagtgctcaccgacaatctgaaggtgggtagcttttacaagacatacagccgaatcctgtttgatctcatggagctggcaatttag

SEQ ID NO: 196179 - DNA, 429 bp, Artificial Sequence
  derived and/or modified sequence
atgaagttgaacgaaaaattcagcgagggctggcgaaagccgaacgccagctggaaatcgtcctgtagtaagaatagctcggacagggacaaattaagcctcccacacaaaaagctcgagagaggcagttggcgggtatggcagcccaggtctaccctgtgtagaactctggacaaaacagaggaagagcgtgccaaacgagaggagctggagcgcatactggaggaaaacaatcggaagatcgcggaggctcaggcgaaactcgcggaagaacagctgagaatcgtggaagagcagagaaaaattcatgaagaacgcatgaagctcgagcaggagagacaaagacagcagaaagaagaacagaagatcattcttgggaaaggtaagagtaggcctaagttgagtttcagtctgaaaacccaggactag

SEQ ID NO: 196180 - DNA, 822 bp, Artificial Sequence
  derived and/or modified sequence
atgggtcgttcaaggtctcggtcatcatcacgttccaagcacacaaagtcttctaagcataataaaaagaggagccgatctagaagtcgatctagagataaggagagagtacgaaaacgatctaagagcagggaatcaaagagaaacaggaggagagagtcccgctccagatcaaggtcaaccaacactgccgtcagccggagagagcgcgaccgcgagcgcgcttcttctcccccagacaggattgatatcttcggtagaactgtgtccaaacgcagttcactggacgagaagcagaagcgggaagaggaggagaaaaaggctgaattcgagcgtcaacgcaagattcgccagcaagagatcgaagagaagcttatagaagaagaaaccgctcgccgagtagaagagctggtggcaaagagggtggaagaggaactagagaaaaggaaggacgaaattgaacgcgaggtgctgagaagggtcgaggaggctaagagaattatggaaaaacagttgctggaagaacttgagcggcagcgacaagctgagctggcagctcaaaaggcccgagaggaggaagagcgcgctaaaagagaggaattagaaagaatcttggaggagaataatcgcaaaatagcggaggcccaggcaaagttagcagaggagcagctgcgcattgtcgaggagcagcgcaaaattcatgaagagcggatgaagctcgagcaagagcggcagagacagcagaaggaagaacaaaaaatcatccttggtaaaggaaaatcaagacccaagctgagttttagcctgaaaacccaggattag

SEQ ID NO: 196181 - DNA, 672 bp, Artificial Sequence
  derived and/or modified sequence
atggggagatcaaggtcacggtcttcatctcggtcaaagcacacaaaatcttcgaagcacaacaaaaaaagggcctcctcccccccagatcgtatagacattttcggtcggaccgtgagcaaacgcagttcactcgatgagaagcagaaacgcgaggaggaggaaaaaaaagctgaattcgagcggcagcgcaaaattagacagcaggaaatcgaggagaagctcatagaagaagagactgccaggagagtggaggaactggtcgccaagagagtcgaagaggagctggaaaagagaaaggatgagattgaacgcgaggtgctccgacgcgtagaagaggccaagcgaattatggaaaaacagctgcttgaggagttagaaagacagagacaggccgagcttgctgctcagaaagcccgtgaagtcaccttaggcagactggagtcacgcgactccccctggcagaacttccagtgctgggtgctcccgccagcacagtttcggaagcggtggaacaccgactacttaattccgttctctagcaagctgaacatagctgccaaagtcaactttctggcatatagcgaagttctcaccgacaacctgaaagttgggagtttttacaaaacatactcccgtatcctcttcgacctgatggaactcgctatctag

SEQ ID NO: 196182 - DNA, 821 bp, Artificial Sequence
  derived and/or modified sequence
gactccttagcagcggagcagcccacggcctgcctgtactgcctgttacatgggccctctggtttgatgtcatcagtggaaatagaagcagggaactgacattctgatttggcatttgcttcgacagcaagaaatagaagaaaaactcatcgaggaagaaacagcacgaagagtagaagaattggtagcaaaaagggtggaggaagaactggagaaaaggaaggatgaaattgaacgagaagttctccgaagggtggaggaagccaaacgcatcatggaaaagcagttgctcgaagaactcgagcgacagagacaagctgagcttgccgcacaaaaagctagagagaggaagctggcgcgtatggcagccgaggagcacactctgcaggacactggacaagacagaggaagaacgtgcaaaacgtgaggagctagagcgaatactggaagagaataaccgaaaaattgcagaagcacaagccaaactggccgaagaacagttgagaattgttgaagaacaaagaaagattcatgaggaaaggatgaaactagaacaagaacgacaacgtcaacaaaaagaagaacaaaaaattatcctgggcaaggggaagtccaggccaaaactgtccttctcattaaaaacccaggattaaattgcaaactctgaactttttacaaagaaaaatggaaaaactttgtatggtagcttcatgttgaagtggttttttgtttttgtttttgtttttttaatttgtaaaatctggaaagttagcttgttctaataggggctatgctctgcaattcccttttttttttttttt

SEQ ID NO: 196183 - DNA, 3390 bp, Artificial Sequence
  derived and/or modified sequence
attgtgggaagggcggccggtgcagccgcagctgccatcttaggggcgcctggcgctacgggtttctcgttggaggcggccttcgtggcagctgtagacgccgggaaaaggcataaagtccgttggccgacacctttctttcctccggcctcggtagaaccgccagcccgcgtccgaaggcggaggcgaggggaactggccgcgtgaggggcctgaggcgagcggttagagcgtctcccggaaggatgggccggtctcggagccggagctcgtcccgctccaagcacaccaagagcagcaagcacaacaagaagcgcagccggtcccggtcgcgatcccgggacaaggagcgcgtgcggaagcgttccaaatctcgggaaagtaaacggaaccggcggcgggagtcgcggtcccgttcgcgctccaccaacacggccgtgtcccggcgcgagcgggaccgggagcgcgcctcgtccccgcccgaccgcatcgacatcttcgggcgcacggtgagcaagcgcagcagcctggacgagaagcagaagcgagaggaggaggagaagaaagcggagttcgagcggcagcgaaaaattcgacagcaagaaatagaagaaaaactcatcgaggaagaaacagcacgaagagtagaagaattggtagcaaaaagggtggaggaagaactggagaaaaggaaggatgaaattgaacgagaagttctccgaagggtggaggaagccaaacgcatcatggaaaagcagttgctcgaagaactcgagcgacagagacaagctgagcttgccgcacaaaaagctagagaggaggaagaacgtgcaaaacgtgaggagctagagcgaatactggaagagaataaccgaaaaattgcagaagcacaagccaaactggccgaagaacagttgagaattgttgaagaacaaagaaagattcatgaggaaaggatgaaactagaacaagaacgacaacgtcaacaaaaagaagaacaaaaaattatcctgggcaaggggaagtccaggccaaaactgtccttctcattaaaaacccaggattaaattgcaaactctgaactttttacaaagaaaaatggaaaaactttgtatggtagcttcatgttgaagtggttttttgtttttgtttttgtttttttaatttgtaaaatctggaaagttagcttgttctaataggggctatgctctgcaattccctttttttttttttttttccttccactaagtcaaatccttatcagatcattgttgtattctaaggagtgacgtatttttcacctgtttggattctatattagtggtctgaggaagagcagatcacattgtaaaactatggatggtctgataaggcttttactgaccccactgacttcagagttatactctgtttgctacatcataatgctggttttgctgactttttgtttttttatatatttataaaaaaagaaaaagttggtgattgcattgggaaattcccagggtattactggacctatgtggtgtattgttaaaccagtgtccttgtgatactgttgctcttgatgttcctgatacaggtaaggaaacagttggtcaactctgatacaaagtatatatacagttcagtattgtctctgttcattttgtttttatttcattgacaaaatcaaaccagcattccccattgtgtaaataaatgattttgctgaataaagtaaagtcttaaattcatatgttgaagcaattttttttaatgttatgttaagtcttaaagagggtggttcactttttgatggtcaaccatttagaagtcttagaactatatttcctcttgtttatacttttaacatagggtttatatgtacattaaatatacttgtgaattagtatttaatggctatttttacaaatatcaactttatgctgatagagcaaatggcatcagtgttacctttaagaaagactaacaacatccagaagatttaaattctcaaacctgtgcctctgttttaggatataagtattatcacaaagtatacttaataaaggctagaaaaatgcttttaaattatggaatctgagatcgttttcagagtgggccatcagaaagaacttagctttatactgtcaaaaaaaggctaagatggtcgagtcattttcattgtgtagtgtacttgcacgtttatttttaggacaaacacatttgaactttatgaattttttttttttttttgcatgtgaaatcttatgaatggctttcattttatacactagaatctgcctcatttactcttaacatatgtttaagtatactggtattaaaacattcaagaaaaggatattgatctaaaatgctacctgagatgcataaacatgtcatcaagtagagaaaatatttttatttttgcccaatattttttagacagtttgattattcttaaaaattgaaaacataagctaaagagatgactaaatggtagattattttgtgtgtgcatgctaggaaaaatgctgttgctttagttttgagctcttcaatgagtctaattgtggtaaggaacaatataaaatcagtttaaagatctttaaaggtagaattttaaataggcatgaaatatagtgagaacttttagtaaacatactacttactctaaaatcaaacattttattttcctaaagaatataggttgccaaaaaatattttatctctaaatataggttagctgtaattatttcatgaatttttttttttttcaatgtaactttttttggtgaagattcatggttcctaagttctgtattcaagtttttggaaatgtttatttaaaaactgttctatacaagtgttcaaaacattgtatctaaagagagtagcctggacttaaaatatttgaaatcagcttatgcgtgccttttaattttttttttaagtttcttactgccacatatggtgtgaagtgacagtaagttgcttaatgacatcctgcagtatctgcttgcttttggagactccagtgagatgttgaaattgttcctgtgcttggtaactactttcctctgccaggctatgggaaagaggatgtaattgtgaataatatacaccatccagtctttaatgtgctgcaacaatgtagtaatttgtttttttcatttgttcccactgcctttgtgtacatagaaaacttaaaaatttcccccagtctattagaagttaagatgttccctaatttattaaatatgcctttattcacaatttgtttttttaggttattcttaatgcattatagaattaagtatgactttgtttatttttattacagtatgtagttattgacatattgtggtttgcagaattatcaattgtataaactaaacctttaaatta

SEQ ID NO: 196184 - DNA, 1261 bp, Artificial Sequence
  derived and/or modified sequence
ggtgcagccgcagctgccatcttaggggcgcctggcgctacgggtttctcgttggaggcggccttcgtggcagctgtagacgccgggaaaaggcataaagtccgttggccgacacctttctttcctccggcctcggtagaaccgccagcccgcgtccgaaggcggaggcgaggggaactggccgcgtgaggggcctgaggcgagcggttagagcgtctcccggaaggatgggccggtctcggagccggagctcgtcccgctccaagcacaccaagagcagcaagcacaacaagaagcgcgcctcgtccccgcccgaccgcatcgacatcttcgggcgcacggtgagcaagcgcagcagcctggacgagaagcagaagcgagaggaggaggagaagaaagcggagttcgagcggcagcgaaaaattcgacagcaagaaatagaagaaaaactcatcgaggaagaaacagcacgaagagtagaagaattggtagcaaaaagggtggaggaagaactggagaaaaggaaggatgaaattgaacgagaagttctccgaagggtggaggaagccaaacgcatcatggaaaagcagttgctcgaagaactcgagcgacagagacaagctgagcttgccgcacaaaaagctagagaggtaacgctcggtcgtttggaaagtagagacagtccatggcaaaactttcagtgttgggttctgcctcctgctcagttcagaaagagatggaatacagactatctaattcctttctcgtctaaacttaacattgctgcgaaagttaattttttagcctattcagaagtgctgactgataacttaaaagttggaagcttttataaaacatattcaaggatactttttgatttaatggaactggctatttgagaagtgtttgaaacttttgccatggctgcaggacttacattcttttttgggaggacggtggggagacagggagtggtaaagggaaaaggttaaaaatccacctgtggttgtatattcttctattctgtcactctgttacctagactgtgagaggcttttgccttcagtcagattaaaaagagcagggcctaacattgagtgatagcacctgctttgataaataggttttctcactcttctttttttccttcttttatccctcactccctcccctaaaccctgcttcagcacaatggactaattctagcattctgatcataaggccctccattttcctaatgtgtttcaaggaatctttttag

SEQ ID NO: 196185 - DNA, 429 bp, Artificial Sequence
  derived and/or modified sequence
atgaagctgaacgagaagttcagcgagggctggagaaagcccaacgccagctggaagagcagctgcagcaagaacagcagcgacagagacaagctgagcctgccccacaagaagctggagagaggcagctggagagtgtggcagcccagaagcaccctgtgcagaaccctggacaagaccgaggaggagagagccaagagagaggagctggagagaatcctggaggagaacaacagaaagatcgccgaggcccaggccaagctggccgaggagcagctgagaatcgtggaggagcagagaaagatccacgaggagagaatgaagctggagcaggagagacagagacagcagaaggaggagcagaagatcatcctgggcaagggcaagagcagacccaagctgagcttcagcctgaagacccaggactag

SEQ ID NO: 196186 - DNA, 822 bp, Artificial Sequence
  derived and/or modified sequence
atgggcagaagcagaagcagaagcagcagcagaagcaagcacaccaagagcagcaagcacaacaagaagagaagcagaagcagaagcagaagcagagacaaggagagagtgagaaagagaagcaagagcagagagagcaagagaaacagaagaagagagagcagaagcagaagcagaagcaccaacaccgccgtgagcagaagagagagagacagagagagagccagcagcccccccgacagaatcgacatcttcggcagaaccgtgagcaagagaagcagcctggacgagaagcagaagagagaggaggaggagaagaaggccgagttcgagagacagagaaagatcagacagcaggagatcgaggagaagctgatcgaggaggagaccgccagaagagtggaggagctggtggccaagagagtggaggaggagctggagaagagaaaggacgagatcgagagagaggtgctgagaagagtggaggaggccaagagaatcatggagaagcagctgctggaggagctggagagacagagacaggccgagctggccgcccagaaggccagagaggaggaggagagagccaagagagaggagctggagagaatcctggaggagaacaacagaaagatcgccgaggcccaggccaagctggccgaggagcagctgagaatcgtggaggagcagagaaagatccacgaggagagaatgaagctggagcaggagagacagagacagcagaaggaggagcagaagatcatcctgggcaagggcaagagcagacccaagctgagcttcagcctgaagacccaggactag

SEQ ID NO: 196187 - DNA, 672 bp, Artificial Sequence
  derived and/or modified sequence
atgggcagaagcagaagcagaagcagcagcagaagcaagcacaccaagagcagcaagcacaacaagaagagagccagcagcccccccgacagaatcgacatcttcggcagaaccgtgagcaagagaagcagcctggacgagaagcagaagagagaggaggaggagaagaaggccgagttcgagagacagagaaagatcagacagcaggagatcgaggagaagctgatcgaggaggagaccgccagaagagtggaggagctggtggccaagagagtggaggaggagctggagaagagaaaggacgagatcgagagagaggtgctgagaagagtggaggaggccaagagaatcatggagaagcagctgctggaggagctggagagacagagacaggccgagctggccgcccagaaggccagagaggtgaccctgggcagactggagagcagagacagcccctggcagaacttccagtgctgggtgctgccccccgcccagttcagaaagagatggaacaccgactacctgatccccttcagcagcaagctgaacatcgccgccaaggtgaacttcctggcctacagcgaggtgctgaccgacaacctgaaggtgggcagcttctacaagacctacagcagaatcctgttcgacctgatggagctggccatctag

SEQ ID NO: 196188 - protein, 2108 aa, Artificial Sequence
  derived and/or modified sequence
MNSVAGNKERLAVSTRGKKYGVNEVCSPTKPAAPFSPESWYRKAYEESRAGSRPTPEGAGSALGSSGTPSPGSGTSSPSSFTGSPGPASPGIGTSSPGSLGGSPGFGTGSPGSGSGGGSSPGSDRGVWCENCNARLVELKRQALRLLLPGPFPGKDPAFSAVIHDKLQVPNTIRKAWNDRDNRCDICATHLNQLKQEAIQMVLTLEQAAGSEHYDASPCSPPPLSNIPTLVGSRHVGGLQQPRDWAFVPAPCATSNYTGFANKHGSKPSSLGVSNGAEKKSGSPTHQAKVSLQMATSPSNGNILNSVAIQAHQYLDGTWSLSRTNGVTLYPYQISQLMTESSREGLTEAVLNRYNADKPSACSVPASQGSCVASETSTGTSVAASFFARAAQKLNLSSKKKKHRPSTSSAAEPPLFATSFSGILQTSPPPAPPCLLRAVNKVKDTPGLGKVKVMLRICSTLARDTSESSSFLKVDPRKKQITLYDPLTCGGQNAFQKRGNQVPPKMFAFDAVFPQDASQAEVCAGTVAEVIQSVVNGADGCVFCFGHAKLGKSYTMIGKDDSMQNLGIIPCAISWLFKLINERKEKTGARFSVRVSAVEVWGKEENLRDLLSEVATGSLQDGQSPGVYLCEDPICGTQLQNQSELRAPTAEKAAFFLDAAIASRRSHQQDCDEDDHRNSHVFFTLHIYQYRMEKSGKGGMSGGRSRLHLIDLGSCVKALSKNREGGSGLCLSLSALGNVILALVNGSKHIPYKESKLAMLLRESLGNMNCRTTMIAHISAAVGSYAETLSTIQIASRVLRMKKKKTKYTSSSSGGESSCEEGRMRRPTQLRPFHTRATVDPDFPIAHLSSDPDYSSSSEQSCDTVIYIGPNGTALSDKELTDNEGPPDFVPIVPALQKTRGDSRPAEAGEAAAGKSERDCLKCNTFAELQERLDCIDGSEEPSSFPFEELPAQFGPEQASRGPRLSQAAGASPLSESDKEDNGSEGQLTNREGPELPASKMQRSHSPVPAAAPAHSPSPASPRSVPGSSSQHSASPLVQSPSLQSSRESLNSCGFVEGKPRPMGSPRLGIASLSKTSEYKPPSSPSQRCKVYTQKGVLPSPAPLPPSSKDSGVASRESLLQPEVRTPPVGMSPQVLKKSMSAGSEGFPETPVDDEQQAATPSESKKEILSTTMVTVQQPLELNGEDELVFTLVEELTISGVLDSGRPTSIISFNSDCSARALASGSRPVSIISSISEDLECYSSTAPVSEVSITQFLPLPKMSLDEKAQDAGSRRSSISSWLSEMSAGSEGEQSCHSFIAQTCFGHGEAMAEPVASEFVSSLQNTAVVCREKPKASPDNLLILSEMGDDSFNKAAPIKGCKISTVSKAMVTISNTANLSSCEGYIPMKTNITVYPCIAMSPRNIQEPEAPTATPKAGPTLAQSRESKENSAKKEMKFEDPWLKREEEVKKETAHPNEEGMMRCETATGPSNAETRAEQEQDGKPSPGDRLSSSSGEVSASPVTDNFRRVVDGCEMALPGLATQSPVHPNKSVKSSSLPRAFQKASRQEEPDSLSYYCAAETNGVGAASGTPPSKATLEGKVASPKHCVLARPKGTPPLPPVRKSSLDQKNRASPQHSASGSGTSSPLNQPAAFPAGLPDEPSGKTKDASSSSKLFSAKLEQLASRSNSLGRATVSHYECLSLERAESLSSVSSRLHAGKDGTMPRAGRSLGRSAGTSPPSSGASPKAGQSKISAVSRLLLASPRARGPSASTTKTLSFSTKSLPQAVGQGSSSPPGGKHTPWSTQSLSRNRSSGLASKLPLRAVSGRISELLQGGAGARGLQLRAGPEAEARGGALAEDEPAAAHLLPSPYSKITPPRRPHRCSSGHGSDNSSVLSGELPPAMGKTALFYHSGGSSGYESVMRDSEATGSASSAQDSTSENSSSVGGRCRSLKTPKKRSNPGSQRRRLIPALSLDTSSPVRKPPNSTGVRWVDGPLRSSPRGLGEPFEIKVYEIDDVERLQRRRGGASKEAMCFNAKLKILEHRQQRIAEVRAKYEWLMKELEATKQYLMLDPNKWLSEFDLEQVWELDSLEYLEALECVTERLESRVNFCKAHLMMITCFDITSRRR

SEQ ID NO: 196189 - DNA, 6327 bp, Artificial Sequence
  derived and/or modified sequence
atgaatagtgtggcaggcaacaaagagcgcctggccgttagtactcgggggaagaagtacggcgtcaacgaggtatgcagcccaaccaagcctgccgcgcctttttctcctgagtcttggtaccgtaaagcatacgaggagtcccgtgccggttctcgccccacccctgaaggtgctgggtccgcgctcggatcctcgggcaccccctctccaggaagtggtacttcctctccgtcctcgttcactggcagtcctggccccgctagccctggaattggaacttcttcacccggcagccttggcggatcaccagggttcggtactgggtcaccagggagcgggtccggcggtggtagttctcctggcagcgaccggggtgtttggtgtgaaaactgcaacgcacggcttgttgaacttaagcgccaagctctgcgtctgcttctcccagggccattcccgggaaaggatcctgcattttcagctgtcatccacgataagctgcaagtacccaacactattcggaaggcgtggaatgacagggataacaggtgcgacatctgcgctacgcatctaaaccagctgaaacaggaagctatacagatggttctgactctggaacaggccgccggatcagagcattacgatgcctccccatgcagcccacctcctctctcaaacatacctactctggtgggaagccgacacgtgggcggcctgcagcagccccgcgactgggctttcgtacctgccccgtgtgcaacgagcaactacactggctttgccaacaaacatggtagcaagccatcttcattgggggtctcaaatggggccgaaaagaagtctggatctccaactcatcaggctaaagtgtccctgcagatggcgacttctccttctaacgggaatattctgaattcggtggcaatccaggcccaccagtacctcgacgggacttggtccctctcacgcacaaacggggtgacattgtacccttaccagatcagccagctgatgacggagagctctagggaagggctcactgaggcagtgctcaacagatataacgccgataaaccatccgcctgcagcgtccctgcatcacaggggtcttgcgtagcgtctgagacaagtactggtacctctgtcgccgccagcttcttcgcacgtgccgcacagaagctgaatttgagttccaagaagaagaagcaccgtccatcgacttcaagcgcagcagaacccccattatttgctacctcattctcaggcatcttacaaaccagtccaccacctgcacccccctgtctgttacgggctgttaataaggtaaaagataccccagggttagggaaagtcaaggttatgctccgtatatgctcgacacttgccagggacacaagcgagtctagttctttcttgaaggtggacccccgcaagaaacagattaccttatacgatccgctcacttgtgggggccagaatgcattccagaaacggggcaaccaggtgccgccaaagatgtttgcattcgatgctgtattcccacaggacgcctcccaggctgaagtctgcgctggcaccgtcgcagaggtgatccagagtgtggttaatggtgccgacgggtgtgtcttttgctttggccacgccaagctggggaagtcttacactatgatcgggaaagatgactcaatgcaaaacctgggtatcattccctgcgccatctcctggttatttaagttgatcaacgaacggaaggagaaaactggcgctcgcttttccgtccgcgtgagtgccgtagaagtttggggaaaagaggagaatctcagagaccttctgtcagaagtcgccactggctcactgcaggatgggcagagtccaggagtgtacctctgtgaggaccccatttgtggcacccagctgcagaaccagtccgagctcagagcgccaacggccgagaaagcggccttttttctagacgcagctatcgcaagcaggcggtctcaccagcaagattgtgatgaagatgatcaccgcaattcccacgtattctttaccctgcacatctatcagtatagaatggagaagtctggaaaaggaggaatgtccggtgggcgttcccgattacacctgatcgacctgggaagctgcgtcaaagccctgtcaaaaaatcgcgagggcggtagcggactgtgcctcagcctcagtgccctcggcaacgtgatcctggccctggtgaatggatcaaagcatattccatataaagaatcaaagctagctatgctgctgagggaatccctcggaaacatgaattgtcgaaccactatgattgcccatatttcagcggcagtcggcagctatgcagagaccctgtccacaatccagattgcctccagagtcctgagaatgaagaaaaaaaagactaaatatactagcagctccagcggcggtgaatcatcctgtgaggagggtcgcatgcggcggcccacgcagcttcgcccctttcacactcgcgcaactgttgatcctgattttcctattgcccacctgtcctcggaccccgattattcttcttcctccgagcaatcctgtgacacggttatatacatcggacctaacggcaccgccctctccgacaaagaactgaccgacaatgaggggcctccagatttcgtcccaattgtacctgctcttcagaagacccggggagactcccggccagctgaagcaggggaagccgcagcaggaaaatcagaacgcgactgtttgaagtgcaatactttcgccgagctgcaggagcgattagattgcatcgacggatccgaggagccatctagctttccttttgaggagctgcctgcacagttcggaccagaacaggcctctcggggtccacggcttagtcaagccgcaggcgcttcacccctgagcgaaagcgacaaggaggataacggctctgagggtcagctcacaaatagggaaggacccgaactgcccgcatcaaagatgcagagaagtcactctcctgtaccagcggccgccccagctcacagcccctcgccagcaagccctcgaagcgtgcccgggtcaagtagccagcattctgcaagtcccctcgtacagtcgccttcacttcaatcgagcagagaaagtctgaactcctgtggctttgtggaaggcaaacctagaccgatgggctctcctcggctcggcatcgctagcttgtctaagaccagcgagtataagccaccctcttcaccatcccagaggtgcaaagtgtatacacagaagggagtgctgcctagccctgcaccgctgcctccatcctctaaagactctggggtcgcgtctagggagtcacttctccaaccagaggtgcgaaccccgcccgtgggtatgagtccccaggtgttgaaaaaatcaatgagtgcagggagcgagggtttccctgaaacccccgtggacgacgagcagcaggccgctacaccgtctgagagcaagaaggaaatcctctctaccaccatggtgaccgtacaacagcctcttgagctcaacggggaagatgagctcgtttttaccctggtcgaggagctgacgatatctggagtgctcgattccggacggccaacgtcaataatcagcttcaatagcgattgcagtgcccgcgcccttgcttcaggatctaggcccgtctcaatcatctcgtccatctcagaagacctggaatgttactcatctacggccccagtgtccgaagtctcaattacccagtttctgcccctccccaaaatgtccttagacgagaaggctcaagacgctgggtcccgtcggtctagcatcagcagttggctgtccgagatgagcgcgggttccgaaggagaacagagctgtcattcatttattgctcaaacttgctttggacacggcgaggccatggccgagcccgtcgcttctgaatttgtgtcttctcttcagaacaccgctgtcgtgtgtagggagaaaccgaaggcaagcccagacaacctgctcattctgagtgaaatgggcgacgattccttcaataaggccgcgccgattaagggttgcaagatcagcactgtgagtaaagctatggtcactatctccaatactgctaacttgtccagctgcgaagggtacatcccaatgaaaaccaatataacagtgtatccatgtatcgctatgtccccacgcaacatccaggagcctgaagcacctacagctacaccgaaggctgggcccacattagcccagagtagggagagtaaggagaactcagcaaaaaaagagatgaaattcgaggacccctggttaaagcgcgaagaggaagtgaagaaggaaaccgcgcaccccaatgaagagggaatgatgagatgtgagacagccactggcccctccaacgccgagacacgggccgaacaggagcaggacggaaaaccgagtccaggcgaccgactaagctccagctcaggagaggtttctgccagcccagttaccgataactttaggcgggtggtcgatggttgcgagatggctctcccaggcctcgccacgcaatcccccgttcacccaaacaagtctgttaagtcctctagtctgcccagagcatttcagaaggcaagcaggcaggaagagcccgactccctgagctactactgtgcagccgagacgaatggtgtgggggcagccagtggcaccccaccaagtaaggccaccctggaggggaaagtggcttcgcccaaacattgtgtgcttgccaggcccaaaggcacgcctcccctccctcccgtgcggaaatccagccttgaccaaaagaaccgagcctctccccaacactctgcaagtgggtcaggaacgagtagccctttgaatcagccagcagccttcccggcagggctgcccgatgagccaagcggcaagactaaagacgcatcatctagctcaaagttattctcagcgaaactggagcagctggcctcacggagtaattccttaggccgagctaccgtgagccactatgagtgcctttccctcgagagggccgaatcattatccagtgtgtcgagcaggctacatgcaggaaaagacgggactatgcccagggccggccgatcactgggtcggtccgccggcacatctcccccatctagtggcgcttctcctaaagctgggcagtcaaagatttctgctgtgtcaagacttcttctcgcctcaccccgagcccgcggcccctctgccagtactaccaaaacactgagtttttccactaagtcgcttccacaggccgttggacagggctcatccagcccacctggtggtaagcatacaccgtggagcacccagagcctgagtaggaaccgtagctccgggttggcctccaagctacctctgcgtgccgtatccggacgtatttccgagttattacagggtggggccggcgccagggggctgcagcttagagctgggccggaagcggaagccaggggcggagccctcgctgaggatgagccagctgcggcacaccttctgccaagcccctacagcaaaataactccacccagacgtccacaccgatgtagctctggacatggaagcgataatagtagcgtgctgtctggcgaactgccccctgcaatgggcaagaccgccttattctaccattctggcggcagtagcggttatgaatctgtgatgcgcgacagcgaggctaccggaagcgcctcctcagcccaggactctacctccgaaaatagtagttcagtcggcggtcggtgtcggtcacttaagaccccaaagaaaaggtccaaccccggatcgcagagacgcagactgataccagctctgagtcttgacacttcctctcccgtgagaaaaccacccaattccaccggtgttcggtgggtcgatggccccctacgcagctctcctcgcggattaggcgagccgtttgagatcaaggtctatgagattgacgacgtggagcgactccagaggcggcgcggcggagcatcaaaggaggcaatgtgtttcaatgcaaaacttaaaatcctcgagcacaggcagcagagaattgcagaagtgagggccaaatatgagtggttgatgaaggaacttgaagccactaagcaatacctgatgttggatcccaacaagtggctgtctgagtttgacctcgaacaagtgtgggaactggattcactggaatacctcgaggctctggaatgcgtgactgaaagactggagagccgtgttaacttttgcaaagcacacctgatgatgatcacctgttttgacatcacttcgaggaggagatag

SEQ ID NO: 196190 - DNA, 7287 bp, Artificial Sequence
  derived and/or modified sequence
agttaccaagctcggtgaaggagacaagttcccacagctgactcggctcggctctcccaccttcccggcagcggccgcgagccctgattgtatccctcgctttcctcgtgggggagcacggactgacttggctgaagaaaatgccagttctgtggatgtggccgtgacaagaggacgtgcggctggaagaggcagaaggggacgaggaaaagcatgctttgaagagaagaataaaccagcgaccccaaccctttctgcaaattggtgctattacttgtgggatccatttgctttcattccctcccaccccaccgctgaagaaaccttgccctgagggctgagagccagccccctgcagccgggggacgcttctgggttggaggaccttctggatgtagcgtcggtggaacctttagatactctcctctggaaaagccaccatgaattcggtagctgggaataaagagaggcttgcggtctccaccaggggcaagaaatacggggtgaatgaagtctgctcgcccaccaagcccgcagcgcccttctccccggaaagctggtaccggaaagcatacgaggagtcgcgcgccggcagccggcccactcctgagggcgcgggctcagcgctcggctcctcggggaccccgtctcccggctcgggcacctcgtccccgagctcgttcaccggctccccgggacccgcctcccccggcatcggcactagttcgccgggctccttgggcggctctccgggcttcggcacaggctccccgggctccggcagcggcggcggctcctcccccggctcggaccgcggcgtctggtgcgagaactgcaacgcccgcctggtggagctcaagaggcaggccctgaggttgctcctcccggggcccttcccgggcaaggaccctgctttctcggctgtgattcacgacaaactccaggtccccaacaccatccggaaggcatggaacgaccgggacaaccgctgtgacatttgcgccactcacctgaaccagttgaagcaggaggccatccagatggtgctgacgttggagcaggcagccggcagtgagcactacgacgcctcgccctgctccccgccaccgctctccaacatccccaccctggtggggtcccggcacgtgggtgggctccagcagcccagagactgggcctttgtgcccgccccctgtgccacctccaactacacaggcttcgccaacaagcacggcagcaaacccagcagccttggggtcagcaatggggcggaaaagaagagcgggtccccaacccaccaggccaaggtcagcctccagatggccaccagtccaagcaatgggaacatcctcaattcggtggccatccaggctcaccagtacctggatggcacctggtccctgtcgagaaccaacggggtcaccctgtacccataccagatctcccagctgatgacagagagtagccgggagggactaacagaagcagtgctgaaccgctacaatgcagacaagccttccgcctgcagtgtcccagcctcgcagggctcctgcgtggccagcgagacttccacaggcacatcggtggccgcctccttctttgcacgagctgcccagaagttaaatctgtcttctaaaaagaagaaacatcggccttccacttcttccgctgccgaaccaccgctctttgcaaccagcttcagtgggattctgcagacctcccctcccccagccccaccctgcctgctgagggctgtcaacaaggtgaaggacaccccggggctgggcaaggtgaaagtcatgcttcgcatctgttccaccttggctcgagatacttcagaatccagctctttcttaaaggtggacccacggaagaagcagatcaccttgtacgatcccctgacttgtggaggtcaaaatgccttccaaaagagaggcaaccaggttcctccaaagatgtttgccttcgatgcagtttttccacaagacgcttctcaggctgaagtgtgtgcaggcaccgtggcagaggtgatccagtctgtggtcaacggggcagatggctgcgtgttctgtttcggccacgccaaactgggaaaatcctacaccatgatcggaaaggatgattccatgcagaacctgggcatcattccctgtgccatctcttggctcttcaagctcataaacgaacgcaaggaaaagaccggcgcccgtttctcagtccgggtttccgccgtggaagtgtgggggaaggaggagaacctgcgggacctgctgtcggaggtggccacgggcagcctgcaggacggccagtccccgggcgtgtacctctgtgaggaccccatctgcggcacgcagctgcagaaccagagcgagctgcgggcccccaccgcagagaaggctgcctttttcctggatgccgccattgcctcccgcaggagccaccaacaggactgtgatgaggacgaccaccgcaactcacacgtgttcttcacactgcacatctaccagtaccggatggagaagagcgggaaagggggaatgtctggaggtcgcagccgcctgcatctcattgatctcggcagctgtgtgaaagctcttagcaaaaatcgagaaggaggctcagggctgtgtctctcgctgtctgctctgggcaatgtcatcctggctctcgtcaatggcagcaaacacattccatacaaagagagcaagctcgccatgttgctgcgggagtctctggggaacatgaactgccgtaccaccatgatcgcgcacatctcggccgcggtcgggagctacgcggagaccctgtccaccatccagattgcatcgagagtcttgaggatgaagaaaaagaagacgaagtacacatccagctcgtccggcggggagagctcctgcgaagaaggccgcatgcgcaggcccacccagctgagacccttccacaccagggccacggtggaccctgacttccccatcgctcacctgtccagcgaccccgactactcctccagcagcgagcagtcctgcgacaccgtcatctacatcgggcccaacggcacggccctctctgacaaggagctcaccgacaacgagggccccccagactttgtccctatcgtgccagccctgcagaagacccggggcgacagccggcccgcagaggcaggagaggctgcagccggcaagtcagaaagggactgcctgaagtgcaacacgtttgccgagctgcaggagaggctggactgcatcgacggcagcgaggagcccagcagctttcctttcgaagaactgcctgctcagtttgggccagagcaggcaagcagaggcccccggttaagccaagcagcgggggcaagcccactctctgagtctgataaggaagataatgggtccgaaggtcagctgaccaacagagaaggccctgaactcccagcctccaagatgcagaggagtcactcacctgtgcccgccgcggcacccgcccacagccccagcccggcctcacccaggagcgtcccgggcagcagtagccagcacagcgcctccccactcgtgcagagccccagcctccagagcagccgggagagcctcaactcctgcggcttcgtggaaggcaagcccaggcccatgggctccccccggctgggcatcgccagcctgtccaagacctcggagtacaagccacccagctctccttcccagagatgcaaagtctacacccagaagggggtcctgccgtctcccgccccactgcctccctcgagcaaggattccggcgtggcgtctagggagtccttgctgcagcccgaggtgcgtacgcccccggttggaatgagcccccaggttttgaaaaaatccatgtctgctgggagcgaagggttcccggaaactcctgtcgatgatgagcagcaggcagctactccttcagagtccaagaaggagatcctgagcaccacgatggtgacggtgcagcagccactggagctgaacggtgaggacgagctggtgttcacgctggtggaggagctgaccatcagcggggtcctggacagcggccgccccaccagcatcatcagcttcaacagcgactgctctgcacgggccctggcctcgggctcgcggcccgtcagcatcatcagcagcatcagcgaggacctggagtgctactccagcacggcccccgtctccgaggtcagcatcacacagttcttgcccctcccgaagatgagcctggatgagaaggcccaggacgcagggagcagacgctcttccatcagctcctggctgagcgagatgagcgcgggcagtgagggtgagcagtcgtgccacagtttcatagcccagacgtgttttgggcacggggaggcaatggcagaacctgtggcctcggagtttgtcagcagcctccagaacaccgctgtggtgtgcagagagaagcccaaggccagccccgacaacttgctcatcctgtctgagatgggagatgactctttcaacaaagcagcccccatcaaaggctgcaaaatatccacagtgagcaaggccatggtcaccatctccaacacggccaatctgagcagctgcgaggggtacatccccatgaagaccaatatcacagtttacccctgcattgccatgagcccccggaacatccaagagccggaggcccccaccgccacccccaaagcaggccccacattagcccagtcccgggagagtaaggaaaacagtgcaaagaaagagatgaaatttgaggacccgtggctgaaacgagaagaggaagtgaaaaaagagacggctcatcccaatgaagaagggatgatgaggtgtgagactgccacgggcccctcgaatgctgagaccagagcagagcaggagcaggacggaaagcccagtccgggagacaggctcagcagcagcagcggagaggtgtcggcctccccggtcactgacaacttcaggagggtcgtggatgggtgtgagatggccctgcccggtttggccacccagagccccgtgcatcccaacaaaagcgtcaagtccagcagccttcccagggcctttcagaaggccagccggcaggaggagccggacagcctctcctattactgcgctgctgagaccaacggggtgggtgcagcctcgggcaccccgccctccaaggctaccctggaggggaaggtggcttcccccaagcactgtgttctggctcggcccaaagggactccccctctgccccctgtccgaaagtccagcctggaccagaagaaccgggccagccctcagcacagtgccagcggcagcggcaccagcagccccctgaaccaaccagccgccttcccggcgggcctcccagacgagcctagcggcaagacgaaggacgccagcagcagcagcaagctcttcagtgccaagctggagcagctggccagcagaagcaactcgctgggcagggcgacagtcagccactacgaatgcctctccctggagcgggccgagagcctgtcctccgtgagctcccggctgcacgcgggcaaggacggcaccatgccccgcgcggggaggagcctgggccgcagcgccgggacctcgccccccagctccggggcctcgcccaaggccggccagtccaagatctccgccgtgagcagactcctcctggccagccccagagcgcgcggcccgtccgcctccaccaccaaaaccctcagcttctccaccaagtccctgccgcaggcggtgggccagggctccagctcgccccccggtgggaagcacacgccctggtccacgcagtccctcagcaggaacaggagctcgggcctggcctccaagcttcccctgcgggccgtcagcgggcgcatctcggagctgctgcagggtggcgcgggcgcccggggcttgcagctgcgggccgggcccgaggcggaggcgcgcgggggggccctggccgaggacgagcccgcggccgcgcacctgctcccgtcgccctacagcaagatcacgcccccgcggaggccccaccgctgcagcagcggccacggcagcgacaacagcagcgtgctgagcggggagctcccgccggccatggggaagacggccctgttctaccacagcggcggcagcagcggctacgagagcgtgatgcgggacagcgaggccaccggcagcgcgtcctcggcgcaggactccacgagcgagaacagcagctccgtgggcggcaggtgccggagcctcaagaccccgaagaaacgctccaatccaggttctcagagacggaggcttatcccagcactatccctggacacctcttcccctgtgagaaaaccccccaacagcacaggcgtccgctgggtggatggccccttgcggagcagcccgaggggccttggggaaccctttgagattaaagtctatgaaatcgatgacgtggagcgcctgcagcggcgacgagggggtgccagcaaggaggccatgtgcttcaatgcaaagctgaagattctggaacaccgccagcagaggatcgccgaggtccgcgcgaagtacgagtggctgatgaaggagctggaggcgaccaaacagtatctgatgctggatcccaacaagtggctcagtgaatttgacttggagcaggtttgggagctggattccctggagtacctggaggcactggagtgtgtgacggagcgcctggagagccgtgtcaacttctgcaaggcccatctcatgatgatcacctgcttcgacatcacctccaggcgccggtagatgagccagacccttgtcctagtggtcccccgctccccaggacttcagagatgttgcacgcccctaggccctctgtgctggggcatcaaagacaatgaatgaggatgaaggttggtggcaagtctggagcgggcgttgagcggaaggcgagttttcttttgttttctgtaggaaaggtgcaaacgtcaaacaccgtggaaggagaaaaggatgggaagcccgaggggtgtccaagccctgtgagactgaaaaagcactttgaggaaccttaaagaccttgtttgtacataagaactgctagcaaaagagacctcactcttctcttgctttcgtgagaaaggaggggcgtggatgtaggattgctgtggaaagcgaacacaaaacaacccagaatgactgattaagtgccttgcaaatctttattattatccaaacatttatgttcatactttcttgtgtacagatggtgctagtcaagatgaaaacaacaaaacaaacaagaaaaacattttggaaatgt

SEQ ID NO: 196191 - DNA, 6327 bp, Artificial Sequence
  derived and/or modified sequence
atgaacagcgtggccggcaacaaggagcggctggccgtgtccacccggggcaagaagtatggagtgaatgaggtgtgcagccccaccaagccagctgcccccttcagccctgagagctggtacaggaaggcctatgaggagagccgggccggcagccggcccaccccagagggcgccggcagcgccctgggcagcagcggcacccccagccctggcagcggcaccagcagccccagcagcttcaccggcagccctggccctgccagccctggcatcggcaccagcagccctggcagcctgggcggcagccctggcttcggcaccggcagccctggcagcggcagcggcggcggcagcagccctggcagtgaccggggcgtgtggtgtgagaactgcaatgcccggctggtggagctgaagaggcaggccctgcggctgctgctgcccggccccttccctgggaaggaccctgccttctctgctgtgattcatgacaagctgcaggtgcccaacaccatcaggaaggcctggaatgaccgggacaacagatgtgacatctgtgccacccacctgaaccagctgaagcaggaggccatccagatggtgctgaccctggagcaggccgccggcagcgagcactatgatgccagcccctgcagccccccacccctgagcaacatccccaccctggtgggcagcagacatgtgggcggcctgcagcagccccgggactgggcctttgtgcctgccccctgtgccaccagcaactacacaggctttgccaacaagcacggcagcaagcccagcagcctgggcgtgtccaatggagctgagaagaagagcggcagccccacccaccaggccaaggtgtccctgcagatggccaccagccccagcaatggaaacatcctgaacagcgtggccatccaggcccaccagtacctggatggcacctggagcctgagcaggaccaatggagtgaccctgtacccctaccagatcagccagctgatgacagagagcagccgggagggcctgacagaagctgtgctgaaccgctacaatgctgacaagcccagcgcctgcagcgtgcctgccagccagggcagctgtgtggccagcgagaccagcacaggcacctctgtggccgccagcttctttgcccgggccgcccagaagctgaacctgagcagcaagaagaagaagcaccggcccagcaccagcagcgctgctgagccccccctgtttgccaccagcttcagcggcatcctgcagaccagccccccaccagccccaccctgcctgctgcgggctgtgaacaaggtgaaggacaccccaggcctgggcaaggtgaaggtgatgctgcgcatctgcagcaccctggcccgggacaccagcgagagcagcagcttcctgaaggtggaccccaggaagaagcagatcaccctgtatgaccccctgacctgtggcggccagaatgccttccagaagaggggcaaccaggtgccccccaagatgtttgcctttgatgctgtgttcccccaggatgccagccaggccgaggtgtgtgccggcaccgtggccgaggtgatccagagcgtggtgaatggagcagatggctgtgtgttctgctttggacatgccaagctgggcaagagctacaccatgattggcaaggatgacagcatgcagaacctgggcatcatcccctgtgccatctcctggctgttcaagctgatcaatgaaaggaaggagaagacaggagcccgcttctctgtgcgggtgtctgctgtggaggtgtggggcaaggaggagaacctgcgggacctgctgtctgaggtggccaccggcagcctgcaggacggccagagccctggggtgtacctgtgtgaggaccccatctgtggcacccagctgcagaaccagagcgagctgcgggcccccacagctgagaaggccgccttcttcctggatgctgccatcgccagccgccgcagccaccagcaggactgtgatgaagatgaccacaggaacagccacgtgttcttcaccctgcacatctaccagtacaggatggagaagtctggaaaaggaggcatgtctgggggccgcagccggctgcacctgattgacctgggcagctgtgtgaaggccctgagcaagaaccgggagggcggcagcggcctgtgcctgagcctgagcgccctgggcaatgtcatcctggccctggtgaatggcagcaagcacatcccctacaaggagagcaagctggccatgctgctgcgggagagcctgggcaacatgaactgcaggaccaccatgattgcccacatctctgctgctgtgggcagctatgcagagaccctgagcaccatccagatcgccagccgggtgctgaggatgaagaagaagaagaccaagtacaccagcagcagcagtggaggagagagcagctgtgaggagggccgcatgagaagacccacccagctgcggcccttccacacccgggccaccgtggaccctgacttccccatcgcccacctgagcagtgaccctgactacagcagcagcagcgagcagagctgtgacaccgtcatctacatcggccccaatggaacagccctgagtgacaaggagctgacagacaatgaaggccccccagactttgtgcccatcgtgcctgccctgcagaagaccaggggggacagcaggcctgctgaggccggggaggccgctgctgggaagtctgagcgggactgcctgaagtgcaacacctttgctgagctgcaggagcggctggactgcattgatggcagcgaggagcccagcagcttcccctttgaggagctgcctgcccagtttggacctgagcaggccagccggggcccccggctgagccaggccgccggggccagccccctgtctgagagtgacaaggaggacaatggcagcgagggccagctgaccaaccgggagggccctgagctgcctgccagcaagatgcagaggagccacagccctgtgcctgctgctgccccagcccacagccccagccctgccagccccaggtctgtgcccggcagcagcagccagcacagcgccagccccctggtgcagagccccagcctgcagagcagccgggagagcctgaacagctgtggctttgtggagggcaagccccggcccatgggcagcccccggctgggcatcgccagcctgagcaagaccagcgagtacaagccacccagcagccccagccagcgctgcaaggtgtacacccagaagggcgtgctgcccagccctgcccccctgccccccagcagcaaggacagcggcgtggccagccgggagagcctgctgcagcctgaggtgaggaccccacctgtgggcatgagcccccaggtgctgaagaagtccatgtctgctggcagcgagggcttccctgagacccctgtggatgatgagcagcaggccgccacccccagcgagagcaagaaggagatcctgagcaccaccatggtgacagtgcagcagcccctggagctgaatggagaagatgagctggtgttcaccctggtggaggagctgaccatctctggagtgctggacagcggccggcccaccagcatcatctccttcaacagcgactgcagcgcccgggccctggccagcggcagcaggcctgtgtccatcatcagcagcatcagcgaggacctggagtgctacagcagcacagcccctgtgtctgaggtgtccatcacccagttcctgcccctgcccaagatgagcctggatgagaaggcccaggatgctggcagccgccgcagcagcatcagctcctggctgtctgagatgtctgctggcagcgagggggagcagagctgccacagcttcatcgcccagacctgcttcggccacggggaggccatggccgagcctgtggccagcgagtttgtgagcagcctgcagaacacagctgtggtgtgccgggagaagcccaaggccagcccagacaacctgctgatcctgtctgagatgggagatgacagcttcaacaaggccgcccccatcaagggctgcaagatcagcacagtgtccaaggccatggtgaccatcagcaacacagccaacctgagcagctgtgagggctacatccccatgaagaccaacatcaccgtgtacccctgcatcgccatgagccccaggaacatccaggagcctgaggcccccacagccacccccaaggccggccccaccctggcccagagccgggagagcaaggagaacagcgccaagaaggagatgaagtttgaggacccctggctgaagcgggaggaggaggtgaagaaggagacagcccaccccaatgaggagggcatgatgagatgtgaaacagccaccggccccagcaatgctgagaccagggctgagcaggagcaggacggcaagcccagccctggggaccggctgagcagcagcagcggggaggtgtctgccagccctgtgacagacaacttcagaagagtggtggatggctgtgagatggccctgcccggcctggccacccagagccctgtgcaccccaacaagtctgtgaagagcagcagcctgccccgggccttccagaaggccagccggcaggaggagccagacagcctgagctactactgtgccgctgagaccaacggggtgggcgccgccagcggcaccccacccagcaaggccaccctggagggcaaggtggccagccccaagcactgtgtgctggcccggcccaagggcaccccacccctgccccctgtgaggaagagcagcctggaccagaagaacagagccagcccccagcacagcgccagcggcagcggcaccagcagccccctgaaccagcctgctgccttccctgctggcctgcctgatgagcccagcggcaagaccaaggatgccagcagcagcagcaagctgttcagcgccaagctggagcagctggccagccgcagcaacagcctgggccgggccaccgtgagccactatgagtgcctgagcctggagagagctgagagcctgagctctgtgagcagccggctgcatgctgggaaggatggcaccatgccccgggccggccgcagcctgggccgctctgctggcaccagcccccccagcagcggggccagccccaaggccggccagagcaagatctctgctgtgtcccggctgctgctggccagcccccgggcccggggccccagcgccagcaccaccaagaccctgtccttcagcaccaagagcctgccccaggccgtgggccagggcagcagcagccccccaggcggcaagcacaccccctggagcacccagagcctgagcaggaacagaagcagcggcctggccagcaagctgcccctgcgggctgtgtctggccgcatcagcgagctgctgcagggcggggccggggcccggggcctgcagctgcgggccggccctgaggccgaggcccggggcggggccctggccgaggatgagcctgctgctgcccacctgctgcccagcccctacagcaagatcaccccaccccggcggccccaccgctgcagcagcggccacggcagtgacaacagctctgtgctgagcggggagctgcccccagccatgggcaagacagccctcttctaccacagcggcggcagcagcggctatgagagcgtgatgagggacagcgaggccaccggcagcgccagcagcgcccaggacagcaccagcgagaacagcagctctgtgggcggccgctgccgcagcctgaagacccccaagaagaggagcaaccctggcagccagaggcggcggctcatcccagccctgagcctggacaccagcagccctgtgaggaagccacccaacagcactggagtgcgctgggtggatggccccctgcggagcagcccccggggcctgggggagccctttgagatcaaggtgtatgaaattgatgatgtggagcggctgcagaggagaagaggaggagccagcaaggaggccatgtgcttcaatgccaagctgaagatcctggagcaccggcagcagagaattgctgaggtgcgggccaagtatgagtggctgatgaaggagctggaggccaccaagcagtacctgatgctggaccccaacaagtggctgtctgaatttgacctggagcaggtgtgggagctggacagcctggagtacctggaggccctggagtgtgtgacagagcggctggagagccgggtgaacttctgcaaggcccacctgatgatgatcacctgctttgacatcaccagcagaagaagatag

SEQ ID NO: 196192 - DNA, 6327 bp, Artificial Sequence
  derived and/or modified sequence
atgaacagcgtggccggcaacaaggagcggctggccgtgagcacccgcggcaaaaagtatggtgtgaatgaagtctgctcacctacaaagcctgcagcaccattctcaccagagagctggtacagaaaagcctacgaggaaagcagagccgggtcgcgcccaacaccagagggtgccggatccgctctcgggtcctccggtactcccagccccggctccgggacatcatctccctctagtttcaccggcagtccagggcccgcttcccccggaataggcacgtcttcccctggctctctgggaggctcgccaggcttcgggaccgggagccctggaagtgggagcggcggtggttcctctcctggctcagacaggggcgtttggtgcgagaactgtaatgctagactggtcgaactgaaacgtcaagcccttcgactgcttctgccgggcccctttccgggcaaggaccctgcgtttagcgcggtcatccatgataagcttcaggtacctaacacaattaggaaggcttggaacgaccgcgacaacaggtgcgatatctgtgccacacatcttaaccaactgaagcaagaagccatccaaatggtgctgacactggaacaagccgcggggagcgagcattacgatgctagtccttgttcacccccccctctgtcaaatatacccactctggttggcagtcgacacgtcggcggcctacaacaaccccgggactgggcattcgtgccggccccatgcgcaaccagcaactatactggctttgcgaacaaacacggctcgaaacccagctcactcggggtgtcaaatggagccgagaagaaatccgggagcccaacgcaccaggcaaaggtaagcctgcagatggccactagtccctctaatggtaacatcctgaacagcgttgccatccaggcacaccagtacctggacggcacatggtctctttcccgcaccaacggtgttaccctttacccctaccagatttcccagctgatgaccgagtcaagtcgagagggcctgacggaagcagtgttaaacaggtacaatgccgataaaccctcggcttgctccgtccccgcctcccagggcagctgcgttgcaagtgagacatcgacaggcacaagtgttgctgcttccttttttgctcgcgctgcccagaaactcaatcttagcagcaagaagaagaagcataggccgtctacatcaagtgccgccgagcccccattgttcgccacctctttcagtgggattctgcagacctcacccccccctgcccctccttgtctcctacgggccgtcaacaaagttaaggatactcctggcctgggtaaggttaaagtgatgctccgaatttgctccacactcgcccgggacacaagtgaatctagtagttttctgaaagtggacccccggaaaaaacaaatcacactgtacgatcctttaacatgtggcggccagaacgcattccagaagagaggaaatcaggttccacctaaaatgttcgcttttgatgcggtgtttccccaagacgcaagtcaggccgaagtttgcgccggtactgttgccgaagtaattcagtccgtggtgaacggggcagatggctgcgtcttctgttttggccacgcgaagttgggcaaatcctacacaatgattggcaaggacgactctatgcagaatttgggaattatcccttgcgctattagttggctcttcaagcttattaatgaacgaaaggagaagaccggtgctagattcagcgtacgcgtgtccgcagtcgaagtttggggtaaagaggagaatctgagagatctgctgtctgaagttgccaccggaagcttacaggatggacaaagccccggtgtctacctttgtgaggacccaatctgtggtactcagcttcagaatcaatccgaacttagggcaccaaccgccgaaaaagccgcattcttcttggatgcggctattgcttctcgacggagccatcagcaggactgcgacgaggacgaccaccggaactcgcacgtgtttttcacattgcacatttaccagtaccgtatggaaaagtccggcaaaggcggtatgtccggcggacggtctagattacaccttatcgatctgggcagttgtgtgaaggctctaagtaaaaaccgggaaggagggtcgggcctgtgcttatccctctctgcactgggcaacgtcattctggccttggtgaacgggtccaagcatattccctacaaggagtcaaagctggccatgctactcagagagtcccttggaaatatgaactgcagaaccactatgattgcgcacatatccgctgccgtggggtcttacgctgagacacttagtaccattcaaatcgccagtcgagtgctacgaatgaaaaaaaagaaaaccaaatacaccagctcttcgtcagggggtgagtcaagctgtgaagaggggcgcatgcgcaggcctacacagctgaggcctttccacacacgggccaccgtggatcccgacttccccatcgcccacctcagctcagacccagattattcctcatcttccgagcagtcttgtgataccgttatatacattggtccgaatgggaccgcattatcagacaaagaattaacagataacgagggtccccccgattttgtgcccattgtgcctgccctgcagaagacgcgaggagatagcagacccgctgaggccggggaagcagccgccgggaaaagcgaacgggattgtcttaagtgcaatacttttgcggagctacaagagagattggattgcattgacggttccgaagaaccctccagtttcccatttgaggagctccctgcccagttcggcccagagcaggcgagtcggggtcctcgtttatctcaggccgcaggggcctcccctctgtccgagagcgataaggaggataatgggtcagaaggccagctgacaaatcgggaaggtcccgagttgccagcctctaagatgcagcgaagtcactcccccgtacctgccgcagcacccgcccacagtccttctcccgcaagtcccagatctgttcctggcagttcaagccagcatagcgcatcacctctcgttcaaagcccctccctccagtcttcaagggagagcctgaatagttgtggttttgtggaggggaaacctagacctatggggtcccctaggctgggcatcgctagtctttccaaaacaagcgagtataagcccccttctagtcctagtcaacggtgcaaggtgtatacacaaaaaggtgttctgcctagtcccgctcctctgcccccaagttcaaaggactctggagttgcttctagggaaagccttctccagcctgaagtccgcacgccccctgtgggaatgtctccgcaggtactcaaaaagtccatgagcgctgggtctgaggggttccccgagactcccgtcgatgatgaacaacaggcagccacaccctcagagtcgaagaaggaaattctgtcaactaccatggtgaccgtgcagcagcccctcgagctcaacggtgaagacgaactggtttttactctggtggaggagctgactatctctggcgttctggactcaggacgccctacctctattatcagcttcaacagcgactgcagcgcccgcgcactggcctcaggcagccgtcccgtgtctataatttcaagcatttccgaagatctcgagtgttactccagcaccgctccagtgagcgaagtaagcattacccaattcctccccctgcctaagatgtccctcgacgagaaagctcaggatgccggaagcagaaggtcatcgattagtagttggctgtctgagatgagcgcgggctctgagggcgaacagtcctgccacagtttcatcgcccagacctgtttcggacatggggaggctatggccgagccagtggctagcgagtttgtcagttctctccaaaacacagccgtggtctgtagggagaagcccaaagcatcacccgataacctgctgattttgtccgagatgggggacgactcattcaataaggcagctcctatcaaggggtgtaaaattagtacggtgtctaaagccatggtgacaatttcaaatacggcgaacttaagttcgtgcgaaggctatatcccaatgaaaactaacatcaccgtctatccctgtatcgctatgagccccaggaacattcaggaacccgaggccccaacagccacacccaaggccggacccacattggctcagtctcgggagagtaaggagaactcagccaagaaagagatgaaatttgaagacccatggctcaagcgcgaggaggaagtgaaaaaggagaccgcccatcctaatgaggagggaatgatgagatgcgagacagcaaccggtccctctaatgcagaaaccagagccgagcaggaacaagacggtaagccctctccaggcgaccggttgtcgtcgtcctctggcgaggtaagcgcctccccggtcactgacaacttccgacgcgtggtggacggctgtgaaatggcgttgccaggcctggcaacgcagtccccagtgcaccccaataaaagtgtcaagtctagcagcctgccccgagctttccagaaagccagtcgccaggaagaaccagactcactgagttattattgcgccgctgaaaccaatggggtcggggcagcaagcggcactcccccctctaaagctacacttgagggaaaagtagcctcccctaagcattgcgtcttggcacgccccaaagggactcccccccttcctcccgtccgcaagagttcactggaccagaagaatcgtgcttctccacagcactcggcatcaggcagtgggacatcatcccccctgaatcagccggccgcttttcccgccggtctgccagatgaacccagcggtaagacaaaggatgcctcttcttcttctaagcttttttcagctaagctcgagcaactggcttcccggtccaattctctgggccgcgcaactgtgagtcactacgaatgtctttccctggagcgagcagaaagcctaagttctgtgagttccaggttgcacgccggcaaggatggcacaatgcccagggccggacggagcctgggacgcagtgcaggaaccagcccccctagttctggagcaagccctaaggcaggacagtccaagatttccgcagtttctagactgctgttggcatcgcctcgggccagaggacccagtgcatcaaccactaaaacacttagctttagtacaaaatcattgccacaggcggtcggtcaaggcagctcctcacctcccggcggtaagcataccccttggtctacccagagcctttctcgtaacaggtcaagcgggctggccagcaaactgcccctgcgagctgtaagcggccgaatatccgaactccttcaagggggggccggagcgcggggactgcaactgagggctggccccgaggccgaggcccgtgggggtgccttagccgaagatgagccagccgctgcccacttgctcccctcaccttattccaaaattacgcctcctaggaggccacatcggtgcagctctggtcacggatctgataactcaagcgtgctctcaggggagctgcctccggctatggggaagacagcacttttctaccacagtggtggcagttctggttatgagtccgtgatgcgcgactcagaggcaaccgggtccgcctcctccgcacaagatagcaccagcgaaaactcttcaagcgtgggtgggcggtgcagatcccttaagacccccaaaaagcggtcgaacccaggcagtcagagacgacggctgattcccgccttaagcctggacacaagtagcccagtaagaaaaccacctaatagcacgggggtgagatgggtggacgggcccttgagaagttcccctcggggattgggcgagccctttgaaattaaagtgtacgaaattgatgacgtagagcgcctgcaacgcaggcgtggtggcgcctctaaagaggccatgtgctttaatgccaagctgaagatcctagaacaccgacaacagaggatagcggaagtgagggctaagtacgagtggctgatgaaggagctagaggccaccaaacagtacctaatgcttgaccctaataagtggttaagcgagttcgacctagagcaggtctgggagttagattcactcgaatatctggaggctctggaatgcgtcacagaacgactagaatctcgcgttaatttttgcaaagcccatctaatgatgattacatgtttcgatataacatctcgccggcgctag

SEQ ID NO: 196193 - DNA, 6326 bp, Artificial Sequence
  derived and/or modified sequence
atgaactctgtggctggcaacaaggaacgcctggcagttagcactcgaggcaagaaatacggagtcaatgaagtttgtagtcctaccaaacccgctgcacccttctccccagagtcttggtaccggaaggcctacgaggaatcccgggctggcagtagacctaccccggagggagcaggaagtgccttgggatcttccggcaccccatcaccaggtagcggaacgagctctccttctagtttcactggaagcccaggacccgcatcgccaggcatcggcacgtcctctcctggtagcctcgggggttcccccggattcggaaccggttcacccggaagcggctccggtgggggatcctctcctggaagcgatcgaggggtgtggtgcgaaaactgcaatgcccgactcgtggagctgaagcggcaggcgctcaggctgctcctgccgggaccttttcccggaaaggatccggctttttccgccgtgatccatgataagcttcaggtcccgaacactattagaaaagcctggaatgaccgagacaacaggtgcgatatctgcgctacccatctaaaccaactgaagcaggaggcaatacagatggtgctgaccctagaacaagcagccggaagtgaacactacgatgctagcccatgcagcccccctcccctgtcgaacattcctaccctggttggaagcagacacgtaggagggctgcaacaacctcgcgattgggcctttgtgcctgcaccatgcgccacttctaactataccggatttgctaataaacacggaagcaagccttcttcacttggggtgagcaatggggcagaaaagaaaagcgggtcgccgacacatcaggccaaggtgtccctccaaatggccaccagtccttctaacggaaacattctcaactctgtcgctatccaggcacaccagtatctagacggcacatggtctctcagccggacaaacggcgtcacgctctacccgtatcagatttcccagctgatgactgagagctcccgcgaggggctgaccgaggcagtgctgaaccggtacaacgctgataaacccagcgcttgttctgtccctgcgtcacaggggagttgcgtggccagtgagaccagcacgggaaccagcgttgccgcatccttcttcgcacgcgcagcacaaaaactcaatctttccagtaagaaaaaaaagcaccgccctagcacaagtagcgccgcagaaccccctctttttgcaacaagcttcagcggtatccttcagacaagtcccccacccgcacccccatgtctgcttcgagcggtgaacaaagtgaaagacactcccggattaggcaaagtaaaggtcatgcttaggatatgttcgacgctcgctagggacaccagtgaatcttcttcttttctgaaggtcgaccctcggaaaaagcagatcaccttatatgaccctctcacatgcgggggacagaacgctttccagaagaggggaaatcaggtgccaccgaagatgttcgccttcgatgccgtgttcccacaagacgcctcacaggccgaagtgtgtgcaggtaccgtggctgaggtcatccagtcagtggtaaatggtgctgatggctgtgtgttctgctttggccacgccaaactcgggaagagctataccatgatagggaaggacgacagtatgcagaacctcgggatcatcccatgtgcgatctcatggctgttcaagcttatcaatgagcgtaaggagaagacgggagccagattttctgtccgcgtgtctgcagtcgaggtgtggggaaaggaggaaaatctcagggacttgctgtcagaggtggccacgggcagtctgcaagacgggcagtctccgggagtctacctgtgcgaggatcctatatgcggtacgcagcttcaaaaccagtccgaattacgagcccctaccgcggagaaagctgcatttttccttgacgcagccatagcatctcgcaggagccatcaacaggattgcgatgaggatgatcacaggaacagccatgtgttttttactttgcatatctaccagtatagaatggagaaaagcgggaagggcggtatgtcaggcggtcgctctcgtctgcacctcatcgacctcggctcttgcgttaaggccctgtccaagaaccgcgagggaggaagtggtctatgtctgtctttgagtgcactgggcaacgtgatccttgccctggtgaacgggagtaagcatattccatacaaagagagcaagctggcaatgcttctcagagagtccctgggtaacatgaactgtcgcaccaccatgattgcacacatatcagctgccgtgggcagctatgctgagaccttatccactatacagatagcatcaagagtactaagaatgaagaagaaaaaaaccaagtacacatcgtcttcctcgggcggagagtcttcatgcgaggagggacgaatgaggcgtcctacgcaattgcgcccatttcatactcgagccacagtggacccagatttccctattgcccacctctcatcagatccagactactcttcttcaagcgagcagtcctgcgacactgtaatttacatcgggccaaacggcactgccttgtctgataaggaactgacagataatgagggaccaccagattttgttccgatagtacctgcacttcagaaaactcggggtgatagtcgtcccgctgaggccggagaggctgcggcaggaaaatctgaacgcgactgtctgaaatgtaatacatttgcagagctccaggagaggctggactgcatcgatggctcagaggagccatccagcttcccatttgaggaactgccggctcagtttggccctgaacaagcatctaggggcccacgtctgtcccaggccgctggcgcttctccactgtcagagtccgacaaagaagataacggaagcgagggccagctaacgaacagagagggtccggaactgccagcctcgaaaatgcagagatcccacagcccagtgcccgcagccgctccagctcattccccctcccctgcctctcccaggtcagtgcccggaagctcttcccagcactcagcctcccccctggttcagagcccaagcctgcagagctcaagggaatctctcaattcatgtgggttcgtggaggggaaacccaggccaatgggcagccccagactcggcatcgcaagtttatcaaagacgtctgaatataaaccccctagctcaccgtctcaaagatgcaaggtttatacacagaaaggtgtccttccttcccccgcaccactgccaccaagttcaaaggactcgggggtcgcttctagagagagcctccttcagcccgaagtgagaactcccccagtagggatgagcccccaggttctgaagaagtcaatgtctgctggaagtgaaggattccctgagacccctgtggatgatgaacaacaagcagccactccttcagagtcaaagaaggaaatcctaagtactacgatggttacagtgcagcagcctctggaactgaatggcgaggatgaactcgtgttcaccttggtggaggaactaaccatatcaggagtgctcgattctggcaggcccaccagcatcattagtttcaactctgactgttccgccagagcactggcctccgggagccgaccagtgtcgattatctcctcaatatcagaagacctggaatgctactcatctactgcacccgtgagcgaggtatccatcacccagtttctgccactgcctaagatgtcactggatgagaaagcccaggacgcaggctccaggagatcctcaatttcttcatggctcagcgagatgtccgccggatcagaaggggaacagtcgtgccattcctttatcgcgcagacatgctttggacacggagaggctatggccgaacccgtggctagcgagtttgtgtccagcctccaaaacacggccgttgtgtgtagggagaagcccaaagctagcccagataacctgctgatcctgagtgagatgggagacgactctttcaataaggctgctccaattaaaggttgtaagatatcaaccgtaagcaaggcaatggttacaattagcaatacagctaacctgtccagctgcgaaggatatatcccgatgaagaccaatatcactgtctacccttgtatcgcaatgtcaccacgaaacattcaggaacctgaagcacctacagccaccccaaaagctgggccaactctagcccagtctcgggaatcaaaagaaaattctgcaaaaaaagagatgaagttcgaggatccctggctgaagcgggaggaagaggtaaaaaaggaaactgcccatccaaacgaggaaggcatgatgcgctgcgagaccgcgactggccctagcaatgccgagaccagggcggagcaagaacaggatggaaaacctagcccaggggatcgcctttcctccagctctggtgaagtgagtgcatcaccggtgacagacaacttccgccgtgtggtggacgggtgcgagatggctctccccggtctggcaacacagtctccagtccaccccaataaaagcgtcaaatcctcatccctcccaagagccttccagaaagcatctaggcaggaggaacccgactccctctcctactactgtgcagcagaaactaatggcgttggagccgcatccggaacgccacccagcaaggcaacgctcgagggcaaggtggctagccctaaacattgcgtcctcgccaggcccaagggtacccccccactcccgcctgttcgcaagagctcactggatcagaagaatcgcgcatcgccacagcacagcgcgtctggttccggcacatcctctcctcttaaccaacctgcagcctttcccgcaggcctcccagatgagccatctggcaagaccaaggatgcatcttcatcatccaaactgtttagtgccaagttggagcagctggcatccagatcgaattctctggggagggctactgtgtcccactacgaatgcctgtctcttgagagagccgagagcctgagttctgtaagttcaaggctacacgccggaaaggatggaactatgcctcgagccggacgcagtctcggcaggtccgctgggacatctcctccaagcagtggcgctagccccaaggccggacagtctaaaattagcgccgtctctcgtctccttctggccagcccacgggctcggggaccaagtgcttctacaactaagactttatctttttccacgaaatctctcccgcaagctgttggacaagggagtagctctccgccaggcggtaaacacaccccctggtctacccaatcactaagcaggaatcgcagctcaggtctagcatccaagctccccctccgggcagtctccggccgaatttccgaactgctgcaggggggtgcaggcgctcggggtcttcagctgcgggcaggcccagaggctgaagcgcgtgggggagcacttgctgaggacgaacccgcagctgcacatctgctgccctccccttactccaaaatcacgcctcctcgacgcccacacagatgctctagtggacatggcagtgataacagctcagtgctgtccggagagctgcccccagccatgggtaagactgccctcttctatcactccgggggaagcagcggctatgaaagtgtaatgagggatagcgaagccaccgggagcgcctctagcgctcaggactccacctcggagaactcttcaagtgtgggtgggagatgtcggagcctgaagactcccaagaagcgcagtaaccccggaagtcagaggaggcgtctcattccagccctatctctagacacgtccagtcccgttcgcaaaccaccgaattccacaggcgtgcggtgggttgacgggccactgagatcgagccctcggggactcggcgaacctttcgagatcaaggtgtacgagattgatgatgtagagcgcctccaaagacggagggggggagcatctaaggaagctatgtgcttcaatgcaaaattgaaaattctggagcatagacagcagagaatcgctgaggtgagagccaagtacgaatggctgatgaaggaactcgaagcgacaaagcagtatcttatgctggacccaaataaatggctctccgagttcgacctcgaacaggtatgggagctcgatagcttggaatatctcgaggctctagaatgtgtgaccgaacgcctggagtctcgggtgaatttctgtaaggcacacttgatgatgatcacatgtttcgacataaccagcaggcgaagata

SEQ ID NO: 196194 - DNA, 6327 bp, Artificial Sequence
  derived and/or modified sequence
atgaacagcgtggccggcaacaaggagagactggccgtgagcaccagaggcaagaagtacggcgtgaacgaggtgtgcagccccaccaagcccgccgcccccttcagccccgagagctggtacagaaaggcctacgaggagagcagagccggcagcagacccacccccgagggcgccggcagcgccctgggcagcagcggcacccccagccccggcagcggcaccagcagccccagcagcttcaccggcagccccggccccgccagccccggcatcggcaccagcagccccggcagcctgggcggcagccccggcttcggcaccggcagccccggcagcggcagcggcggcggcagcagccccggcagcgacagaggcgtgtggtgcgagaactgcaacgccagactggtggagctgaagagacaggccctgagactgctgctgcccggccccttccccggcaaggaccccgccttcagcgccgtgatccacgacaagctgcaggtgcccaacaccatcagaaaggcctggaacgacagagacaacagatgcgacatctgcgccacccacctgaaccagctgaagcaggaggccatccagatggtgctgaccctggagcaggccgccggcagcgagcactacgacgccagcccctgcagccccccccccctgagcaacatccccaccctggtgggcagcagacacgtgggcggcctgcagcagcccagagactgggccttcgtgcccgccccctgcgccaccagcaactacaccggcttcgccaacaagcacggcagcaagcccagcagcctgggcgtgagcaacggcgccgagaagaagagcggcagccccacccaccaggccaaggtgagcctgcagatggccaccagccccagcaacggcaacatcctgaacagcgtggccatccaggcccaccagtacctggacggcacctggagcctgagcagaaccaacggcgtgaccctgtacccctaccagatcagccagctgatgaccgagagcagcagagagggcctgaccgaggccgtgctgaacagatacaacgccgacaagcccagcgcctgcagcgtgcccgccagccagggcagctgcgtggccagcgagaccagcaccggcaccagcgtggccgccagcttcttcgccagagccgcccagaagctgaacctgagcagcaagaagaagaagcacagacccagcaccagcagcgccgccgagccccccctgttcgccaccagcttcagcggcatcctgcagaccagccccccccccgcccccccctgcctgctgagagccgtgaacaaggtgaaggacacccccggcctgggcaaggtgaaggtgatgctgagaatctgcagcaccctggccagagacaccagcgagagcagcagcttcctgaaggtggaccccagaaagaagcagatcaccctgtacgaccccctgacctgcggcggccagaacgccttccagaagagaggcaaccaggtgccccccaagatgttcgccttcgacgccgtgttcccccaggacgccagccaggccgaggtgtgcgccggcaccgtggccgaggtgatccagagcgtggtgaacggcgccgacggctgcgtgttctgcttcggccacgccaagctgggcaagagctacaccatgatcggcaaggacgacagcatgcagaacctgggcatcatcccctgcgccatcagctggctgttcaagctgatcaacgagagaaaggagaagaccggcgccagattcagcgtgagagtgagcgccgtggaggtgtggggcaaggaggagaacctgagagacctgctgagcgaggtggccaccggcagcctgcaggacggccagagccccggcgtgtacctgtgcgaggaccccatctgcggcacccagctgcagaaccagagcgagctgagagcccccaccgccgagaaggccgccttcttcctggacgccgccatcgccagcagaagaagccaccagcaggactgcgacgaggacgaccacagaaacagccacgtgttcttcaccctgcacatctaccagtacagaatggagaagagcggcaagggcggcatgagcggcggcagaagcagactgcacctgatcgacctgggcagctgcgtgaaggccctgagcaagaacagagagggcggcagcggcctgtgcctgagcctgagcgccctgggcaacgtgatcctggccctggtgaacggcagcaagcacatcccctacaaggagagcaagctggccatgctgctgagagagagcctgggcaacatgaactgcagaaccaccatgatcgcccacatcagcgccgccgtgggcagctacgccgagaccctgagcaccatccagatcgccagcagagtgctgagaatgaagaagaagaagaccaagtacaccagcagcagcagcggcggcgagagcagctgcgaggagggcagaatgagaagacccacccagctgagacccttccacaccagagccaccgtggaccccgacttccccatcgcccacctgagcagcgaccccgactacagcagcagcagcgagcagagctgcgacaccgtgatctacatcggccccaacggcaccgccctgagcgacaaggagctgaccgacaacgagggcccccccgacttcgtgcccatcgtgcccgccctgcagaagaccagaggcgacagcagacccgccgaggccggcgaggccgccgccggcaagagcgagagagactgcctgaagtgcaacaccttcgccgagctgcaggagagactggactgcatcgacggcagcgaggagcccagcagcttccccttcgaggagctgcccgcccagttcggccccgagcaggccagcagaggccccagactgagccaggccgccggcgccagccccctgagcgagagcgacaaggaggacaacggcagcgagggccagctgaccaacagagagggccccgagctgcccgccagcaagatgcagagaagccacagccccgtgcccgccgccgcccccgcccacagccccagccccgccagccccagaagcgtgcccggcagcagcagccagcacagcgccagccccctggtgcagagccccagcctgcagagcagcagagagagcctgaacagctgcggcttcgtggagggcaagcccagacccatgggcagccccagactgggcatcgccagcctgagcaagaccagcgagtacaagccccccagcagccccagccagagatgcaaggtgtacacccagaagggcgtgctgcccagccccgcccccctgccccccagcagcaaggacagcggcgtggccagcagagagagcctgctgcagcccgaggtgagaaccccccccgtgggcatgagcccccaggtgctgaagaagagcatgagcgccggcagcgagggcttccccgagacccccgtggacgacgagcagcaggccgccacccccagcgagagcaagaaggagatcctgagcaccaccatggtgaccgtgcagcagcccctggagctgaacggcgaggacgagctggtgttcaccctggtggaggagctgaccatcagcggcgtgctggacagcggcagacccaccagcatcatcagcttcaacagcgactgcagcgccagagccctggccagcggcagcagacccgtgagcatcatcagcagcatcagcgaggacctggagtgctacagcagcaccgcccccgtgagcgaggtgagcatcacccagttcctgcccctgcccaagatgagcctggacgagaaggcccaggacgccggcagcagaagaagcagcatcagcagctggctgagcgagatgagcgccggcagcgagggcgagcagagctgccacagcttcatcgcccagacctgcttcggccacggcgaggccatggccgagcccgtggccagcgagttcgtgagcagcctgcagaacaccgccgtggtgtgcagagagaagcccaaggccagccccgacaacctgctgatcctgagcgagatgggcgacgacagcttcaacaaggccgcccccatcaagggctgcaagatcagcaccgtgagcaaggccatggtgaccatcagcaacaccgccaacctgagcagctgcgagggctacatccccatgaagaccaacatcaccgtgtacccctgcatcgccatgagccccagaaacatccaggagcccgaggcccccaccgccacccccaaggccggccccaccctggcccagagcagagagagcaaggagaacagcgccaagaaggagatgaagttcgaggacccctggctgaagagagaggaggaggtgaagaaggagaccgcccaccccaacgaggagggcatgatgagatgcgagaccgccaccggccccagcaacgccgagaccagagccgagcaggagcaggacggcaagcccagccccggcgacagactgagcagcagcagcggcgaggtgagcgccagccccgtgaccgacaacttcagaagagtggtggacggctgcgagatggccctgcccggcctggccacccagagccccgtgcaccccaacaagagcgtgaagagcagcagcctgcccagagccttccagaaggccagcagacaggaggagcccgacagcctgagctactactgcgccgccgagaccaacggcgtgggcgccgccagcggcaccccccccagcaaggccaccctggagggcaaggtggccagccccaagcactgcgtgctggccagacccaagggcaccccccccctgccccccgtgagaaagagcagcctggaccagaagaacagagccagcccccagcacagcgccagcggcagcggcaccagcagccccctgaaccagcccgccgccttccccgccggcctgcccgacgagcccagcggcaagaccaaggacgccagcagcagcagcaagctgttcagcgccaagctggagcagctggccagcagaagcaacagcctgggcagagccaccgtgagccactacgagtgcctgagcctggagagagccgagagcctgagcagcgtgagcagcagactgcacgccggcaaggacggcaccatgcccagagccggcagaagcctgggcagaagcgccggcaccagcccccccagcagcggcgccagccccaaggccggccagagcaagatcagcgccgtgagcagactgctgctggccagccccagagccagaggccccagcgccagcaccaccaagaccctgagcttcagcaccaagagcctgccccaggccgtgggccagggcagcagcagcccccccggcggcaagcacaccccctggagcacccagagcctgagcagaaacagaagcagcggcctggccagcaagctgcccctgagagccgtgagcggcagaatcagcgagctgctgcagggcggcgccggcgccagaggcctgcagctgagagccggccccgaggccgaggccagaggcggcgccctggccgaggacgagcccgccgccgcccacctgctgcccagcccctacagcaagatcaccccccccagaagaccccacagatgcagcagcggccacggcagcgacaacagcagcgtgctgagcggcgagctgccccccgccatgggcaagaccgccctgttctaccacagcggcggcagcagcggctacgagagcgtgatgagagacagcgaggccaccggcagcgccagcagcgcccaggacagcaccagcgagaacagcagcagcgtgggcggcagatgcagaagcctgaagacccccaagaagagaagcaaccccggcagccagagaagaagactgatccccgccctgagcctggacaccagcagccccgtgagaaagccccccaacagcaccggcgtgagatgggtggacggccccctgagaagcagccccagaggcctgggcgagcccttcgagatcaaggtgtacgagatcgacgacgtggagagactgcagagaagaagaggcggcgccagcaaggaggccatgtgcttcaacgccaagctgaagatcctggagcacagacagcagagaatcgccgaggtgagagccaagtacgagtggctgatgaaggagctggaggccaccaagcagtacctgatgctggaccccaacaagtggctgagcgagttcgacctggagcaggtgtgggagctggacagcctggagtacctggaggccctggagtgcgtgaccgagagactggagagcagagtgaacttctgcaaggcccacctgatgatgatcacctgcttcgacatcaccagcagaagaagatag

SEQ ID NO: 196195 - protein, 873 aa, Artificial Sequence
  derived and/or modified sequence
MAEMEKEGRPPENKRSRKPAHPVKREINEEMKNFAENTMNELLGWYGYDKVELKDGEDIEFRSYPTDGESRQHISVLKENSLPKPKLPEDSVISPYNISTGYSGLATGNGLSDSPAGSKDHGSVPIIVPLIPPPFIKPPAEDDVSNVQIMCAWCQKVGIKRYSLSMGSEVKSFCSEKCFAACRRAYFKRNKARDEDGHAENFPQQHYAKETPRLAFKNNCELLVCDWCKHIRHTKEYLDFGDGERRLQFCSAKCLNQYKMDIFYKETQANLPAGLCSTLHPPMENKAEGTGVQLLTPDSWNIPLTDARRKAPSPVATAGQSQGPGPSASTTVSPSDTANCSVTKIPTPVPKSIPISETPNIPPVSVQPPASIGPPLGVPPRSPPMVMTNRGPVPLPIFMEQQIMQQIRPPFIRGPPHHASNPNSPLSNPMLPGIGPPPGGPRNLGPTSSPMHRPMLSPHIHPPSTPTMPGNPPGLLPPPPPGAPLPSLPFPPVSMMPNGPMPVPQMMNFGLPSLAPLVPPPTLLVPYPVIVPLPVPIPIPIPIPHVSDSKPPNGFSSNGENFIPNAPGDSAAAGGKPSGHSLSPRDSKQGSSKSADSPPGCSGQALSLAPTPAEHGRSEVVDLTRRAGSPPGPPGAGGQLGFPGVLQGPQDGVIDLTVGHRARLHNVIHRALHAHVKAEREPSAAERRTCGGCRDGHCSPPAAGDPGPGAPAGPEAAAACNVIVNGTRGAAAEGAKSAEPPPEQPPPPPPPAPPKKLLSPEEPAVSELESVKENNCASNCHLDGEAAKKLMGEEALAGGDKSDPNLNNPADEDHAYALRMLPKTGCVIQPVPKPAEKAAMAPCIISSPMLSAGPEDLEPPLKRRCLRIRNQNK

SEQ ID NO: 196196 - DNA, 2622 bp, Artificial Sequence
  derived and/or modified sequence
atggccgaaatggagaaggaaggacgtcccccggagaacaagaggagcaggaaaccggcccaccccgtgaagcgagagatcaacgaagagatgaaaaactttgcagagaataccatgaacgagttgcttggctggtatggctatgacaaagtcgaactgaaagacggagaggatatcgagttcaggtcttaccctacagatggcgagtcgaggcaacacatcagtgtgctgaaggaaaatagcctgccaaaaccaaaattgcctgaggacagtgtcatttctccctataatatcagcaccggctactctgggctggctactgggaacgggttgagtgattccccagcgggctccaaggaccacgggtcagttccaattatcgtgccgttgatcccccctccctttattaagcctcctgccgaagacgatgtgtccaatgtgcagataatgtgtgcatggtgtcagaaggtggggatcaagaggtacagtctgtcaatgggcagtgaggtcaagtccttttgctctgagaagtgttttgccgcgtgccgtcgggcgtattttaagagaaacaaagctagagacgaggacggtcatgccgagaatttccctcagcaacattatgcgaaagaaaccccgcgtctggcctttaaaaacaactgtgagctgctggtgtgcgattggtgcaagcacattcggcacacaaaggaatacctggacttcggcgacggcgaacgtagactgcaattttgctctgccaagtgtttgaatcagtacaagatggacatcttttacaaggagacacaggcaaacctgcccgcaggcctatgctccacgcttcaccccccaatggagaacaaagccgaaggcaccggcgtacagctgctcactcccgactcctggaatatcccgctgaccgatgccaggcggaaagcccctagtcccgtcgctaccgccgggcaatctcaggggccaggtccaagtgcaagcaccacagtgagtccaagtgatacagctaactgctctgttactaagataccaacccccgtgcctaagagcattccaatctccgagactcccaacatcccgcccgtatccgtgcagccacctgcctccattgggccccccctgggcgtaccaccccgaagccctccaatggtaatgaccaatcgaggtccagttcctctgccaatcttcatggaacagcagattatgcagcagatccgacccccatttattcgaggaccaccgcaccacgcttctaatcctaacagccccctgtccaatcctatgttgccgggcatcgggccgcctcccggcgggccacggaacttagggccgacatcaagtcccatgcaccggccaatgttgtctccacacatccatcctccctccaccccaactatgcccggcaatcccccgggactgcttccaccccccccacctggcgctcccttgcccagcctgccttttcctccggtctctatgatgccaaacggacccatgcccgttcctcagatgatgaatttcggactgcctagcttagcacctctcgttccacctccaacgctgctagttccgtacccagtgatcgtgcccctcccagtgcctatccctattcccatccctatcccccatgtttctgacagtaaaccccctaatgggttctcctccaatggcgagaattttatcccaaacgcccctggggacagcgccgcagccggtggtaaaccaagcggtcattccctttctcctcgagatagcaagcaaggctcctctaaatccgctgatagtccaccaggctgcagcgggcaggccctgtctcttgctcccaccccagctgagcacggtaggtcagaagtggtcgatcttacccgccgcgcgggttcccctccaggacccccgggtgccgggggccaactggggttccccggcgtccttcaggggcctcaggatggcgtgattgatctaacagtcggccaccgggcgagactgcacaacgtcatccatagggcactgcatgctcacgtgaaggcagaacgtgaaccctctgctgccgaacgaaggacatgcggcggctgtcgcgatggccactgttccccacccgcggccggcgaccctggcccgggcgctccagcaggtccagaggccgctgcagcgtgtaacgtaatcgttaacggcactagaggcgcagcagcagagggcgctaaaagtgccgagcctccccccgaacagccccccccaccacccccccccgccccccctaaaaaactgctgtcaccagaggagccggctgttagtgaactcgaaagcgtgaaggagaataattgcgcctctaactgccacctcgatggtgaagccgccaagaagctgatgggcgaggaggcgctcgcaggcggtgacaagtcggatcccaacttaaacaaccctgccgacgaagatcacgcttacgcactgcgaatgctccctaagactggctgtgtcattcagcctgtccccaagccagctgagaaggccgccatggccccatgtattatttcttccccgatgttgagtgcaggcccagaggatctggagccaccacttaagaggaggtgccttcggatacgcaatcagaacaaatag

SEQ ID NO: 196197 - DNA, 2622 bp, Artificial Sequence
  derived and/or modified sequence
atggccgagatggagaaggagggccggcccccagagaacaagaggagcaggaagccagcccaccctgtgaagcgggagatcaatgaggagatgaagaactttgctgagaacaccatgaatgagctgctgggctggtacggctatgacaaggtggagctgaaggatggagaagatattgagttccgcagctaccccacagatggagagagccggcagcacatctctgtgctgaaggagaacagcctgcccaagcccaagctgcctgaagattctgtcatcagcccctacaacatcagcacaggctacagcggcctggccactggaaatggcctgagtgacagccctgctggcagcaaggaccacggctctgtgcccatcatcgtgcccctcatccccccacccttcatcaagcccccagcagaagatgatgtgtccaatgtgcagatcatgtgtgcctggtgccagaaggtgggcatcaagcgctacagcctgtccatgggcagcgaggtgaagagcttctgcagcgagaagtgctttgctgcctgcagaagagcctacttcaagaggaacaaggccagagatgaagatggccatgctgagaacttcccccagcagcactacgccaaggagaccccccggctggccttcaagaacaactgtgagctgctggtgtgtgactggtgcaagcacatccgccacaccaaggagtacctggactttggagatggagagcggcggctgcagttctgcagcgccaagtgcctgaaccagtacaagatggacatcttctacaaggagacccaggccaacctgcctgctggcctgtgcagcaccctgcacccccccatggagaacaaggccgagggcaccggggtgcagctgctgaccccagacagctggaacatccccctgacagatgcccggaggaaggcccccagccctgtggccacagctggccagagccagggccctggccccagcgccagcaccaccgtgagccccagcgacacagccaactgcagcgtgaccaagatccccacccctgtgcccaagagcatccccatcagcgagacccccaacatcccccctgtgtctgtgcagcccccagccagcatcggcccccccctgggcgtgcccccaagaagcccccccatggtgatgaccaacagaggccctgtgcccctgcccatcttcatggagcagcagatcatgcagcagatccggccccccttcatccggggccccccccaccacgccagcaaccccaacagccccctgagcaaccccatgctgcccggcatcggccccccacctgggggccccaggaacctgggccccaccagcagccccatgcaccggcccatgctgagcccccacatccacccccccagcacccccaccatgcctggcaaccccccaggcctgctgcccccacctcctcctggggcccccctgcccagcctgcccttcccccctgtgtccatgatgcccaacggccccatgcctgtgccccagatgatgaactttggcctgcccagcctggcccccctggtgcccccacccaccctgctggtgccctaccctgtgattgtgcccctgcctgtgcccatccccatccccatccccatcccccacgtgtctgacagcaagcccccaaatggcttcagcagcaatggagagaacttcatccccaatgcccctggggacagcgctgctgctgggggcaagcccagcggccacagcctgagcccccgggacagcaagcagggcagcagcaagtctgctgacagccccccaggctgcagcggccaggccctgagcctggcccccaccccagctgagcacggccgctctgaggtggtggacctgaccaggagagctggcagccccccaggccccccaggggccggcggccagctgggcttccctggggtgctgcagggcccccaggatggagtcatcgacctgactgtgggccaccgggcccggctgcacaacgtcatccaccgggccctgcacgcccacgtgaaggccgagcgggagcccagcgctgctgagaggaggacctgtggcggctgcagagatggccactgcagccccccagctgctggggaccccggccctggggccccagctggccctgaggccgccgccgcctgcaatgtgattgtgaatggcaccagaggagctgctgctgagggcgccaagtctgctgagcccccacctgagcagcccccacctcctcctcctccagccccacccaagaagctgctgagccctgaggagcctgctgtgtctgagctggagagcgtgaaggagaacaactgtgccagcaactgccacctggatggagaggccgccaagaagctgatgggagaggaggccctggccggcggggacaagagtgaccccaacctgaacaacccagcagatgaggaccacgcctatgccctgaggatgctgcccaagacaggctgcgtcatccagcctgtgcccaagccagctgagaaggccgccatggccccctgcatcatcagcagccccatgctgtctgctggccctgaggacctggagccccccctgaagaggcgctgcctgcgcatccggaaccagaacaagtag

SEQ ID NO: 196198 - DNA, 2622 bp, Artificial Sequence
  derived and/or modified sequence
atggccgagatggagaaggagggccggccccccgagaacaagcggagcaggaagcctgcccatccggtgaaaagagagataaacgaggagatgaagaacttcgcagagaacacaatgaatgagctgcttggatggtatggctatgacaaggtggaattaaaggacggggaagacatcgaatttcgatcgtatccaaccgacggcgagtcaagacagcacatctccgtgttgaaagagaactcattgcctaagcctaagctgcccgaagactccgtaattagcccatacaatatctcaacaggctacagtggactggctacgggaaatggtctgagtgacagccctgcgggttccaaggatcatggctctgtgccaatcattgtgcctcttatcccaccaccctttatcaagcctcctgcggaggacgatgtttcaaacgtccaaattatgtgcgcttggtgtcaaaaggtgggtatcaagcgctatagcctgagtatgggctccgaagttaagtcgttttgttcagaaaagtgtttcgctgcttgccggagagcctacttcaaacggaacaaagcccgcgacgaggatgggcatgccgaaaattttccacaacaacattacgcgaaagagacaccaaggctagccttcaaaaataactgtgaactcctggtgtgcgactggtgtaagcatattagacacacaaaagagtacttagacttcggagacggtgagcgtcgcctccaattttgcagtgccaagtgcctgaaccagtacaagatggatattttctacaaagaaacccaagctaatctcccagccgggttgtgtagtaccctgcacccacccatggagaacaaggcagagggtacaggcgtgcaacttctgactccagacagctggaatatccctctgaccgatgctaggcggaaagcacccagccccgtcgctacagccggacagtcccagggccccggaccctccgcttccaccactgttagtccgagcgatactgcaaattgctcggtaacaaagataccgacacccgtgcctaagagcataccaatctctgagactcccaatattccacctgtgagcgttcagccacccgcctccataggtccccccctgggtgtgccaccacggtcccctccaatggtgatgaccaatcgaggaccagtgccgctccccatattcatggaacagcaaattatgcagcagattcgccccccctttatccgcgggccgccccatcatgcaagcaaccccaattctcctctgtctaacccaatgttgccgggaattggcccgccccctggaggcccgcggaacctgggccctacaagctctccaatgcatcgccctatgttatctccgcatattcaccccccgagcactcccaccatgcccggaaaccctcccggcctcttaccgcctcctcctccaggcgcacctctgcctagccttcccttcccacccgtgtcaatgatgcccaatggcccaatgccagttcctcaaatgatgaattttggcctaccctccctggctccgctagtgcctcccccgaccctccttgttccatatcccgtaattgtaccactgcctgtccctatccctatccctattcccattccacatgtgtccgactccaaaccaccaaatggtttcagctctaacggcgagaactttattccaaacgcacccggggatagcgccgccgccggcgggaagccgtccggacattccctgagcccccgggatagcaagcagggctcgtctaagtctgccgatagtcccccaggctgctccggtcaagcattatctctggctcccacgccagctgagcacggcaggtctgaagtggtggatcttacccgccgcgcagggtccccgccgggacctcccggcgcaggtggacaattaggcttccctggtgtgctgcaaggcccacaagacggggtcatcgatcttacagtgggtcatagagccaggttgcataatgttattcaccgcgctctccatgcgcatgttaaggccgaacgagagccatccgcagcagagagacgtacctgcggtggctgccgcgatggacattgtagccctcccgccgccggagaccccggtccaggagccccagctggcccggaggctgccgcagcctgcaacgtaatcgtaaatggaacccgcggggccgcagctgagggagcaaaatcagccgagcccccgcccgaacaacctcccccaccaccacctccggccccccctaagaagttgctgtcaccagaggagcccgccgtgtcagaactagaaagcgtcaaagagaacaattgtgcgtcgaactgtcacctcgatggggaggccgccaaaaagctgatgggagaggaggctcttgcaggcggagataagtccgacccaaatcttaataaccctgccgacgaagatcacgcctatgccctaagaatgctgcctaagacagggtgtgtgattcaacctgtgccaaaacctgcagagaaggctgccatggctccctgtatcatttcttcgccaatgctctctgccggtccagaggatctcgagcctcccctgaaacgccgatgcctgcgcattagaaatcagaacaaatag

SEQ ID NO: 196199 - DNA, 2622 bp, Artificial Sequence
  derived and/or modified sequence
atggccgaaatggagaaggagggacggccaccagagaataaacgatcacgtaaacccgctcacccggtcaagagagagattaacgaggagatgaagaactttgctgagaacacaatgaatgaattactcggatggtacggttatgacaaagtggagctgaaagatggagaagatattgagtttagatcataccccaccgatggagaatccaggcagcatatcagtgttctgaaggagaactcactgccgaaacctaagctgcctgaagactctgtcatttccccatataacattagcaccggatattcagggctagcgactggaaatggcctttcggattctcccgctgggtccaaggatcacggcagcgtgcctattatcgttccgctgattccgcctcctttcataaaacctcccgcagaagacgatgtgtctaatgttcagattatgtgtgcgtggtgccagaaggtgggtattaagagatattccctctccatgggaagcgaagtgaagagtttctgtagcgagaaatgtttcgccgcatgccgtagggcctacttcaagcgaaataaggccagggacgaggacgggcacgccgagaatttccctcagcaacactacgccaaggaaactccacggctagctttcaagaacaactgcgagctgctggtgtgcgattggtgcaagcacatacgccacactaaagaatatctggattttggggatggggagcggaggttacaattctgtagcgccaagtgcttgaatcagtacaaaatggatattttctataaagaaacacaagccaacctgcccgcaggcttgtgctcgaccttgcatcctcccatggaaaataaggccgagggcaccggcgtccagctgctgactccagactcatggaatatccccctcactgatgctaggcggaaagcaccttctccagtcgctacggcagggcagtcgcagggacctggcccttctgcctcaactacagtatcccctagcgacaccgctaactgtagtgtcaccaaaatacccacacccgttccgaaaagtatccctatatcagaaacccctaatatcccaccggtgagtgttcagcccccagccagcattggcccaccactcggggtgccccctagatctccccctatggttatgaccaatcgcggtccagtgcccctgcccatctttatggaacaacagatcatgcagcagataaggcccccattcattagagggcctccccatcacgcatccaatcctaatagccccttgtccaacccaatgctgccaggcattgggcctccgcctgggggtcctagaaacctcgggcctacatctagcccaatgcatagacccatgctcagtccccacattcacccaccaagcacgcccacaatgcctggtaacccccctggtctgttgccaccaccaccacccggagccccactgccctccctcccgtttccgccagtcagcatgatgcctaatgggccaatgcccgtgcctcagatgatgaattttgggttaccctctcttgctcctctcgtcccgccacccacccttctggtcccttatccggtcatagtgcctctaccggtgccgatacctataccaatcccaatcccacatgtctcagattcaaagccccctaatggatttagcagtaatggggaaaacttcatcccgaatgcccctggggattctgccgctgctggcggaaagccttccgggcactctctgtctcctcgggacagcaaacaagggtcatcgaaaagtgcagatagcccaccaggctgtagcggacaggccttatcactggcacccacccctgccgaacatggcaggtccgaagtggttgatttgaccagacgggcaggcagcccgccaggccctcctggtgctggcggacagttgggattccctggggttctgcagggacctcaggatggcgtgatcgaccttactgttggccacagggccaggctgcacaatgtgatccaccgcgctctccacgcccacgtaaaagccgagcgggaacctagtgccgctgagcggcgaacctgtgggggatgcagggatggtcactgcagtcctcccgcagccggtgatcctggcccaggagctccagcagggccagaagcagctgcggcatgcaatgtgatagtgaatggaactagaggcgctgcagctgagggagcgaagagtgcagagcctcctcccgagcagcctccacccccaccccctccagccccacccaaaaaactactgagccccgaggaacccgcagtgtctgagttggagagcgttaaagagaacaattgtgcctccaactgtcacctggatggagaagcagctaagaaattgatgggggaagaggccctggcaggcggtgacaagtcagatccgaacctaaataacccagccgatgaagaccacgcttatgctttgcggatgcttcctaagacaggatgtgtaatccaaccagtgccaaagcctgccgagaaagctgcaatggccccatgcataatctctagccccatgctgagtgcagggcctgaagacctggagcctccactgaagcggaggtgtttaaggattcgaaatcagaacaaatag

SEQ ID NO: 196200 - DNA, 5231 bp, Artificial Sequence
  derived and/or modified sequence
agccacgcccgctcgagagccggggggctgtcctcgccccccccacctttcccctccctccgaccccctcccggccgcgctccctcccctcctcccgcgccggcccccggcccgcccccggctcggctcgcgggaggcgctgggcgccggggctggcgcgctctcccgggctcacacacagccgcgcacgcacgcccggggccgctctccgcgccggcccttgctccccgcgcccatgcggacggaccgagcgacggaagatggctgacgactccacggggccccgaggatgcggcccggcggcggcggcggcgggagcggcagcggcagcgagggcggcaggggcagcggcagcagcggcggcgttggctgcggcggcggcggcggcggcagcaggagccggagcgacggcggcggcatccccgagactctccgcactatccttacccgtgacagccactgacgtcctccgccgctagaagagaccccgcttctcggcgcctgccctccccctcgcggctcggtccggccccgccagcaccgctacctccgccagcctcgccaccatcagcaccacctccaccgccgccgccgccgccaccaccaccgccggcggcggcagcagccatttcatctccacagaaaccagacacaaaaacatggcagaaatggagaaagaagggagacctcccgaaaataaacggagcaggaagccggctcacccagtgaaaagggagatcaatgaggagatgaagaactttgcagaaaacaccatgaatgaactccttggctggtatggctatgataaggttgaattaaaagatggtgaggatattgaattcaggagctaccctacagatggggagagccggcagcacatttctgttctcaaagaaaattctttgccaaaaccaaaattacccgaggacagtgttatttcaccatacaatataagcacaggctattcagggcttgccactggaaatggactcagtgactcacctgcagggtcaaaggatcatggcagtgtgcccattattgtacctttaattccaccacctttcataaagccaccagcagaagatgatgtgtcaaatgtacaaataatgtgtgcctggtgccagaaagtgggaatcaagcgctattccctgagtatgggaagtgaggtgaaaagcttctgcagcgagaagtgctttgcggcctgccgacgagcctacttcaagagaaataaggctagagatgaagatggacatgctgaaaattttccccagcagcactatgctaaggaaactccaaggcttgccttcaagaataactgcgaactacttgtatgtgactggtgtaagcacataagacacacaaaagaatacctggattttggggacggggaaagaaggcttcagttctgcagtgcaaaatgtctcaatcaatacaaaatggacattttctacaaagagacccaggccaatcttccagctgggctgtgcagcacattacaccctcccatggaaaataaagcagaaggcaccggggtgcagctgctcactccagactcttggaatatcccgctaacagatgctcggaggaaggccccctccccggtggctacagctggccaaagccagggccctggcccgtcggcgtccaccaccgtctctccatctgacactgccaactgctctgtcactaaaatccccacgccagtgcccaagtccatccccatcagcgagactccaaatatccctcctgtctccgtccagccacctgctagcatcgggcctccccttggcgtcccgcctcggagccctcccatggtgatgaccaaccgcggcccggtgccgctgcccatcttcatggagcagcagatcatgcagcagatccgcccgcccttcatccgcgggcctccgcaccatgcctccaaccccaacagccccctgtccaaccccatgcttcccggcatcgggcccccgcccggtggccccagaaacctgggccccacttccagccccatgcaccggcccatgctatcgccccacatccaccccccgagcacccccaccatgcccgggaaccccccaggcctgctgcccccgccgcctccgggcgccccgctgccgagtcttcccttcccgccagtgagcatgatgccaaatggcccgatgccggtgccccagatgatgaatttcgggctgccgtcgcttgccccgctggtgccgcccccgaccctgctcgtgccgtaccccgtgatcgtgcccctaccggtgcccatccccatccccatccctatccctcacgtcagcgactccaagccccccaacgggttctccagcaacggggagaacttcattccgaacgcccctggcgactccgcggcggcgggcggcaagccaagcggacactccctgtccccccgggactccaagcagggctcgtccaagtccgcggactcgccccccggctgctcgggccaggccctgagcctggcgcccacgcccgccgagcatggccggagcgaggtggtggacctgacgcggcgcgccggcagccccccgggccccccgggcgcgggcggccagctcggcttcccaggcgtgctgcagggcccgcaggacggcgtcatcgacctgaccgtgggccaccgagcccggctgcacaacgtgatccaccgcgcgctgcacgcgcacgtcaaggcggagcgcgagccgagcgccgcggagcgcaggacctgcggcggctgcagggacggccactgcagcccgcccgccgccggcgacccaggcccgggcgccccggcgggccccgaggcggccgcggcctgcaacgtcatcgtgaacggcacgcgcggcgccgccgccgagggcgctaagagcgcggagccgcctcccgagcagccgccgccgccgccgccgcccgcgccccccaagaagctgctgtcgcctgaggaaccggcggtgagcgagctagagtcggtcaaggagaataactgtgcttccaactgccacctggacggggaggcggccaaaaagctgatgggcgaggaggccctggcggggggcgacaagtcagacccgaaccttaataaccccgcggacgaggaccatgcctatgctctgcggatgctgcccaagaccggctgcgtgatccagcctgtgccaaaacccgcggagaaggctgccatggcaccgtgcatcatctcctcgcccatgctcagcgccgggcctgaggacctggagccgccgctcaaaaggaggtgcctccgaattagaaatcagaataagtaaaaggaacgttcactcacagggtacgctcatggagagagggcgcagagcaaaccatgtcacgccatccaatgacaccagctggtcagctcaccaccccctctggctaaaactcaagcaaataaagccgcttcctgtcattaagcatctcagaggaagcagccctccctcgatggcctctagcccagagaagcccgcgcatcttggacccaccaagcaggcccagccttcctgctgccaccatctctgcttctccccagaggaacttagggatttcacccctggcttttaaaaaaaacgaaataccgacaagccacaaggaccaatgtaggtattctccccgccccatcttcaaggctcagcgactgaggctggaagatgatatggattggaacacaaaaaatctttttttaatctttttaaaaactgctgtggttttgctgctacactaagaattgtgatttgcattgtacggttttggacctatattgttcacgttttgatggcggagaggggtggtcctggaggcccaatgcttcagagtcatctctgtcctgcccgggatgcacttttaaatgaagagttagaatattttattggctaatatacttttcttgttatttttacaaaggccacctttatcctttttgatgccatattttcagtgttacacttttatggcttttaattttcgatttgacagatgtaagaagcagcatgaatagtttatactgtggtttttcagagactgaatgccaagagaactcggtaaatgtttattcttctcagctttctctttaaattcccctaaatagcgccccatttgggaacagagcaagagtgttgaactgaagaccaaaatgccctcaaggtgtaaaataatccgagggggaatatttgctgggcgtcaggaaagactcagatgaaatttcaaccctgatggttttcggtgatccaggaagtcagtgagacaatctctctatatgcagagccctttcatgataattagaatggtatggacaaaccaatgaaaacaagagggaaagtgagaaagatcacccatgattctgtttcactgtttgctttctcctgtcatggttaagagaaatgtgcaattcgatcctcaatcagtgggtggaggataacagggtagattcacttgtgtgcacttgtacagttgtagctgcgagtccagaagtcctctagagcatgtgtactggcactgagttggtgagacagttgtggagtatcccattctgatgagtacagaaaaaaaaagaaaaagaaaagaagagaaaaaattaagaaaaaaatcaaaaaaggaagaaaactaaaaaaaaaaaaaatcaaatcaccttgtgattcagtgtatctgtttactaactcaaataaagcaattgttccctctggaggggtccaggtgcccccgccccacaaggccgcggagcctcagcaggaggggtggcgagttgcgggtgggcagggccaggacggtgtggcgccagccttgaagcaccacggcccaaggatgcggtgtacatactgtatttctagattctcctttgtacagagtcacttcacaagtcaagctactgttttacaggtgctccttatttattagagctgtgagagcttgggggacacacctggcgagcaagctcgctttttaaaaatgaaatttgggggcaggggaaggggaggcgggagggaggggaagctcgcaagcccggggagagatttataaaagtaaacaaaagaaaaccttccagcaacaaattaaaaaataataacaaatcaaccccagcaccaaacccacccaggcaggaagaagccgcccctcctctggggccatatttttctgctgggtcacaacattctcctctccctgactggtgtcagattcatcaaacaaaaaataaatctcgaagaaaaaaaatgcacttacatgtgctt

SEQ ID NO: 196201 - DNA, 2622 bp, Artificial Sequence
  derived and/or modified sequence
atggccgagatggagaaggagggcagaccccccgagaacaagagaagcagaaagcccgcccaccccgtgaagagagagatcaacgaggagatgaagaacttcgccgagaacaccatgaacgagctgctgggctggtacggctacgacaaggtggagctgaaggacggcgaggacatcgagttcagaagctaccccaccgacggcgagagcagacagcacatcagcgtgctgaaggagaacagcctgcccaagcccaagctgcccgaggacagcgtgatcagcccctacaacatcagcaccggctacagcggcctggccaccggcaacggcctgagcgacagccccgccggcagcaaggaccacggcagcgtgcccatcatcgtgcccctgatccccccccccttcatcaagccccccgccgaggacgacgtgagcaacgtgcagatcatgtgcgcctggtgccagaaggtgggcatcaagagatacagcctgagcatgggcagcgaggtgaagagcttctgcagcgagaagtgcttcgccgcctgcagaagagcctacttcaagagaaacaaggccagagacgaggacggccacgccgagaacttcccccagcagcactacgccaaggagacccccagactggccttcaagaacaactgcgagctgctggtgtgcgactggtgcaagcacatcagacacaccaaggagtacctggacttcggcgacggcgagagaagactgcagttctgcagcgccaagtgcctgaaccagtacaagatggacatcttctacaaggagacccaggccaacctgcccgccggcctgtgcagcaccctgcacccccccatggagaacaaggccgagggcaccggcgtgcagctgctgacccccgacagctggaacatccccctgaccgacgccagaagaaaggcccccagccccgtggccaccgccggccagagccagggccccggccccagcgccagcaccaccgtgagccccagcgacaccgccaactgcagcgtgaccaagatccccacccccgtgcccaagagcatccccatcagcgagacccccaacatcccccccgtgagcgtgcagccccccgccagcatcggcccccccctgggcgtgccccccagaagcccccccatggtgatgaccaacagaggccccgtgcccctgcccatcttcatggagcagcagatcatgcagcagatcagaccccccttcatcagaggccccccccaccacgccagcaaccccaacagccccctgagcaaccccatgctgcccggcatcggccccccccccggcggccccagaaacctgggccccaccagcagccccatgcacagacccatgctgagcccccacatccacccccccagcacccccaccatgcccggcaacccccccggcctgctgcccccccccccccccggcgcccccctgcccagcctgcccttcccccccgtgagcatgatgcccaacggccccatgcccgtgccccagatgatgaacttcggcctgcccagcctggcccccctggtgcccccccccaccctgctggtgccctaccccgtgatcgtgcccctgcccgtgcccatccccatccccatccccatcccccacgtgagcgacagcaagccccccaacggcttcagcagcaacggcgagaacttcatccccaacgcccccggcgacagcgccgccgccggcggcaagcccagcggccacagcctgagccccagagacagcaagcagggcagcagcaagagcgccgacagcccccccggctgcagcggccaggccctgagcctggcccccacccccgccgagcacggcagaagcgaggtggtggacctgaccagaagagccggcagcccccccggcccccccggcgccggcggccagctgggcttccccggcgtgctgcagggcccccaggacggcgtgatcgacctgaccgtgggccacagagccagactgcacaacgtgatccacagagccctgcacgcccacgtgaaggccgagagagagcccagcgccgccgagagaagaacctgcggcggctgcagagacggccactgcagcccccccgccgccggcgaccccggccccggcgcccccgccggccccgaggccgccgccgcctgcaacgtgatcgtgaacggcaccagaggcgccgccgccgagggcgccaagagcgccgagcccccccccgagcagcccccccccccccccccccccgccccccccaagaagctgctgagccccgaggagcccgccgtgagcgagctggagagcgtgaaggagaacaactgcgccagcaactgccacctggacggcgaggccgccaagaagctgatgggcgaggaggccctggccggcggcgacaagagcgaccccaacctgaacaaccccgccgacgaggaccacgcctacgccctgagaatgctgcccaagaccggctgcgtgatccagcccgtgcccaagcccgccgagaaggccgccatggccccctgcatcatcagcagccccatgctgagcgccggccccgaggacctggagccccccctgaagagaagatgcctgagaatcagaaaccagaacaagtag

SEQ ID NO: 196202 - protein, 773 aa, Artificial Sequence
  derived and/or modified sequence
MSRRKQGKPQHLSKREFSPEPLEAILTDDEPDHGPLGAPEGDHDLLTCGQCQMNFPLGDILIFIEHKRKQCNGSLCLEKAVDKPPSPSPIEMKKASNPVEVGIQVTPEDDDCLSTSSRGICPKQEHIADKLLHWRGLSSPRSAHGALIPTPGMSAEYAPQGICKDEPSSYTCTTCKQPFTSAWFLLQHAQNTHGLRIYLESEHGSPLTPRVGIPSGLGAECPSQPPLHGIHIADNNPFNLLRIPGSVSREASGLAEGRFPPTPPLFSPPPRHHLDPHRIERLGAEEMALATHHPSAFDRVLRLNPMAMEPPAMDFSRRLRELAGNTSSPPLSPGRPSPMQRLLQPFQPGSKPPFLATPPLPPLQSAPPPSQPPVKSKSCEFCGKTFKFQSNLVVHRRSHTGEKPYKCNLCDHACTQASKLKRHMKTHMHKSSPMTVKSDDGLSTASSPEPGTSDLVGSASSALKSVVAKFKSENDPNLIPENGDEEEEEDDEEEEEEEEEEEEELTESERVDYGFGLSLEAARHHENSSRGAVVGVGDESRALPDVMQGMVLSSMQHFSEAFHQVLGEKHKRGHLAEAEGHRDTCDEDSVAGESDRIDDGTVNGRGCSPGESASGGLSKKLLLGSPSSLSPFSKRIKLEKEFDLPPAAMPNTENVYSQWLAGYAASRQLKDPFLSFGDSRQSPFASSSEHSSENGSLRFSTPPGELDGGISGRSGTGSGGSTPHISGPGPGRPSSKEGRRSDTCSSHTPIRRSTQRAQDVWQFSDGSSRALKF

SEQ ID NO: 196203 - protein, 798 aa, Artificial Sequence
  derived and/or modified sequence
MSKGTDEDIFSGVSFFLTRLSRCEPSRRPPPAPQPTMSRRKQGKPQHLSKREFSPEPLEAILTDDEPDHGPLGAPEGDHDLLTCGQCQMNFPLGDILIFIEHKRKQCNGSLCLEKAVDKPPSPSPIEMKKASNPVEVGIQVTPEDDDCLSTSSRGICPKQEHIADKLLHWRGLSSPRSAHGALIPTPGMSAEYAPQGICKDEPSSYTCTTCKQPFTSAWFLLQHAQNTHGLRIYLESEHGSPLTPRVGIPSGLGAECPSQPPLHGIHIADNNPFNLLRIPGSVSREASGLAEGRFPPTPPLFSPPPRHHLDPHRIERLGAEEMALATHHPSAFDRVLRLNPMAMEPPAMDFSRRLRELAGNTSSPPLSPGRPSPMQRLLQPFQPGSKPPFLATPPLPPLQSAPPPSQPPVKSKSCEFCGKTFKFQSNLVVHRRSHTGEKPYKCNLCDHACTQASKLKRHMKTHMHKSSPMTVKSDDGLSTASSPEPGTSDLVGSASSALKSVVAKFKSENDPNLIPENGDEEEEEDDEEEEEEEEEEEEELTESERVDYGFGLSLEAVVGVGDESRALPDVMQGMVLSSMQHFSEAFHQVLGEKHKRGHLAEAEGHRDTCDEDSVAGESDRIDDGTVNGRGCSPGESASGGLSKKLLLGSPSSLSPFSKRIKLEKEFDLPPAAMPNTENVYSQWLAGYAASRQLKDPFLSFGDSRQSPFASSSEHSSENGSLRFSTPPGELDGGISGRSGTGSGGSTPHISGPGPGRPSSKEGRRSDTCSSHTPIRRSTQRAQDVWQFSDGSSRALKF

SEQ ID NO: 196204 - protein, 442 aa, Artificial Sequence
  derived and/or modified sequence
MSAEYAPQGICKDEPSSYTCTTCKQPFTSAWFLLQHAQNTHGLRIYLESEHGSPLTPRSNLVVHRRSHTGEKPYKCNLCDHACTQASKLKRHMKTHMHKSSPMTVKSDDGLSTASSPEPGTSDLVGSASSALKSVVAKFKSENDPNLIPENGDEEEEEDDEEEEEEEEEEEEELTESERVDYGFGLSLEAARHHENSSRGAVVGVGDESRALPDVMQGMVLSSMQHFSEAFHQVLGEKHKRGHLAEAEGHRDTCDEDSVAGESDRIDDGTVNGRGCSPGESASGGLSKKLLLGSPSSLSPFSKRIKLEKEFDLPPAAMPNTENVYSQWLAGYAASRQLKDPFLSFGDSRQSPFASSSEHSSENGSLRFSTPPGELDGGISGRSGTGSGGSTPHISGPGPGRPSSKEGRRSDTCSSHTPIRRSTQRAQDVWQFSDGSSRALKF

SEQ ID NO: 196205 - DNA, 3958 bp, Artificial Sequence
  derived and/or modified sequence
ttttttttttttttttgcttaaaaaaaagccatgacggctctcccacaattcatcttccctgcgccatctttgtattatttctaatttattttggatgtcaaaaggcactgatgaagatattttctctggagtctccttctttctaacccggctctcccgatgtgaaccgagccgtcgtccgcccgccgccgccgccgccgccgccgccgcccgccccgcagcccaccatgtctcgccgcaagcaaggcaaaccccagcacttaagcaaacgggaattctcgcccgagcctcttgaagccattcttacagatgatgaaccagaccacggcccgttgggagctccagaaggggatcatgacctcctcacctgtgggcagtgccagatgaacttcccattgggggacattcttatttttatcgagcacaaacggaaacaatgcaatggcagcctctgcttagaaaaagctgtggataagccaccttccccttcaccaatcgagatgaaaaaagcatccaatcccgtggaggttggcatccaggtcacgccagaggatgacgattgtttatcaacgtcatctagaggaatttgccccaaacaggaacacatagcagataaacttctgcactggaggggcctctcctcccctcgttctgcacatggagctctaatccccacgcctgggatgagtgcagaatatgccccgcagggtatttgtaaagatgagcccagcagctacacatgtacaacttgcaaacagccattcaccagtgcatggtttctcttgcaacacgcacagaacactcatggattaagaatctacttagaaagcgaacacggaagtcccctgaccccgcgggttggtatcccttcaggactaggtgcagaatgtccttcccagccacctctccatgggattcatattgcagacaataacccctttaacctgctaagaataccaggatcagtatcgagagaggcttccggcctggcagaagggcgctttccacccactccccccctgtttagtccaccaccgagacatcacttggacccccaccgcatagagcgcctgggggcggaagagatggccctggccacccatcacccgagtgcctttgacagggtgctgcggttgaatccaatggctatggagcctcccgccatggatttctctaggagacttagagagctggcagggaacacgtctagcccaccgctgtccccaggccggcccagccctatgcaaaggttactgcaaccattccagccaggtagcaagccgcccttcctggcgacgccccccctccctcctctgcaatccgcccctcctccctcccagcccccggtcaagtccaagtcatgcgagttctgcggcaagacgttcaaatttcagagcaacctggtggtgcaccggcgcagccacacgggcgagaagccctacaagtgcaacctgtgcgaccacgcgtgcacccaggccagcaagctgaagcgccacatgaagacgcacatgcacaaatcgtcccccatgacggtcaagtccgacgacggtctctccaccgccagctccccggaacccggcaccagcgacttggtgggcagcgccagcagcgcgctcaagtccgtggtggccaagttcaagagcgagaacgaccccaacctgatcccggagaacggggacgaggaggaagaggaggacgacgaggaagaggaagaagaggaggaagaggaggaggaggagctgacggagagcgagagggtggactacggcttcgggctgagcctggaggcggcgcgccaccacgagaacagctcgcggggcgcggtcgtgggcgtgggcgacgagagccgcgccctgcccgacgtcatgcagggcatggtgctcagctccatgcagcacttcagcgaggccttccaccaggtcctgggcgagaagcataagcgcggccacctggccgaggccgagggccacagggacacttgcgacgaagactcggtggccggcgagtcggaccgcatagacgatggcactgttaatggccgcggctgctccccgggcgagtcggcctcggggggcctgtccaaaaagctgctgctgggcagccccagctcgctgagccccttctctaagcgcatcaagctcgagaaggagttcgacctgcccccggccgcgatgcccaacacggagaacgtgtactcgcagtggctcgccggctacgcggcctccaggcagctcaaagatcccttccttagcttcggagactccagacaatcgccttttgcctcctcgtcggagcactcctcggagaacgggagtttgcgcttctccacaccgcccggggagctggacggagggatctcggggcgcagcggcacgggaagtggagggagcacgccccatattagtggtccgggcccgggcaggcccagctcaaaagagggcagacgcagcgacacttgttcttcacacacccccattcggcgtagtacccagagagctcaagatgtgtggcagttttcggatggaagctcgagagcccttaagttctgagaaaatttgaagcccccaggggtggggtggacgcgtgccgcccagtcgacgtcagcgtggtctgtcatcctgctagtttgtgatgttttctgacagtagcctccaagaagccgttgtgcgaagacagagtcctgcagagtccttccagcctaggcctgcagcgccattttatttatattttttaataaaaagtaaaaacaaaaaaacagacccacattggaacagtgaatcagtcccatagagagggcccgtggaccatcgctgtcatgagtgatgccctggcccttctgaaaccagccaacctaattacctgtattgtggaaatgcgcatgagtccccaaccccttgtttctatacattctatgttgtcttttaaaaagtgtgcttaacattgacacaataaatgttggagctttaggtggtgtttgcttgttctttaatttttaatgcttataagacaatgaggctgcttatgattttgtacttctgtacctgtttcctacagacacccatcgggtgggtaggaggaacagatttgagaaatgggcaggagatgtaggaggggaactaggttaccgcttatcagatggcataaattttcaaggagaatcaaaatgcaaaacttgggaataaatcatagcaatatcataattaatgtagtagtaatattgctgtttattaatgctgaagtgtggttttcctaactgtctgacttataatttgcataccattaaataatgcataatatggcacgccgaatcctgtttttcaaatatatgcttttggtggctaccatgcaggatttgaatttgtcttttaatttagcttaggaaagaacatcactgggcgagcggtaaatcctaaagaaggtgataaatgtcagtagtttcttattaaatattctaattttaggttcccaaaccttcaggaaatatatcttaatgcagacaaacaaacataaaacttctttagtacttacatcaggaaatttggggcagattttagaggggggaaattataggaggaaagaagttcacatcagaacagacaatcacagcaatgctctattccttagaaattagtgccacaaataagttacatctacaaacaggtggtaaaaattctttctggcccagttaatttgcacagaacttttctcagtttggtattttttactgcttggagatccagaagagaattagaaacaacatagcaaattaaaataggtttgtcaataatagagctcagacacctgtgtgctgtagattcacatacaggccgtgaacctaagtggggaaaatcctacctatccaccttctggctagattacctagcttagtgaaaagatagccaaataattggcatgtgaattatttcctgcttattcataataaataatgactgtcta

SEQ ID NO: 196206 - DNA, 2322 bp, Artificial Sequence
  derived and/or modified sequence
atgtctaggcgtaagcaaggcaaaccccagcacctctccaagcgggagttctcaccagagcctctcgaagccattttgaccgacgacgagccagaccatggccccctgggcgctcctgaaggagaccacgacttactcacctgcggacagtgtcagatgaatttccctttgggtgacattttaatttttatcgagcacaagagaaagcagtgtaatggatccctgtgccttgagaaagccgtggacaagcccccgagcccttccccaatcgagatgaagaaagcctctaatccagtagaggtgggtatccaagtaacaccagaagacgacgattgcttgtcgacctcgtccagaggaatctgccctaagcaagaacacatcgcagataaactcctccactggagagggctttcatctcctaggagtgctcacggggctctgatccctacccccggcatgtcggcagagtacgccccccagggtatctgtaaggacgaacctagctcttatacctgtacaacgtgcaagcaaccttttacaagcgcatggttcctactgcaacatgctcagaacacacatgggttgcgcatctacctggagtcagagcatggaagcccgctgacaccccgggttggaataccctccggactgggtgccgaatgcccatctcagcctccgctacatggaatccacatagcagacaataacccatttaatctgcttcgcatacctgggtcagtgtcacgtgaggcctcaggcctggcagaagggcgctttccgccaactccacccttgttcagcccgccaccccggcatcatctggacccgcaccgaattgagcgactgggcgccgaagagatggccctcgccacacaccatccctctgcttttgaccgggtgttacgtttgaaccctatggctatggagccaccagccatggatttttctcgccggctaagggagctggctggtaacacttctagcccccctctttcccccggcaggcctagtcccatgcagaggctgctccagcccttccagccgggcagcaaaccgccgttcctggccactccccctttgcctcccctgcagtcagcccccccaccttctcagccccccgtcaaaagcaaatcatgcgagttttgcggtaagacctttaagtttcagagcaacttggtggttcaccgccggtcccacacaggcgagaaaccgtacaagtgtaacttgtgtgaccatgcttgcacacaggcatccaaactcaaacgccacatgaagacacatatgcacaaaagctctcctatgactgtcaaatcagatgacgggctctccaccgctagcagccccgagcccggcacgagcgaccttgtgggatccgcctcaagtgccttgaaaagcgttgttgccaagtttaagagcgagaacgaccccaacctcattcctgagaatggggacgaggaggaagaggaggacgacgaagaggaggaagaggaggaagaggaggaggaagaggagctgaccgagtctgagagggtggattatgggttcgggctgagccttgaagcagcacgccaccacgagaatagttctaggggcgccgtagtcggcgtcggcgacgagtctcgagccctccccgatgtgatgcagggcatggtcctgagcagtatgcagcacttctccgaggcttttcatcaggtgctgggcgaaaagcacaagcgagggcacctagcagaagcagagggtcaccgggatacatgtgacgaagatagtgtggcaggggaaagcgaccgcattgatgatggtacggtgaacggccgcggatgtagtcccggggagagcgccagcggcggcctgtccaaaaagctgctcttaggatccccaagcagcctgtctcctttctcaaaaagaattaagctggagaaggagtttgacctgccccctgccgccatgcccaataccgaaaatgtttacagccagtggctggcggggtacgcagcctcacgccagctaaaggatccgttcctgagtttcggtgattctcgacagtctccatttgcatcttcttcagaacacagttccgaaaacggctcgctcagattctccacccctcctggcgagctcgacggcggaatctctggcaggagcggtaccggaagcgggggttccacccctcatatctcgggaccaggacccgggcgcccaagcagtaaagaaggtcgaagaagtgatacctgctccagccatactcctattcgccgcagcacccagcgggcacaggatgtgtggcagttctctgatgggtccagccgcgctttgaagttctag

SEQ ID NO: 196207 - DNA, 2397 bp, Artificial Sequence
  derived and/or modified sequence
atgtcgaagggcaccgatgaagatattttctccggggtgtcattctttctgaccagactgtctaggtgcgaaccttctcggcggccgccaccagccccccaacctactatgtcaagaaggaaacaagggaaaccccaacacctttctaaaagggagtttagtcccgaaccccttgaagccattctgaccgacgacgagcccgatcatggccccttaggagcaccagaaggtgaccatgatttacttacatgtgggcagtgccagatgaatttcccactcggcgatatcctgatctttatagagcacaagcggaaacagtgcaatggctccctgtgccttgaaaaagccgtcgacaagccaccgtcaccctctcccatcgagatgaagaaggcctccaatcccgtggaagtagggatccaagtgacacccgaagacgatgactgcctgtccacatcgtctcggggcatttgtcccaagcaggaacatatcgccgacaagctgctacactggcggggtctcagctcccctaggtctgcccatggagcccttatcccgacccccgggatgtcagcagagtacgccccccagggcatatgcaaggacgaaccttcctcttacacttgcaccacatgtaagcagcccttcacctctgcgtggttcctccttcagcacgctcagaacacccatgggctgcgtatatatttggagtctgaacacggctcacctttgactccgagagtggggatcccgagcggcttgggggctgaatgtccaagccaaccccctctgcatggaattcacattgcagacaacaacccattcaaccttctgagaattcctggttctgtatcacgggaggcctccggcctcgccgagggtcgattccctccaacaccaccacttttctcaccaccacctcggcatcacctcgatccccacaggattgagagacttggggctgaggagatggccttagccacccaccatccttcagcctttgacagagtcctgagattaaaccccatggctatggagccaccagccatggacttttcgcggagattacgagagcttgccggaaacacatcctccccgccgctttctcccggaaggccaagtccaatgcagcggttactgcaaccctttcaacccggatcaaagcctcccttccttgccactccaccactacctccactccaaagcgctccccctccaagtcagcccccagtcaagtcaaagagctgcgagttttgtggaaaaacattcaaatttcagtctaacttagtggtgcaccgaagaagtcataccggggagaaaccctataagtgtaacctttgcgaccacgcctgcacacaggcttctaaactaaaaaggcatatgaaaacgcacatgcacaagtcttcgccaatgaccgtgaagtcagatgatggtttaagcaccgctagttccccagagccaggtacatcggacctggtggggagcgcctcctccgccctcaagtcagtggttgcaaagtttaaaagtgagaatgatcccaatctgatccccgaaaatggcgatgaggaggaggaagaagacgatgaggaagaggaagaggaagaagaggaagaggaggaggaactgacagagtcagagagagtggactatggatttggtctatccctcgaggccgtagtgggtgtaggtgatgagagtagagctctgcccgatgtcatgcaaggaatggtgttatcatctatgcagcacttcagtgaagcatttcaccaggtgctgggggagaaacacaagaggggacacctggccgaggcagagggacatagagatacttgcgacgaggacagcgtggccggagagtctgaccgcatcgatgacggtaccgtcaatggcagaggctgttcgcctggggagagcgcaagcggcgggctcagcaagaagctacttttagggtccccttcatcgctaagtcccttctccaaaaggatcaagctagagaaggagtttgatttaccaccagccgccatgccaaacaccgagaatgtgtacagtcagtggctagccggctacgcagcgagtcgacagctgaaggatccctttctgtccttcggcgatagccgtcagtcccctttcgcgagcagcagcgagcatagctctgaaaacggatctctgcggtttagcactcctcccggcgaactggacggtggcatttccgggcgatctggcaccggatccgggggctccactccacacatatccggaccagggccaggacggccatctagcaaagaaggcaggagatccgatacctgttcctcccacaccccaatccggaggagtacacaacgggcgcaggacgtgtggcagttttcggatggcagttctcgggccctgaagttctag

SEQ ID NO: 196208 - DNA, 1329 bp, Artificial Sequence
  derived and/or modified sequence
atgtcagcagagtacgcccctcaaggtatttgcaaagacgagcctagtagttatacctgcacaacgtgcaagcagcctttcaccagcgcatggttcctgctgcagcacgcccaaaatacacatggattgagaatttacctcgagtcggaacacggatccccgctgacacctcgatccaacctcgtcgtccataggagaagccatactggtgagaagccttacaagtgcaatttatgcgatcacgcctgtactcaagcctctaaactcaagagacatatgaagacacacatgcataagagttcaccgatgactgtgaagagcgatgacggactgtccacagctagctctccagagcccggtacatccgatctggtcggctcggcgtcgagcgctctgaagtccgtggtggccaaattcaagtctgaaaacgatcctaatctgatccctgagaacggcgacgaggaagaggaagaggatgacgaagaggaggaagaggaagaagaagaggaggaagaggaattgaccgaatctgagagagtggactacggattcggactctccctggaggctgcgcgacatcacgagaactcctccagaggcgccgttgtgggagtaggtgatgagagcagagccctgcccgatgtgatgcagggtatggtgctttccagtatgcagcacttttctgaggccttccaccaggtgctgggggaaaagcacaaacgcgggcatctcgccgaggctgaaggccatagagacacatgtgatgaagattccgtggccggtgaaagtgacagaatcgacgacggaacagtaaatggtcggggatgcagtccaggagagtcagccagcggcggcctttcaaagaagctgttgttgggcagcccgagtagtctatcaccatttagcaagaggattaaattagagaaggaatttgacttaccccccgctgcaatgccaaatacagagaatgtgtactcccaatggctcgctgggtacgctgcctcgcggcagctgaaggacccattcctttcattcggcgactccaggcagtctcccttcgccagttcaagtgaacacagtagtgaaaatggttccttgcgtttttccactccccccggcgaactggacggaggtatttctggccggagtggtacaggaagcggcggaagcactccacatatatcaggaccaggtcctggcaggccctcttccaaggaaggacgtaggagcgatacctgctcatcacatacccccatccgccgttccacccagcgagctcaggatgtatggcagttcagcgatggatcatcccgggcactgaagttctag

SEQ ID NO: 196209 - DNA, 2322 bp, Artificial Sequence
  derived and/or modified sequence
atgagcaggaggaagcagggcaagccccagcacctgagcaagcgggagttcagccctgagcccctggaggccatcctgacagatgatgagccagaccacggccccctgggcgcccctgagggggaccatgacctgctgacctgtggccagtgccagatgaacttccccctgggggacatcctgatcttcatcgagcacaagaggaagcagtgcaatggcagcctgtgcctggagaaggctgtggacaagccacccagccccagccccatcgagatgaagaaggccagcaaccctgtggaggtgggcatccaggtgaccccagaagatgatgactgcctgagcaccagcagccggggcatctgccccaagcaggagcacatcgctgacaagctgctgcactggaggggcctgagcagccccaggtctgcccacggggccctgatccccaccccaggcatgtctgcagaatatgccccccagggcatctgcaaggatgagcccagcagctacacctgcaccacctgcaagcagcccttcaccagcgcctggttcctgctgcagcacgcccagaacacccacggcctgcgcatctacctggagagcgagcacggcagccccctgaccccccgggtgggcatccccagcggcctgggcgctgagtgccccagccagccccccctgcacggcatccacatcgctgacaacaaccccttcaacctgctgcgcatccctggctctgtgtcccgggaggccagcggcctggccgagggccgcttcccccccaccccacccctcttcagccccccacccaggcaccacctggacccccacagaattgagcggctgggcgctgaggagatggccctggccacccaccaccccagcgcctttgacagagtgctgcggctgaaccccatggccatggagcccccagccatggacttcagccggcggctgcgggagctggccggcaacaccagcagcccccccctgagccctggccggcccagccccatgcagaggctgctgcagcccttccagcccggcagcaagccacccttcctggccaccccacccctgccccccctgcagagcgcccccccacccagccagccccctgtgaagagcaagagctgtgagttctgtgggaagaccttcaagttccagagcaacctggtggtgcaccggcgcagccacactggagagaagccctacaagtgcaacctgtgtgaccacgcctgcacccaggccagcaagctgaagaggcacatgaagacccacatgcacaagagcagccccatgacagtgaagagtgatgatggcctgagcacagccagcagccctgagcccggcaccagtgacctggtgggcagcgccagcagcgccctgaagtctgtggtggccaagttcaagtcagaaaatgaccccaacctgatcccagaaaatggagatgaggaggaggaggaggatgatgaggaggaggaggaggaggaggaggaggaggaggaggagctgacagagagcgagcgggtggactatggcttcggcctgagcctggaggccgcccggcaccacgagaacagcagcagaggagctgtggtgggcgtgggagatgagagccgggccctgcctgatgtgatgcagggcatggtgctgagctccatgcagcacttcagcgaggccttccaccaggtgctgggggagaagcacaagaggggccacctggccgaggccgagggccaccgggacacctgtgatgaagattctgtggccggggagagtgacagaattgatgatggcaccgtgaatggccggggctgcagccctggagagagcgccagcggcggcctgagcaagaagctgctgctgggcagccccagcagcctgagccccttcagcaagaggatcaagctggagaaggagtttgacctgcccccagctgccatgcccaacacagaaaatgtgtacagccagtggctggccggctacgccgccagccggcagctgaaggaccccttcctgagctttggagacagccggcagagcccctttgccagcagcagcgagcacagcagtgaaaatggcagcctgcgcttcagcaccccacctggagagctggatggcggcatcagcggccgcagcggcaccggcagcggcggcagcaccccccacatcagcggccctggccctggccggcccagcagcaaggagggcagaagaagtgacacctgcagcagccacacccccatcagaagaagcacccagagggcccaggatgtgtggcagttcagtgatggcagcagccgggccctgaagttctag

SEQ ID NO: 196210 - DNA, 2397 bp, Artificial Sequence
  derived and/or modified sequence
atgagcaaaggaacagatgaggacatcttctctggagtgtccttcttcctgacccggctgagccgctgtgagcccagcagaagacctcctccagccccccagcccaccatgagcaggaggaagcagggcaagccccagcacctgagcaagcgggagttcagccctgagcccctggaggccatcctgacagatgatgagccagaccacggccccctgggcgcccctgagggggaccatgacctgctgacctgtggccagtgccagatgaacttccccctgggggacatcctgatcttcatcgagcacaagaggaagcagtgcaatggcagcctgtgcctggagaaggctgtggacaagccacccagccccagccccatcgagatgaagaaggccagcaaccctgtggaggtgggcatccaggtgaccccagaagatgatgactgcctgagcaccagcagccggggcatctgccccaagcaggagcacatcgctgacaagctgctgcactggaggggcctgagcagccccaggtctgcccacggggccctgatccccaccccaggcatgtctgcagaatatgccccccagggcatctgcaaggatgagcccagcagctacacctgcaccacctgcaagcagcccttcaccagcgcctggttcctgctgcagcacgcccagaacacccacggcctgcgcatctacctggagagcgagcacggcagccccctgaccccccgggtgggcatccccagcggcctgggcgctgagtgccccagccagccccccctgcacggcatccacatcgctgacaacaaccccttcaacctgctgcgcatccctggctctgtgtcccgggaggccagcggcctggccgagggccgcttcccccccaccccacccctcttcagccccccacccaggcaccacctggacccccacagaattgagcggctgggcgctgaggagatggccctggccacccaccaccccagcgcctttgacagagtgctgcggctgaaccccatggccatggagcccccagccatggacttcagccggcggctgcgggagctggccggcaacaccagcagcccccccctgagccctggccggcccagccccatgcagaggctgctgcagcccttccagcccggcagcaagccacccttcctggccaccccacccctgccccccctgcagagcgcccccccacccagccagccccctgtgaagagcaagagctgtgagttctgtgggaagaccttcaagttccagagcaacctggtggtgcaccggcgcagccacactggagagaagccctacaagtgcaacctgtgtgaccacgcctgcacccaggccagcaagctgaagaggcacatgaagacccacatgcacaagagcagccccatgacagtgaagagtgatgatggcctgagcacagccagcagccctgagcccggcaccagtgacctggtgggcagcgccagcagcgccctgaagtctgtggtggccaagttcaagtcagaaaatgaccccaacctgatcccagaaaatggagatgaggaggaggaggaggatgatgaggaggaggaggaggaggaggaggaggaggaggaggagctgacagagagcgagcgggtggactatggcttcggcctgagcctggaggccgtggtgggcgtgggagatgagagccgggccctgcctgatgtgatgcagggcatggtgctgagctccatgcagcacttcagcgaggccttccaccaggtgctgggggagaagcacaagaggggccacctggccgaggccgagggccaccgggacacctgtgatgaggacagcgtggccggggagagtgacagaattgatgatggcaccgtgaatggccggggctgcagccctggagagagcgccagcggcggcctgagcaagaagctgctgctgggcagccccagcagcctgagccccttcagcaagaggatcaagctggagaaggagtttgacctgcccccagctgccatgcccaacacagaaaatgtgtacagccagtggctggccggctatgctgccagccggcagctgaaggaccccttcctgagctttggagacagccggcagagcccctttgccagcagcagcgagcacagcagtgaaaatggcagcctgcgcttcagcaccccacctggagagctggatggcggcatcagcggccgctctggaactggaagtggcggcagcaccccccacatcagcggccctggccctggccggcccagcagcaaggagggccgccgcagtgacacctgcagcagccacacccccatccgccgcagcacccagagggcccaggatgtgtggcagttcagtgatggcagcagccgggccctgaagttctag

SEQ ID NO: 196211 - DNA, 1329 bp, Artificial Sequence
  derived and/or modified sequence
atgtctgcagaatatgccccccagggcatctgcaaggatgagcccagcagctacacctgcaccacctgcaagcagcccttcaccagcgcctggttcctgctgcagcacgcccagaacacccacggcctgcgcatctacctggagagcgagcacggcagccccctgacccccaggagcaacctggtggtgcacagaagaagccacactggagagaagccctacaagtgcaacctgtgtgaccacgcctgcacccaggccagcaagctgaagaggcacatgaagacccacatgcacaagagcagccccatgacagtgaagagtgatgatggcctgagcacagccagcagccctgagcccggcaccagtgacctggtgggcagcgccagcagcgccctgaagtctgtggtggccaagttcaagtcagaaaatgaccccaacctgatcccagaaaatggagatgaggaggaggaggaggatgatgaggaggaggaggaggaggaggaggaggaggaggaggagctgacagaaagtgagcgggtggactatggcttcggcctgagcctggaggccgcccggcaccacgagaacagcagcagaggagctgtggtgggcgtgggagatgagagccgggccctgcctgatgtgatgcagggcatggtgctgagctccatgcagcacttcagcgaggccttccaccaggtgctgggggagaagcacaagaggggccacctggccgaggccgagggccaccgggacacctgtgatgaggacagcgtggccggggagagtgacagaattgatgatggcaccgtgaatggccggggctgcagccctggagagagcgccagcggcggcctgagcaagaagctgctgctgggcagccccagcagcctgagccccttcagcaagaggatcaagctggagaaggagtttgacctgcccccagctgccatgcccaacacagaaaatgtgtacagccagtggctggccggctatgctgccagccggcagctgaaggaccccttcctgagctttggagacagccggcagagcccctttgccagcagcagcgagcacagcagtgaaaatggcagcctgcgcttcagcaccccacctggagagctggatggcggcatcagcggccgctctggaactggaagtggcggcagcaccccccacatcagcggccctggccctggccggcccagcagcaaggagggccgccgcagtgacacctgcagcagccacacccccatccgccgcagcacccagagggcccaggatgtgtggcagttcagtgatggcagcagccgggccctgaagttctag

SEQ ID NO: 196212 - DNA, 2322 bp, Artificial Sequence
  derived and/or modified sequence
atgagccggcggaagcagggcaagccccagcacctgagcaagcgggagtttagcccggagccactggaggctatcctgaccgacgacgagcccgaccatggtcccctcggagcccccgagggtgaccacgatctgctcacctgcggccaatgtcaaatgaattttcccttgggcgatatcctcatttttattgaacacaaacgaaaacagtgtaacggatccctctgtctagaaaaagcagtggacaaacctccatctccaagccccatcgagatgaagaaagcctccaaccctgtcgaagtaggtatccaggtcactcctgaggatgacgattgtttgtcgacttcttcaaggggaatctgtccaaaacaggaacatatcgccgataaattgttgcattggcgcggcctctcgagtcctcggagtgcccacggggcactcatacccacccccggaatgagtgccgaatacgcaccccagggcatctgcaaggatgagccgtcatcttatacctgtacgacctgcaaacagcccttcacatccgcctggtttttgttgcagcacgctcaaaatactcacggtctgaggatctacttggaatccgagcatgggtcaccacttacccctagagtcgggatcccatctggcttgggggccgagtgtccgagccagccgcctttgcacggtattcacattgcggataacaaccccttcaatttgctaagaataccagggagcgtgtctagggaggccagcggactggccgaaggacgtttcccccctacccctccactattctcccccccacccaggcatcacctcgatcctcaccgaatcgagcgactcggcgccgaggaaatggcacttgctacacatcatccatctgccttcgatagagtgttaaggttgaatcctatggccatggaaccccctgctatggatttctcccgtagattgagggaactggccgggaacacgagctcccctcccctgagtcctggcagaccttcccctatgcagcggttgcttcagccctttcagcccggaagcaagcccccttttctggctactcctcccctcccccctttgcaatcggcgcccccaccctcgcagccccctgtaaagtccaagagctgtgagttttgtggcaagacattcaagtttcagtccaacctggttgtgcaccggagatctcatacaggcgagaaaccttacaaatgtaacctttgcgaccacgcgtgcacgcaggcaagcaaattgaaacgtcacatgaagacccatatgcacaagagcagcccaatgacagtgaagagcgacgatggactgagcactgcgagcagccctgagcccggcacaagtgacctggtgggcagcgctagctccgcccttaagtctgttgtcgccaaattcaagagcgagaatgacccgaacttgatcccagaaaatggggatgaggaggaggaagaggacgacgaggaggaggaggaggaagaggaggaggaggaggaagagctgaccgaaagcgagagagtcgattacggcttcggactatccttggaggcagcacgccaccatgaaaactctagcagaggagccgtggtaggtgtgggagacgagtccagagcactgcccgacgtaatgcagggcatggtcctgtcaagtatgcagcacttctctgaagctttccaccaggtccttggcgagaagcacaagagagggcacctggctgaagccgaagggcatcgcgacacttgcgacgaagacagtgtcgctggggagtcagatagaatcgatgacggtactgtgaacggaagaggatgctcaccgggcgagtcagcatccggaggattgagcaaaaaactcctgctgggcagtccttcttctctctcgccttttagcaagcggatcaaactggaaaaggagttcgacctccctcccgctgccatgcccaataccgagaatgtctactctcagtggctggccggctacgcggcctctagacagcttaaagacccttttctttcattcggagattctagacagtcgccatttgcctccagttcagaacattccagcgaaaatggaagtctgcggttttctactcctccaggggagctggatggcggcattagtggacggagcggaacagggagtggtggatctactcctcacatatccggtcctggtccaggtagaccttcgagcaaggaagggagacgctcagatacgtgctcctcccatactcctatccggaggtccacccagagagctcaagatgtgtggcagttctccgacggttcgtcccgggcgctgaaattctag

SEQ ID NO: 196213 - DNA, 2397 bp, Artificial Sequence
  derived and/or modified sequence
atgagcaagggcaccgacgaggacatcttcagcggcgtgagcttctttcttacacggttgtcacgctgtgagcctagcaggcgcccgcccccagcaccccagccaaccatgagtagaaggaagcagggaaagccacaacacctgtccaagagagagttctcgcccgaaccgttagaggccattttgactgacgacgaacctgaccacggccctctgggcgcccccgaaggggaccatgacctgctaacctgtggccagtgtcaaatgaatttccccttgggcgacatcctgattttcatcgagcacaaacggaaacagtgcaatgggtccctctgtctggagaaggcagtggacaaaccgccgtctccatccccaattgaaatgaaaaaagccagcaaccccgtggaggttggcatccaagtcacccctgaggacgatgactgcctttctacgagttcacgtggaatctgccccaaacaggagcatatcgctgataagctgctgcattggagaggcttgtctagccccaggagcgcccacggagcccttattcctaccccaggcatgagcgccgagtatgccccacagggcatctgtaaagacgaaccaagcagctacacatgcaccacctgtaagcagccattcacatcagcatggtttctcctgcaacatgctcagaacacgcacggattgaggatatatctggagtcagagcacggcagtcctcttactcctagagtgggaatccccagcgggttgggcgcagagtgcccttcacaacctccgctgcacgggatacacatcgctgacaataatccttttaatctgctccgaatccctgggtccgtgagtcgcgaagcgtccggcctcgcagaggggaggttcccccccactcctcctctgttcagccccccaccccggcaccaccttgacccacaccgtattgagagactgggtgcagaagaaatggccctggctacgcatcatcctagcgcctttgatagggtccttaggcttaaccccatggctatggaacccccagctatggatttcagtcgacgcctacgggagctggccggtaatactagctctccccccctgagtcccggaaggccgagcccgatgcaacgcctgctccagccatttcagccggggagcaagcctccatttctcgccacacccccacttccccccctccaatctgccccccccccgtcacagccacccgtgaaatcaaagagttgcgaattctgtgggaaaaccttcaaatttcagtcaaatctcgtggttcatagaaggagtcatacaggggaaaaaccctacaagtgtaatctttgcgaccatgcgtgcactcaggcttctaagcttaaacgccacatgaagacacacatgcacaaaagttccccaatgacggtcaaatcagatgacggcctcagcaccgcctcctcacctgagcccggtaccagtgaccttgtgggtagtgcgtcctctgcattgaaaagtgtggttgcgaaatttaaaagcgaaaatgaccctaatctcatccctgagaatggcgatgaggaagaagaggaggatgatgaggaagaggaagaagaggaagaggaagaggaggaagagctgactgaaagtgagcgagttgattacggttttggcttgtctctggaggcggtagtgggagtgggcgacgagtcaagagctctgcccgacgtgatgcagggaatggtactgagtagcatgcagcacttttctgaggcttttcaccaagtgctcggtgagaagcacaagcgcggccatctggcagaagctgagggtcacagagacacttgtgatgaagactcggtagccggcgagagcgacagaatcgacgatgggaccgtcaacgggcgaggctgctctcccggcgagtccgcctccggcggcctgtctaagaaattgcttttgggctccccttccagcctgagccccttttccaagagaatcaagctggaaaaagagtttgatctcccccctgcagcaatgccaaataccgagaacgtatattctcagtggcttgcaggctacgcggcaagtcgccagctcaaggatcccttcctatcgtttggcgactctcggcagtccccctttgccagctcctcagagcatagcagcgagaacgggtcactgaggttcagcacacctcctggtgagttggacggaggcatatccggcagatcaggaactggcagtggaggatccactcctcacatatctggacctgggccaggcaggcccagttcaaaagagggcagacgcagtgacacttgctcaagtcacacccccatcaggcgcagtacccagcgcgcccaagacgtgtggcagttttctgacggcagtagcagggccctgaagttctag

SEQ ID NO: 196214 - DNA, 1329 bp, Artificial Sequence
  derived and/or modified sequence
atgagcgccgagtacgccccccagggcatctgcaaggacgagccctcgtcctatacatgtaccacatgtaagcagccgttcacctctgcgtggtttttgctccaacacgctcagaatactcatggactgcggatctatctggagtctgaacacggatcccccctcacccctaggtcaaaccttgtggtccatcgtagatctcatacgggagagaagccttacaagtgcaatctctgcgatcatgcatgcacacaggcttcgaagctgaaaaggcacatgaaaactcacatgcataagagctcccccatgacagtgaagagtgatgacggactcagcacggcctcctccccggaacctggaacgagtgatctggtcgggagtgcctctagtgcgcttaagagtgtggtggccaaattcaaaagcgagaacgatcccaacctgatcccggagaacggagacgaggaagaggaagaggatgatgaagaggaggaagaggaggaagaggaagaggaggaagagttgaccgaaagtgaaagggtggattatggttttggcctgtctctagaggccgccaggcaccacgaaaatagcagtagaggcgctgtcgtgggggtgggagacgaaagtagggctctgcccgacgtgatgcagggcatggtactgagctccatgcagcacttctccgaagccttccaccaggtgcttggggaaaagcataagcggggccatctggctgaggccgagggtcaccgtgatacgtgcgatgaggacagtgtcgcaggtgaaagcgatcgcattgacgacggaacggtgaacggacgcgggtgttctcccggtgagtcggcgtctggggggctgtccaagaagcttctcctgggtagtcctagctctctgtctccatttagtaagaggatcaagcttgagaaagaattcgatttacctcctgcagccatgccaaacacagaaaatgtttactctcagtggttagccggttacgctgcctcgcgccagttgaaggaccccttcctctcatttggtgactctcggcaatctccttttgcctcgtcatccgagcacagctccgagaacgggtcattgcgcttttctaccccccccggcgagctggatgggggcatcagtggccggtccggcactgggtctgggggcagtactcctcatataagcggaccaggacctggccgtccgagtagcaaggagggccggcgttccgatacttgctcttcccatacaccgattaggaggtctacacagagagcacaggacgtgtggcagttctccgacggctccagtagggcgttgaagttttag

SEQ ID NO: 196215 - DNA, 2322 bp, Artificial Sequence
  derived and/or modified sequence
atgagccgtcgcaagcaaggaaaaccacagcatctgtctaaaagggaattcagcccagaacctctggaagctatcctcaccgacgacgaacccgatcatgggcctctcggagcgccagagggggatcatgatttattgacctgcggccaatgccagatgaacttccctttgggggacattctcattttcatcgaacataaacggaagcagtgcaatggatctctgtgcttagaaaaggcagtcgacaagcctccctcaccgtcacccatcgagatgaaaaaggccagcaaccctgtcgaggtgggcatccaggtgacgccagaagacgatgactgtttaagtacatctagtagagggatatgcccaaaacaggagcacatcgcagacaagctgctgcactggcgcggattgagcagtcccagatccgcccatggcgcactgattccaacaccgggaatgtccgccgagtacgcccctcaggggatctgcaaggatgaaccttcctcctacacttgtactacatgtaaacaaccattcacctccgcctggtttctgctgcaacatgcccagaatactcatggcctcagaatctacttggagtccgaacatggatctccacttacgccaagggttggcattcccagtgggcttggagctgagtgtccaagccaaccgccacttcacggaattcacatagcagacaacaacccctttaatctgctacggattcctggcagtgtgagcagagaagcctctgggctcgcagaaggcagatttcccccaacacctcccctatttagcccgccacctcgacaccacctggatcctcaccgcattgaacggctgggggcagaggagatggccctcgccacacatcacccatctgccttcgaccgagtgctccggcttaatcctatggctatggagccaccggctatggacttctccagaaggctgcgggagctggccggtaatacttcgtcacccccactgtcgcccggaagaccgagcccaatgcagcgcttgcttcagccctttcagccaggctccaagccgccattcctggcaaccccccctctgccccctctccagtcagcgcctcctccctcccagccccctgtgaagagcaagtcctgcgagttctgcgggaagaccttcaagtttcagagtaaccttgttgttcatagaagatcccacaccggcgaaaagccttacaagtgcaacttgtgcgaccacgcttgcactcaggcttctaaactgaagcgacatatgaaaactcacatgcacaagagctcaccaatgacggtgaagtccgacgacgggctcagcaccgccagttccccggagcctggcacaagtgatctcgtggggagcgcatctagcgcattgaagtctgtggtggccaagtttaagtccgagaacgatccaaatcttattccagagaacggtgacgaggaggaggaagaggacgacgaggaggaggaagaggaggaagaggaagaggaggaagagttaaccgagagcgagcgagttgactacggattcggactctctcttgaggcggcacgccaccatgaaaacagctcacggggtgccgtggtgggcgtcggtgatgagtcaagggctttgcccgacgtcatgcagggtatggtcctgtcttccatgcaacatttctctgaggcctttcaccaagttttgggcgaaaagcataaacgcggacacctggcagaggccgagggccatcgcgacacatgcgacgaggatagcgtggctggcgagtccgatagaattgatgatggcactgtgaacgggagggggtgtagcccaggtgagtctgccagcgggggactttccaagaagctgctgttagggagccccagcagcctgagcccattcagtaagagaatcaagctggagaaagagttcgacttgccccctgccgctatgccgaatacggaaaacgtttattcacagtggctcgccggatatgccgctagcagacagttgaaggatccatttctgtcttttggcgactcgaggcagtctccctttgcaagcagctccgagcacagctcagagaatggaagtctacgcttttcaactccccctggagagcttgacgggggtatcagtgggagaagcggcaccggatcaggaggttcgaccccccacatcagtgggccaggtccaggaaggccaagttcaaaggagggccgtcggagcgacacatgttcttctcacactcccatccgtcggtccacacagagagcgcaggatgtgtggcagttctcggatgggagtagccgcgcactgaagttctag

SEQ ID NO: 196216 - DNA, 2397 bp, Artificial Sequence
  derived and/or modified sequence
atgagcaagggcacagacgaggacattttctccggggtgagtttttttctgactcgcctgtcaaggtgcgaaccatcaaggcgtccaccacctgcccctcaacctactatgtcccgtagaaaacaaggaaaaccacagcatctttctaagcgagaattcagcccagaacctctagaggctatattaactgatgacgagccagaccacggccctcttggagcgcctgagggtgatcacgatctgctgacgtgcggccagtgtcagatgaatttcccccttggagacatactgatctttatcgaacacaagagaaagcaatgtaacgggtctctctgtctggagaaggccgtagataagcctccgagcccatccccaatcgaaatgaagaaagcatctaatcccgtcgaggtggggattcaggtgactccggaagatgatgattgcctctccacatctagccggggaatttgcccaaagcaggaacacatcgctgataagctgctccattggcgaggattatcctcccccagaagcgcccacggcgcactgatacctaccccgggaatgtcagctgagtatgctccacagggcatttgtaaagacgagcctagctcatatacctgtacaacctgcaagcagccatttacctccgcttggtttctgttgcagcacgcccagaacacacacggcctgcgaatatatctagagtctgagcacggaagccctctgaccccaagagtgggcattcctagcggccttggggcagaatgcccaagccagcccccacttcacggtattcacattgcggataacaatccttttaatcttctcaggatcccaggatccgtatcacgcgaagcaagtgggctggcagaaggacgcttcccccctacacccccactgttttcaccgcctcccagacaccatctagacccacataggatcgagaggttgggagccgaagagatggccctggctactcaccacccttcagccttcgatcgcgtgttaaggcttaaccccatggcaatggagccccctgcaatggacttctcgaggcgcctccgggaactcgcgggtaacacttcaagtccaccattgtcacctggaagacctagtcccatgcagagacttctccaaccgtttcaacccggatccaagcccccatttttggccacccctccactgcccccattgcagagcgcaccaccaccctctcagccccctgttaagtcaaagtcttgtgagttttgtggcaagacgtttaaatttcagtccaacctggtcgtacaccggaggagccataccggtgagaaaccctacaagtgcaacctgtgtgatcatgcttgcacccaggcgagcaagctgaagaggcatatgaaaacccacatgcacaagtcaagccctatgacagtgaaatcggatgacgggctttctactgcctctagtcccgagcctggaacgtctgacctcgtggggagcgcgtcctccgctttgaaatcagtggtcgctaagttcaaatcagagaacgatccaaacctgatccctgaaaacggcgacgaggaggaagaagaggatgacgaggaagaagaagaggaggaggaggaagaagaggaggaacttaccgagagcgagcgagtagattatggtttcggcctgagcctggaggccgtcgtcggggtgggggatgaatctcgggcactccctgatgtcatgcagggcatggtactgtcgagtatgcagcacttctccgaagccttccatcaagtgctgggtgagaagcacaagcggggacatcttgctgaggctgagggccaccgcgatacttgcgacgaggactctgtggcaggcgaaagtgataggatcgatgacggcacggtcaacggcagaggatgttctcctggcgaatcagcctccgggggtctcagcaaaaaactcctgctcggatccccgtcctcgctcagtccctttagcaagcgtatcaagctggaaaaggaattcgatctgccccctgctgccatgcccaacaccgaaaatgtgtattcccagtggctcgccggttacgctgcttccaggcagctcaaagatcctttcttgagcttcggtgacagtcgccagagccctttcgctagcagctctgagcattcaagcgaaaacggatcactgaggttttccaccccccctggcgaactggacggaggcatctccgggcgttcaggcaccggatctggcggaagtacaccacatatctctggaccaggcccaggcagacccagctcaaaggaaggtcgtagatccgatacctgcagctcccacaccccaatcagacgctcgactcaaagagcccaggacgtctggcaattctctgatgggtccagccgagcacttaagttctag

SEQ ID NO: 196217 - DNA, 1329 bp, Artificial Sequence
  derived and/or modified sequence
atgtctgccgagtacgcgccacaaggaatctgtaaagacgagccctcctcttacacttgcaccacctgtaagcagcctttcacatcggcgtggtttctccttcagcacgctcagaatacacatgggctgaggatttatttggaatcggagcacgggtcccccttgaccccccgaagcaacctcgtggtgcatcgcagatctcacacaggcgagaaaccctacaagtgtaacctttgcgatcatgcttgtactcaggcttcaaagctgaagcgacacatgaagacacatatgcacaaatccagtcccatgaccgtaaagtccgatgacggtttgagcacggcatcatcaccagagccaggcaccagtgatttagtcggctccgctagctctgccctgaagagcgttgtcgcaaaatttaagagtgagaatgacccaaacctaatccccgagaatggcgacgaggaggaggaggaggacgatgaggaggaagaagaagaggaggaggaggaagaggaagagctgacggagagcgagagagttgactatggctttggcctaagcctcgaagctgccaggcaccacgagaattcatcccgcggagccgtcgtcggtgttggcgatgaaagccgcgctctccccgatgttatgcaaggcatggttctgtcctcaatgcagcatttcagtgaggcttttcatcaggtgttaggggagaagcataaacgcggtcatctagcagaggccgagggccacagggatacctgtgatgaggattccgtcgccggagagagcgatcggatcgacgacggcaccgtcaatggccgtggctgcagtccaggggaaagtgcctctggcggactgtctaaaaaactgttgttagggtctcctagcagtctcagtcccttctcaaaaaggattaagctggagaaggaatttgacttgcctcctgccgcaatgcctaacaccgaaaatgtatacagccagtggttagcaggatacgcagcatccaggcagttaaaagacccctttctgagtttcggagacagcaggcagtcaccctttgcaagctccagcgagcactcttcagagaacggttccctccgcttctcaacaccccctggagaattagacggaggaatttccgggcgaagtggaactggctcgggcggatccacaccccacatcagcggccctggcccaggtaggccttccagtaaagagggcagacgctcagacacctgtagttcccacacccctatccgccgtagcacacaaagggcacaagatgtgtggcagttttcagatggcagctcccgagccctcaaattctag

SEQ ID NO: 196218 - DNA, 3959 bp, Artificial Sequence
  derived and/or modified sequence
tttttttttttttttttgcttaaaaaaaagccatgacggctctcccacaattcatcttccctgcgccatctttgtattatttctaatttattttggatgtcaaaaggcactgatgaagatattttctctggagtctccttctttctaacccggctctcccgatgtgaaccgagccgtcgtccgcccgccgccgccgccgccgccgccgccgcccgccccgcagcccaccatgtctcgccgcaagcaaggcaaaccccagcacttaagcaaacgggaattctcgcccgagcctcttgaagccattcttacagatgatgaaccagaccacggcccgttgggagctccagaaggggatcatgacctcctcacctgtgggcagtgccagatgaacttcccattgggggacattcttatttttatcgagcacaaacggaaacaatgcaatggcagcctctgcttagaaaaagctgtggataagccaccttccccttcaccaatcgagatgaaaaaagcatccaatcccgtggaggttggcatccaggtcacgccagaggatgacgattgtttatcaacgtcatctagaggaatttgccccaaacaggaacacatagcagataaacttctgcactggaggggcctctcctcccctcgttctgcacatggagctctaatccccacgcctgggatgagtgcagaatatgccccgcagggtatttgtaaagatgagcccagcagctacacatgtacaacttgcaaacagccattcaccagtgcatggtttctcttgcaacacgcacagaacactcatggattaagaatctacttagaaagcgaacacggaagtcccctgaccccgcgggttggtatcccttcaggactaggtgcagaatgtccttcccagccacctctccatgggattcatattgcagacaataacccctttaacctgctaagaataccaggatcagtatcgagagaggcttccggcctggcagaagggcgctttccacccactccccccctgtttagtccaccaccgagacatcacttggacccccaccgcatagagcgcctgggggcggaagagatggccctggccacccatcacccgagtgcctttgacagggtgctgcggttgaatccaatggctatggagcctcccgccatggatttctctaggagacttagagagctggcagggaacacgtctagcccaccgctgtccccaggccggcccagccctatgcaaaggttactgcaaccattccagccaggtagcaagccgcccttcctggcgacgccccccctccctcctctgcaatccgcccctcctccctcccagcccccggtcaagtccaagtcatgcgagttctgcggcaagacgttcaaatttcagagcaacctggtggtgcaccggcgcagccacacgggcgagaagccctacaagtgcaacctgtgcgaccacgcgtgcacccaggccagcaagctgaagcgccacatgaagacgcacatgcacaaatcgtcccccatgacggtcaagtccgacgacggtctctccaccgccagctccccggaacccggcaccagcgacttggtgggcagcgccagcagcgcgctcaagtccgtggtggccaagttcaagagcgagaacgaccccaacctgatcccggagaacggggacgaggaggaagaggaggacgacgaggaagaggaagaagaggaggaagaggaggaggaggagctgacggagagcgagagggtggactacggcttcgggctgagcctggaggcggcgcgccaccacgagaacagctcgcggggcgcggtcgtgggcgtgggcgacgagagccgcgccctgcccgacgtcatgcagggcatggtgctcagctccatgcagcacttcagcgaggccttccaccaggtcctgggcgagaagcataagcgcggccacctggccgaggccgagggccacagggacacttgcgacgaagactcggtggccggcgagtcggaccgcatagacgatggcactgttaatggccgcggctgctccccgggcgagtcggcctcggggggcctgtccaaaaagctgctgctgggcagccccagctcgctgagccccttctctaagcgcatcaagctcgagaaggagttcgacctgcccccggccgcgatgcccaacacggagaacgtgtactcgcagtggctcgccggctacgcggcctccaggcagctcaaagatcccttccttagcttcggagactccagacaatcgccttttgcctcctcgtcggagcactcctcggagaacgggagtttgcgcttctccacaccgcccggggagctggacggagggatctcggggcgcagcggcacgggaagtggagggagcacgccccatattagtggtccgggcccgggcaggcccagctcaaaagagggcagacgcagcgacacttgttcttcacacacccccattcggcgtagtacccagagagctcaagatgtgtggcagttttcggatggaagctcgagagcccttaagttctgagaaaatttgaagcccccaggggtggggtggacgcgtgccgcccagtcgacgtcagcgtggtctgtcatcctgctagtttgtgatgttttctgacagtagcctccaagaagccgttgtgcgaagacagagtcctgcagagtccttccagcctaggcctgcagcgccattttatttatattttttaataaaaagtaaaaacaaaaaaacagacccacattggaacagtgaatcagtcccatagagagggcccgtggaccatcgctgtcatgagtgatgccctggcccttctgaaaccagccaacctaattacctgtattgtggaaatgcgcatgagtccccaaccccttgtttctatacattctatgttgtcttttaaaaagtgtgcttaacattgacacaataaatgttggagctttaggtggtgtttgcttgttctttaatttttaatgcttataagacaatgaggctgcttatgattttgtacttctgtacctgtttcctacagacacccatcgggtgggtaggaggaacagatttgagaaatgggcaggagatgtaggaggggaactaggttaccgcttatcagatggcataaattttcaaggagaatcaaaatgcaaaacttgggaataaatcatagcaatatcataattaatgtagtagtaatattgctgtttattaatgctgaagtgtggttttcctaactgtctgacttataatttgcataccattaaataatgcataatatggcacgccgaatcctgtttttcaaatatatgcttttggtggctaccatgcaggatttgaatttgtcttttaatttagcttaggaaagaacatcactgggcgagcggtaaatcctaaagaaggtgataaatgtcagtagtttcttattaaatattctaattttaggttcccaaaccttcaggaaatatatcttaatgcagacaaacaaacataaaacttctttagtacttacatcaggaaatttggggcagattttagaggggggaaattataggaggaaagaagttcacatcagaacagacaatcacagcaatgctctattccttagaaattagtgccacaaataagttacatctacaaacaggtggtaaaaattctttctggcccagttaatttgcacagaacttttctcagtttggtattttttactgcttggagatccagaagagaattagaaacaacatagcaaattaaaataggtttgtcaataatagagctcagacacctgtgtgctgtagattcacatacaggccgtgaacctaagtggggaaaatcctacctatccaccttctggctagattacctagcttagtgaaaagatagccaaataattggcatgtgaattatttcctgcttattcataataaataatgactgtcta

SEQ ID NO: 196219 - DNA, 3805 bp, Artificial Sequence
  derived and/or modified sequence
atgtcaaaaggcactgatgaagatattttctctggagtctccttctttctaacccggctctcccgatgtgaaccgagccgtcgtccgccgcccgccccgcagcccaccatgtctcgccgcaagcaaggcaaaccccagcacttaagcaaacgggaattctcgcccgagcctcttgaagccattcttacagatgatgaaccagaccacggcccgttgggagctccagaaggggatcatgacctcctcacctgtgggcagtgccagatgaacttcccattgggggacattcttatttttatcgagcacaaacggaaacaatgcaatggcagcctctgcttagaaaaagctgtggataagccaccttccccttcaccaatcgagatgaaaaaagcatccaatcccgtggaggttggcatccaggtcacgccagaggatgacgattgtttatcaacgtcatctagaggaatttgccccaaacaggaacacatagcagataaacttctgcactggaggggcctctcctcccctcgttctgcacatggagctctaatccccacgcctgggatgagtgcagaatatgccccgcagggtatttgtaaagatgagcccagcagctacacatgtacaacttgcaaacagccattcaccagtgcatggtttctcttgcaacacgcacagaacactcatggattaagaatctacttagaaagcgaacacggaagtcccctgaccccgcgggttggtatcccttcaggactaggtgcagaatgtccttcccagccacctctccatgggattcatattgcagacaataacccctttaacctgctaagaataccaggatcagtatcgagagaggcttccggcctggcagaagggcgctttccacccactccccccctgtttagtccaccaccgagacatcacttggacccccaccgcatagagcgcctgggggcggaagagatggccctggccacccatcacccgagtgcctttgacagggtgctgcggttgaatccaatggctatggagcctcccgccatggatttctctaggagacttagagagctggcagggaacacgtctagcccaccgctgtccccaggccggcccagccctatgcaaaggttactgcaaccattccagccaggtagcaagccgcccttcctggcgacgccccccctccctcctctgcaatccgcccctcctccctcccagcccccggtcaagtccaagtcatgcgagttctgcggcaagacgttcaaatttcagagcaacctggtggtgcaccggcgcagccacacgggcgagaagccctacaagtgcaacctgtgcgaccacgcgtgcacccaggccagcaagctgaagcgccacatgaagacgcacatgcacaaatcgtcccccatgacggtcaagtccgacgacggtctctccaccgccagctccccggaacccggcaccagcgacttggtgggcagcgccagcagcgcgctcaagtccgtggtggccaagttcaagagcgagaacgaccccaacctgatcccggagaacggggacgaggaggaagaggaggacgacgaggaagaggaagaagaggaggaagaggaggaggaggagctgacggagagcgagagggtggactacggcttcgggctgagcctggaggcggtcgtgggcgtgggcgacgagagccgcgccctgcccgacgtcatgcagggcatggtgctcagctccatgcagcacttcagcgaggccttccaccaggtcctgggcgagaagcataagcgcggccacctggccgaggccgagggccacagggacacttgcgacgaagactcggtggccggcgagtcggaccgcatagacgatggcactgttaatggccgcggctgctccccgggcgagtcggcctcggggggcctgtccaaaaagctgctgctgggcagccccagctcgctgagccccttctctaagcgcatcaagctcgagaaggagttcgacctgcccccggccgcgatgcccaacacggagaacgtgtactcgcagtggctcgccggctacgcggcctccaggcagctcaaagatcccttccttagcttcggagactccagacaatcgccttttgcctcctcgtcggagcactcctcggagaacgggagtttgcgcttctccacaccgcccggggagctggacggagggatctcggggcgcagcggcacgggaagtggagggagcacgccccatattagtggtccgggcccgggcaggcccagctcaaaagagggcagacgcagcgacacttgttcttcacacacccccattcggcgtagtacccagagagctcaagatgtgtggcagttttcggatggaagctcgagagcccttaagttctgagaaaatttgaagcccccaggggtggggtggacgcgtgccgcccagtcgacgtcagcgtggtctgtcatcctgctagtttgtgatgttttctgacagtagcctccaagaagccgttgtgcgaagacagagtcctgcagagtccttccagcctaggcctgcagcgccattttatttatattttttaataaaaagtaaaaacaaaaaaacagacccacattggaacagtgaatcagtcccatagagagggcccgtggaccatcgctgtcatgagtgatgccctggcccttctgaaaccagccaacctaattacctgtattgtggaaatgcgcatgagtccccaaccccttgtttctatacattctatgttgtcttttaaaaagtgtgcttaacattgacacaataaatgttggagctttaggtggtgtttgcttgttctttaatttttaatgcttataagacaatgaggctgcttatgattttgtacttctgtacctgtttcctacagacacccatcgggtgggtaggaggaacagatttgagaaatgggcaggagatgtaggaggggaactaggttaccgcttatcagatggcataaattttcaaggagaatcaaaatgcaaaacttgggaataaatcatagcaatatcataattaatgtagtagtaatattgctgtttattaatgctgaagtgtggttttcctaactgtctgacttataatttgcataccattaaataatgcataatatggcacgccgaatcctgtttttcaaatatatgcttttggtggctaccatgcaggatttgaatttgtcttttaatttagcttaggaaagaacatcactgggcgagcggtaaatcctaaagaaggtgataaatgtcagtagtttcttattaaatattctaattttaggttcccaaaccttcaggaaatatatcttaatgcagacaaacaaacataaaacttctttagtacttacatcaggaaatttggggcagattttagaggggggaaattataggaggaaagaagttcacatcagaacagacaatcacagcaatgctctattccttagaaattagtgccacaaataagttacatctacaaacaggtggtaaaaattctttctggcccagttaatttgcacagaacttttctcagtttggtattttttactgcttggagatccagaagagaattagaaacaacatagcaaattaaaataggtttgtcaataatagagctcagacacctgtgtgctgtagattcacatacaggccgtgaacctaagtggggaaaatcctacctatccaccttctggctagattacctagcttagtgaaaagatagccaaataattggcatgtgaattatttcctgcttattcataataaataatgactgtcta

SEQ ID NO: 196220 - DNA, 2291 bp, Artificial Sequence
  derived and/or modified sequence
gcttaaaaaaaagccatgacggctctcccacaattcatcttccctgcgccatctttgtattatttctaatttattttggatgtcaaaaggcactgatgaagatattttctctggagtctccttctttctaacccggctctcccgatgtgaaccgagccgtcgtccgcccgccgccgccgccgccgccgccgccgcccgccccgcagcccaccatgtctcgccgcaagcaaggcaaaccccagcacttaagcaaacgggaattctcgcccgagcctcttgaagccattcttacagatgatgaaccagaccacggcccgttgggagctccagaaggggatcatgacctcctcacctgtgggcagtgccagatgaacttcccattgggggacattcttatttttatcgagcacaaacggaaacaatgcaatggcagcctctgcttagaaaaagctgtggataagccaccttccccttcaccaatcgagatgaaaaaagcatccaatcccgtggaggttggcatccaggtcacgccagaggatgacgattgtttatcaacgtcatctagaggaatttgccccaaacaggaacacatagcaggtaacccaagggggagctcagagaagagtccaggctgccagtgcaaaggtccagccctgtcgccaaggagaccctcagggaaatgcacaggcctccagctattcccacggcccctgtagctgagcgccagcttcttcctgggccaagctgaggctgtttcctgccgtgtccattctcctagcaacgcttctctttggccagtttgccatagtacctgagataaacttctgcactggaggggcctctcctcccctcgttctgcacatggagctctaatccccacgcctgggatgagtgcagaatatgccccgcagggtatttgtaaagatgagcccagcagctacacatgtacaacttgcaaacagccattcaccagtgcatggtttctcttgcaacacgcacagaacactcatggattaagaatctacttagaaagcgaacacggaagtcccctgaccccgcggagcaacctggtggtgcaccggcgcagccacacgggcgagaagccctacaagtgcaacctgtgcgaccacgcgtgcacccaggccagcaagctgaagcgccacatgaagacgcacatgcacaaatcgtcccccatgacggtcaagtccgacgacggtctctccaccgccagctccccggaacccggcaccagcgacttggtgggcagcgccagcagcgcgctcaagtccgtggtggccaagttcaagagcgagaacgaccccaacctgatcccggagaacggggacgaggaggaagaggaggacgacgaggaagaggaagaagaggaggaagaggaggaggaggagctgacggagagcgagagggtggactacggcttcgggctgagcctggaggcggcgcgccaccacgagaacagctcgcggggcgcggtcgtgggcgtgggcgacgagagccgcgccctgcccgacgtcatgcagggcatggtgctcagctccatgcagcacttcagcgaggccttccaccaggtcctgggcgagaagcataagcgcggccacctggccgaggccgagggccacagggacacttgcgacgaagactcggtggccggcgagtcggaccgcatagacgatggcactgttaatggccgcggctgctccccgggcgagtcggcctcggggggcctgtccaaaaagctgctgctgggcagccccagctcgctgagccccttctctaagcgcatcaagctcgagaaggagttcgacctgcccccggccgcgatgcccaacacggagaacgtgtactcgcagtggctcgccggctacgcggcctccaggcagctcaaagatcccttccttagcttcggagactccagacaatcgccttttgcctcctcgtcggagcactcctcggagaacgggagtttgcgcttctccacaccgcccggggagctggacggagggatctcggggcgcagcggcacgggaagtggagggagcacgccccatattagtggtccgggcccgggcaggcccagctcaaaagagggcagacgcagcgacacttgttcttcacacacccccattcggcgtagtacccagagagctcaagatgtgtggcagttttcggatggaagctcgagagcccttaagttctgagaaaatttgaagcccccaggggtggggtggacgcgtgccgcccagtcgacgtcagcgtggtctgtcatcctgcta

SEQ ID NO: 196221 - DNA, 2322 bp, Artificial Sequence
  derived and/or modified sequence
atgagcagaagaaagcagggcaagccccagcacctgagcaagagagagttcagccccgagcccctggaggccatcctgaccgacgacgagcccgaccacggccccctgggcgcccccgagggcgaccacgacctgctgacctgcggccagtgccagatgaacttccccctgggcgacatcctgatcttcatcgagcacaagagaaagcagtgcaacggcagcctgtgcctggagaaggccgtggacaagccccccagccccagccccatcgagatgaagaaggccagcaaccccgtggaggtgggcatccaggtgacccccgaggacgacgactgcctgagcaccagcagcagaggcatctgccccaagcaggagcacatcgccgacaagctgctgcactggagaggcctgagcagccccagaagcgcccacggcgccctgatccccacccccggcatgagcgccgagtacgccccccagggcatctgcaaggacgagcccagcagctacacctgcaccacctgcaagcagcccttcaccagcgcctggttcctgctgcagcacgcccagaacacccacggcctgagaatctacctggagagcgagcacggcagccccctgacccccagagtgggcatccccagcggcctgggcgccgagtgccccagccagccccccctgcacggcatccacatcgccgacaacaaccccttcaacctgctgagaatccccggcagcgtgagcagagaggccagcggcctggccgagggcagattcccccccaccccccccctgttcagccccccccccagacaccacctggacccccacagaatcgagagactgggcgccgaggagatggccctggccacccaccaccccagcgccttcgacagagtgctgagactgaaccccatggccatggagccccccgccatggacttcagcagaagactgagagagctggccggcaacaccagcagcccccccctgagccccggcagacccagccccatgcagagactgctgcagcccttccagcccggcagcaagccccccttcctggccaccccccccctgccccccctgcagagcgcccccccccccagccagccccccgtgaagagcaagagctgcgagttctgcggcaagaccttcaagttccagagcaacctggtggtgcacagaagaagccacaccggcgagaagccctacaagtgcaacctgtgcgaccacgcctgcacccaggccagcaagctgaagagacacatgaagacccacatgcacaagagcagccccatgaccgtgaagagcgacgacggcctgagcaccgccagcagccccgagcccggcaccagcgacctggtgggcagcgccagcagcgccctgaagagcgtggtggccaagttcaagagcgagaacgaccccaacctgatccccgagaacggcgacgaggaggaggaggaggacgacgaggaggaggaggaggaggaggaggaggaggaggaggagctgaccgagagcgagagagtggactacggcttcggcctgagcctggaggccgccagacaccacgagaacagcagcagaggcgccgtggtgggcgtgggcgacgagagcagagccctgcccgacgtgatgcagggcatggtgctgagcagcatgcagcacttcagcgaggccttccaccaggtgctgggcgagaagcacaagagaggccacctggccgaggccgagggccacagagacacctgcgacgaggacagcgtggccggcgagagcgacagaatcgacgacggcaccgtgaacggcagaggctgcagccccggcgagagcgccagcggcggcctgagcaagaagctgctgctgggcagccccagcagcctgagccccttcagcaagagaatcaagctggagaaggagttcgacctgccccccgccgccatgcccaacaccgagaacgtgtacagccagtggctggccggctacgccgccagcagacagctgaaggaccccttcctgagcttcggcgacagcagacagagccccttcgccagcagcagcgagcacagcagcgagaacggcagcctgagattcagcaccccccccggcgagctggacggcggcatcagcggcagaagcggcaccggcagcggcggcagcaccccccacatcagcggccccggccccggcagacccagcagcaaggagggcagaagaagcgacacctgcagcagccacacccccatcagaagaagcacccagagagcccaggacgtgtggcagttcagcgacggcagcagcagagccctgaagttctag

SEQ ID NO: 196222 - DNA, 2397 bp, Artificial Sequence
  derived and/or modified sequence
atgagcaagggcaccgacgaggacatcttcagcggcgtgagcttcttcctgaccagactgagcagatgcgagcccagcagaagacccccccccgccccccagcccaccatgagcagaagaaagcagggcaagccccagcacctgagcaagagagagttcagccccgagcccctggaggccatcctgaccgacgacgagcccgaccacggccccctgggcgcccccgagggcgaccacgacctgctgacctgcggccagtgccagatgaacttccccctgggcgacatcctgatcttcatcgagcacaagagaaagcagtgcaacggcagcctgtgcctggagaaggccgtggacaagccccccagccccagccccatcgagatgaagaaggccagcaaccccgtggaggtgggcatccaggtgacccccgaggacgacgactgcctgagcaccagcagcagaggcatctgccccaagcaggagcacatcgccgacaagctgctgcactggagaggcctgagcagccccagaagcgcccacggcgccctgatccccacccccggcatgagcgccgagtacgccccccagggcatctgcaaggacgagcccagcagctacacctgcaccacctgcaagcagcccttcaccagcgcctggttcctgctgcagcacgcccagaacacccacggcctgagaatctacctggagagcgagcacggcagccccctgacccccagagtgggcatccccagcggcctgggcgccgagtgccccagccagccccccctgcacggcatccacatcgccgacaacaaccccttcaacctgctgagaatccccggcagcgtgagcagagaggccagcggcctggccgagggcagattcccccccaccccccccctgttcagccccccccccagacaccacctggacccccacagaatcgagagactgggcgccgaggagatggccctggccacccaccaccccagcgccttcgacagagtgctgagactgaaccccatggccatggagccccccgccatggacttcagcagaagactgagagagctggccggcaacaccagcagcccccccctgagccccggcagacccagccccatgcagagactgctgcagcccttccagcccggcagcaagccccccttcctggccaccccccccctgccccccctgcagagcgcccccccccccagccagccccccgtgaagagcaagagctgcgagttctgcggcaagaccttcaagttccagagcaacctggtggtgcacagaagaagccacaccggcgagaagccctacaagtgcaacctgtgcgaccacgcctgcacccaggccagcaagctgaagagacacatgaagacccacatgcacaagagcagccccatgaccgtgaagagcgacgacggcctgagcaccgccagcagccccgagcccggcaccagcgacctggtgggcagcgccagcagcgccctgaagagcgtggtggccaagttcaagagcgagaacgaccccaacctgatccccgagaacggcgacgaggaggaggaggaggacgacgaggaggaggaggaggaggaggaggaggaggaggaggagctgaccgagagcgagagagtggactacggcttcggcctgagcctggaggccgtggtgggcgtgggcgacgagagcagagccctgcccgacgtgatgcagggcatggtgctgagcagcatgcagcacttcagcgaggccttccaccaggtgctgggcgagaagcacaagagaggccacctggccgaggccgagggccacagagacacctgcgacgaggacagcgtggccggcgagagcgacagaatcgacgacggcaccgtgaacggcagaggctgcagccccggcgagagcgccagcggcggcctgagcaagaagctgctgctgggcagccccagcagcctgagccccttcagcaagagaatcaagctggagaaggagttcgacctgccccccgccgccatgcccaacaccgagaacgtgtacagccagtggctggccggctacgccgccagcagacagctgaaggaccccttcctgagcttcggcgacagcagacagagccccttcgccagcagcagcgagcacagcagcgagaacggcagcctgagattcagcaccccccccggcgagctggacggcggcatcagcggcagaagcggcaccggcagcggcggcagcaccccccacatcagcggccccggccccggcagacccagcagcaaggagggcagaagaagcgacacctgcagcagccacacccccatcagaagaagcacccagagagcccaggacgtgtggcagttcagcgacggcagcagcagagccctgaagttctag

SEQ ID NO: 196223 - DNA, 1329 bp, Artificial Sequence
  derived and/or modified sequence
atgagcgccgagtacgccccccagggcatctgcaaggacgagcccagcagctacacctgcaccacctgcaagcagcccttcaccagcgcctggttcctgctgcagcacgcccagaacacccacggcctgagaatctacctggagagcgagcacggcagccccctgacccccagaagcaacctggtggtgcacagaagaagccacaccggcgagaagccctacaagtgcaacctgtgcgaccacgcctgcacccaggccagcaagctgaagagacacatgaagacccacatgcacaagagcagccccatgaccgtgaagagcgacgacggcctgagcaccgccagcagccccgagcccggcaccagcgacctggtgggcagcgccagcagcgccctgaagagcgtggtggccaagttcaagagcgagaacgaccccaacctgatccccgagaacggcgacgaggaggaggaggaggacgacgaggaggaggaggaggaggaggaggaggaggaggaggagctgaccgagagcgagagagtggactacggcttcggcctgagcctggaggccgccagacaccacgagaacagcagcagaggcgccgtggtgggcgtgggcgacgagagcagagccctgcccgacgtgatgcagggcatggtgctgagcagcatgcagcacttcagcgaggccttccaccaggtgctgggcgagaagcacaagagaggccacctggccgaggccgagggccacagagacacctgcgacgaggacagcgtggccggcgagagcgacagaatcgacgacggcaccgtgaacggcagaggctgcagccccggcgagagcgccagcggcggcctgagcaagaagctgctgctgggcagccccagcagcctgagccccttcagcaagagaatcaagctggagaaggagttcgacctgccccccgccgccatgcccaacaccgagaacgtgtacagccagtggctggccggctacgccgccagcagacagctgaaggaccccttcctgagcttcggcgacagcagacagagccccttcgccagcagcagcgagcacagcagcgagaacggcagcctgagattcagcaccccccccggcgagctggacggcggcatcagcggcagaagcggcaccggcagcggcggcagcaccccccacatcagcggccccggccccggcagacccagcagcaaggagggcagaagaagcgacacctgcagcagccacacccccatcagaagaagcacccagagagcccaggacgtgtggcagttcagcgacggcagcagcagagccctgaagttctag

SEQ ID NO: 196224 - protein, 146 aa, Artificial Sequence
  derived and/or modified sequence
MASAGVAAGRQAEDVLPPTSDQPLPDTKPLPPPQPPPVPAPQPQQSPAPRPQSPARAREEENYSFLPLVHNIIKCMDKDSPEVHQDLNALKSKFQEMRKLISTMPGIHLSPEQQQQQLQSLREQVRTKNELLQKYKSLCMFEIPKE

SEQ ID NO: 196225 - DNA, 441 bp, Artificial Sequence
  derived and/or modified sequence
atggcgagtgccggggttgccgcaggccggcaggcagaagacgttctaccaccaacaagtgatcaaccgttgcctgatacaaagcccctcccacctcctcagcctccccccgtcccggctccccaaccccaacagtcacctgctcctagacctcagagcccagctagagcccgggaggaggagaactactcatttctgccattggtccacaacataattaagtgtatggacaaagactcccccgaggtacaccaggatttgaatgccttaaagtcgaaattccaggaaatgagaaagctgatctctaccatgccgggcatccatttatcaccagaacagcaacagcagcaactacaaagtcttcgagaacaggttagaactaagaacgaattactgcagaagtacaagtccctgtgcatgttcgaaatacccaaagaatag

SEQ ID NO: 196226 - DNA, 441 bp, Artificial Sequence
  derived and/or modified sequence
atggccagcgctggggtggccgccggccggcaggctgaagatgtgctgccccccaccagtgaccagcccctgcctgacaccaagcccctgcccccaccccagcccccacctgtgcctgccccccagccccagcagagccctgccccccggccccagagccctgcccgggcccgggaggaggagaactacagcttcctgcccctggtgcacaacatcatcaagtgcatggacaaggacagccctgaggtgcaccaggacctgaatgccctgaagagcaagttccaggagatgaggaagctgatcagcaccatgcctggcatccacctgagccctgagcagcagcagcagcagctgcagagcctgcgggagcaggtgaggaccaagaatgagctgctgcagaagtacaagagcctgtgcatgtttgagatccccaaggagtag

SEQ ID NO: 196227 - DNA, 2223 bp, Artificial Sequence
  derived and/or modified sequence
gtagagtgcgcgacgcttttggcgacccgacctctggctaacctacccccggagccatggcctctgctggggtggcagccgggcgacaggcggaggatgtattgccgccaacgtccgaccagccgctgcctgacaccaagccgctgccgcctcctcagccgccgccggtccctgcgcctcaaccgcagcagtcgccggcgccacggcctcagtcacctgcccgcgcgagggaggaagagaactactcctttttacctttggttcacaacatcatcaaatgcatggacaaggacagcccggaggtccaccaggacctgaacgccctcaaaagcaagttccaggagatgcgcaagctcatcagcaccatgcccggcatccacctgagccccgaacagcagcagcagcagctgcagagcctccgggagcaagtcaggaccaagaatgagcttctgcaaaagtacaagagcctctgcatgttcgaaatccccaaggagtagagtgaggctgacttccttagaaagagggggaagccaatggcctgtctccccactaccatccccaaacgctccttggggcgtggttcctgtggaccccagctcagctcgtcaagctgcaggggcggggctcctgtgctgctgcgcgcgcttcgcctgtgcgggagccagcgcagagcttggctgcgccgggggttcctcgtgtagatccatatgtctagatgcataataactggagtgcctgctggtggaagtcagaatgctcctggaggctgcagagggggtggaggactctcccctgcctctggggagggggccatctgctgcgcccggccccactgacagatctgaagagcacagtaggaagggaggcggctcctctttgcttccttccctctctctcctcccacccccataggatcagtgtgtaccaggtacacattgttcctgttaacagcagcttcttgaaacatttgcatagaattcactggacgaattaagcctgcactcatatggcatagaattgtgagagaatgttttgaaaggccagagggtggcctttttccccaaacagtttggttccttttatgtttgagccagtgaagggaactacgctttgggggcttcagcctagagccctgccaggcagcccctggctccaggttccctgcctcctagcgctctcctcgccttcagctcttgctcccttcctcgttcatcaccctcagtcagtgcccaagagtggccaaaccgcttcacatctgcagtgcttccccagggttgacaaggggccgtcctttccacacaggccagaagaggtcttcaggcgaaccgaccttcccccttctggcatttcagattccccttgctctggttaaaaggtctttccctcgtggcctttgcacttgcggcagcaacgtgtactacactgcagaagggttcagtatgcaccttgtgttgagagagaggcaaccctgggggccagttcaggtggtccccaaccataagctaggtctgaaagttacacagccaagtttgagctcttaaaagttgatgaacagcctcatttccccagcttccctgatttcttccagatgggacgttttatttgtgtgctctcccttgactgtcagattgaagtaagagcagttctctccgttgcctctcgaggaggaggtgcgaagtcctggagtattgtttgggtctcggaatgggcgcataacctgcgctgaccagtttaggggcttagcagatgcctgccagctgacctcgttggcaggagggttgggtggagatgtttttagcagagcttccattagtgtagacctgtagccacctgtcagaaggtgggtggcatattggggacctgggaatgtgtgaaggaggagatcaaatttcagtggctttggacagaaaagaaggctctggatttaagcgggtggtcacctgtgagaccaggtctaccttgggactgttatttaactgaatcagttatttccttgaaatttcacagtagtgggtgggcctgttttaaggctctgacagataccacgaaacatgaagcacgtggaactacaagacccccggggtctttctgagtgcaaggctgaaatggacaagggctcctcacgggggtggagggagccggagcctgccttgtgttccttttttgacttgtgacatttttcaaacacataattaaaaggacttatgctctgctgtctcagga

SEQ ID NO: 196228 - DNA, 441 bp, Artificial Sequence
  derived and/or modified sequence
atggccagcgccggcgtggccgccggccggcaggccgaggacgtgctgccaccaacttccgaccagccactgcccgacacgaagcccctgcccccaccacagcctccgcccgttcctgcaccccagccccagcagtctcccgccccccgaccacaatcccccgctcgagcaagggaagaagaaaactactcatttctgccgctcgtgcacaatattataaagtgcatggacaaagactcaccagaggtgcaccaggacctgaacgctctgaaaagtaagtttcaggaaatgcggaaactgatatccacaatgcctggcatccacctttctccagagcagcagcagcagcagctccagtcacttagggaacaggtgcgtacgaaaaatgagctgttgcagaaatacaaatcactgtgtatgttcgagatccccaaggaatag

SEQ ID NO: 196229 - DNA, 441 bp, Artificial Sequence
  derived and/or modified sequence
atggcgtcagccggagtagcagccggaagacaggcggaagacgtgctgccgcctaccagtgaccagccactacccgacacgaagcccctgcccccaccacaaccgccacctgtgccggcacctcaaccacagcagtcacccgcaccccgtccccagagccccgcacgagcccgagaggaggaaaattactccttcctacctttggtgcacaatattattaagtgcatggataaggactcaccagaggttcaccaggatctcaatgcactcaaatctaaatttcaggaaatgagaaagctcatctctacgatgccagggatccatctgtctcctgagcagcaacagcagcaattacaatccctgagggagcaagtgcgtacaaagaacgaactactgcagaagtataaaagcctttgcatgttcgaaatccctaaggagtag

SEQ ID NO: 196230 - DNA, 441 bp, Artificial Sequence
  derived and/or modified sequence
atggccagcgccggcgtggccgccggcagacaggccgaggacgtgctgccccccaccagcgaccagcccctgcccgacaccaagcccctgccccccccccagcccccccccgtgcccgccccccagccccagcagagccccgcccccagaccccagagccccgccagagccagagaggaggagaactacagcttcctgcccctggtgcacaacatcatcaagtgcatggacaaggacagccccgaggtgcaccaggacctgaacgccctgaagagcaagttccaggagatgagaaagctgatcagcaccatgcccggcatccacctgagccccgagcagcagcagcagcagctgcagagcctgagagagcaggtgagaaccaagaacgagctgctgcagaagtacaagagcctgtgcatgttcgagatccccaaggagtag

SEQ ID NO: 196231 - protein, 931 aa, Artificial Sequence
  derived and/or modified sequence
MAARDSDSEEDLVSYGTGLEPLEEGERPKKPIPLQDQTVRDEKGRYKRFHGAFSGGFSAGYFNTVGSKEGWTPSTFVSSRQNRADKSVLGPEDFMDEEDLSEFGIAPKAIVTTDDFASKTKDRIREKARQLAAATAPIPGATLLDDLITPAKLSVGFELLRKMGWKEGQGVGPRVKRRPRRQKPDPGVKIYGCALPPGSSEGSEGEDDDYLPDNVTFAPKDVTPVDFTPKDNVHGLAYKGLDPHQALFGTSGEHFNLFSGGSERAGDLGEIGLNKGRKLGISGQAFGVGALEEEDDDIYATETLSKYDTVLKDEEPGDGLYGWTAPRQYKNQKESEKDLRYVGKILDGFSLASKPLSSKKIYPPPELPRDYRPVHYFRPMVAATSENSHLLQVLSESAGKATPDPGTHSKHQLNASKRAELLGETPIQGSATSVLEFLSQKDKERIKEMKQATDLKAAQLKARSLAQNAQSSRAQLSPAAAAGHCSWNMALGGGTATLKASNFKPFAKDPEKQKRYDEFLVHMKQGQKDALERCLDPSMTEWERGRERDEFARAALLYASSHSTLSSRFTHAKEEDDSDQVEVPRDQENDVGDKQSAVKMKMFGKLTRDTFEWHPDKLLCKRFNVPDPYPDSTLVGLPRVKRDKYSVFNFLTLPETASLPTTQASSEKVSQHRGPDKSRKPSRWDTSKHEKKEDSISEFLSLARSKAEPPKQQSSPLVNKEEEHAPELSANQTVNKDVDAQAEGEGSRPSMDLFRAIFASSSDEKSSSSEDEQGDSEDDQAGSGEANFQSSQDTDLGETSSVAHALVPAPQEPPPSFPIQKMQIDEREEFGPRLPPVFCPNARQTLEVPQKEKHKKNKDKHKAKKEHRRKKEKKKKHRKHKHKGKQKNKKPEKSSSSESSDSSDSQSDEETADVSPQELLRRLKSLPLRRQ

SEQ ID NO: 196232 - DNA, 2796 bp, Artificial Sequence
  derived and/or modified sequence
atggccgcacgtgatagtgatagcgaagaggatctagtctcttatggaaccggcttagaaccattggaagaaggagaacgccccaagaaaccaatcccactgcaagaccagaccgtgcgagacgaaaaggggcgctacaaaagattccacggagctttttcagggggcttttcagcggggtacttcaacacggtgggcagcaaggagggctggacaccatccacgtttgtgtcaagtcggcagaaccgggccgacaagtccgtcctggggcctgaggactttatggatgaagaagacctgagcgagtttgggattgctcctaaggcgattgtgacaacagacgattttgcgagtaagactaaggatagaatccgtgagaaagcccgccaactggccgccgcaacagcgcctatccctggtgctacactgctagacgatttgatcacccctgcgaaacttagcgtgggcttcgagctgttgcggaagatgggctggaaagagggacagggtgtgggacctagggtaaaacgccgccccagacgacaaaagcccgacccaggagtgaaaatttacggttgcgctttgcctcccggctcctccgagggatccgagggcgaggacgacgattacctgccagataacgtaaccttcgcccccaaggatgtgaccccagtcgatttcacccccaaagataacgttcatgggctggcatacaagggacttgatccacatcaggccttgtttggaacatctggggagcacttcaatctcttttccggaggatcggagagagccggagatctgggtgagattggccttaacaaaggccgaaagttgggaatctctgggcaagcctttggcgtcggtgctttagaggaagaagacgatgatatttatgctacagaaacactgagtaaatatgacaccgtgctgaaggacgaggagccaggggatgggctttatggatggaccgccccacgacaatataagaatcaaaaggagagcgagaaggatttgaggtatgtgggtaagattctggacggattctctctggcctcaaaaccactttcaagcaagaagatttaccctccccccgagctgcccagagactatcgtccagttcactatttcagacctatggttgccgccaccagcgagaacagtcacttattgcaggtgttgagcgaatcagccggcaaggccacacccgaccccggtacccatagtaagcaccagctaaacgcgtccaaacgtgcagaactgctcggagaaacacctatccagggcagcgccactagtgtcctggaattcctcagccagaaggataaagaaaggatcaaagaaatgaagcaggctacagatcttaaggcagctcagttaaaggctaggtcactcgcccaaaacgcccaaagtagtcgggctcagctgtccccggcagcggctgctgggcattgtagttggaatatggccctcgggggtggtaccgccaccttaaaagcctctaatttcaaacccttcgctaaagatcccgagaagcaaaagcggtacgatgagttcctggttcacatgaaacaaggccagaaagatgccctggagagatgtctggacccaagtatgaccgaatgggaacggggtcgcgaacgggacgagttcgcccgggctgcccttctgtacgcctctagtcacagtaccttgagttcgcgtttcacacatgccaaggaagaggacgattctgatcaggttgaagtaccacgagatcaagaaaacgatgtcggggataagcagtccgccgtcaagatgaaaatgttcggaaagctgacccgtgacacctttgagtggcacccagataaactcttgtgtaaacggtttaacgttccagacccctaccctgattcgactctcgttggtttaccgcgcgtgaagcgcgataagtacagcgtttttaactttctgaccctaccggagacggcctcactgccgacaacccaggccagcagcgaaaaagtgtctcagcacagaggccccgacaagtcacgaaagcctagccgctgggatacatcaaagcatgaaaagaaagaggactcaatatctgaattcctctcactggccaggagcaaggccgaaccaccgaagcaacagagcagcccactcgtgaataaggaggaggagcacgctcctgagctttccgcgaaccagaccgtaaacaaggatgtggacgctcaggccgaaggagaaggaagtaggccatccatggacctttttcgggctatttttgcctcgagctcagatgagaagtcaagttcatctgaagacgaacagggcgatagtgaggatgatcaggcaggctcaggcgaagctaacttccaaagttctcaggacaccgaccttggtgaaaccagctcagtggcacatgctctcgttccagccccacaggagccaccccccagctttccaatacagaaaatgcagattgatgaacgggaagagttcggccctaggctgccccccgtgttctgccctaacgcccgccaaacccttgaggtgccacaaaaggagaagcataaaaagaataaagacaagcacaaagctaagaaggagcatcggcgcaaaaaagaaaagaagaagaagcatagaaagcacaagcacaagggcaagcagaagaacaagaagcccgagaagtcttcgtccagcgagagttctgacagcagtgatagtcagagcgacgaagagacggctgacgtttcaccccaggagctcctgcggcggctcaagtcccttcccctgcggcgacagtag

SEQ ID NO: 196233 - DNA, 2796 bp, Artificial Sequence
  derived and/or modified sequence
atggccgcccgggacagcgacagcgaggaggacctggtgtcctatggaacaggcctggagcccctggaggagggggagcggcccaagaagcccatccccctgcaggaccagacagtgagagatgagaagggccgctacaagcgcttccacggggccttcagcggcggcttctctgctggctacttcaacacagtgggcagcaaggagggctggacccccagcacctttgtgagcagccggcagaacagagctgacaagtctgtgctgggccctgaggacttcatggatgaggaggacctgtctgaatttggaattgcccccaaggccatcgtgaccacagatgactttgccagcaagaccaaggaccgcatccgggagaaggcccggcagctggccgccgccacagcccccatccctggggccaccctgctggatgacctgatcaccccagccaagctgtctgtgggctttgagctgctgaggaagatgggctggaaggagggccagggcgtgggcccccgggtgaagagaagaccccggcggcagaagccagaccccggggtgaagatctacggctgtgccctgcccccaggcagcagcgagggcagcgagggggaggatgatgactacctgcctgacaacgtgacctttgcccccaaggatgtgacccctgtggacttcacccccaaggacaacgtgcacggcctggcctacaagggcctggacccccaccaggccctgtttggcaccagcggggagcacttcaacctcttcagcggcggcagcgagagagctggggacctgggggagatcggcctgaacaagggcaggaagctgggcatcagcggccaggccttcggcgtgggcgccctggaggaggaggatgatgacatctatgccacagagaccctgagcaaatatgacacagtgctgaaggatgaggagcctggagatggcctgtatggctggacagccccccggcagtacaagaaccagaaggagagcgagaaggacctgcgctacgtgggcaagatcctggatggcttcagcctggccagcaagcccctgagcagcaagaagatctacccacctcctgagctgccccgggactacagacctgtgcactacttccggcccatggtggccgccaccagcgagaacagccacctgctgcaggtgctgtctgagagcgctgggaaggccaccccagaccccggcacccacagcaagcaccagctgaatgccagcaagagagctgagctgctgggggagacccccatccagggcagcgccacctctgtgctggagttcctgagccagaaggacaaggagcgcatcaaggagatgaagcaggccacagacctgaaggccgcccagctgaaggcccggagcctggcccagaatgcccagagcagccgggcccagctgagccctgctgctgctgctggccactgctcctggaacatggccctgggcggcggcacagccaccctgaaggccagcaacttcaagccctttgccaaggaccctgagaagcagaagagatatgatgagttcctggtgcacatgaagcagggccagaaggatgccctggagcgctgcctggaccccagcatgacagagtgggagcggggccgggagagagatgaatttgcccgggccgccctgctgtatgccagcagccacagcaccctgagcagccgcttcacccacgccaaggaggaggatgacagcgaccaggtggaggtgccccgggaccaggagaatgatgtgggggacaagcagagcgctgtgaagatgaagatgtttgggaagctgacccgggacacctttgagtggcacccagacaagctgctgtgcaagcgcttcaacgtgcctgacccctacccagacagcaccctggtgggcctgccccgggtgaagagggacaagtacagcgtcttcaacttcctgaccctgcctgagacagccagcctgcccaccacccaggccagcagcgagaaggtgtcccagcaccggggccctgacaagagcaggaagcccagccgctgggacaccagcaagcatgagaagaaggaggacagcatcagcgagttcctgagcctggcccggagcaaggccgagccccccaagcagcagagcagccccctggtgaacaaggaggaggagcacgcccctgagctgagcgccaaccagacagtgaacaaggatgtggatgcccaggccgagggggagggcagccggcccagcatggacctcttccgggccatctttgccagcagcagtgatgagaagagcagcagcagtgaagatgagcagggcgacagtgaagatgaccaggccggcagcggggaggccaacttccagagcagccaggacacagacctgggggagaccagctctgtggcccacgccctggtgcctgccccccaggagcccccacccagcttccccatccagaagatgcagattgatgagcgggaggagtttggcccccggctgccccctgtgttctgccccaatgcccggcagaccctggaggtgccccagaaggagaagcacaagaagaacaaggacaagcacaaggccaagaaggagcacaggaggaagaaggagaagaagaagaagcacaggaagcacaagcacaagggcaagcagaagaacaagaagccagagaagagcagcagcagcgagagcagtgacagcagtgacagccagagtgatgaggagacagcagatgtgagcccccaggagctgctgcggcggctgaagagcctgcccctgcggcggcagtag

SEQ ID NO: 196234 - DNA, 2796 bp, Artificial Sequence
  derived and/or modified sequence
atggccgcccgggacagcgacagcgaggaggacctggtgagctacggcactggactcgaaccgctcgaagagggggagagacccaaaaaacccattccattgcaggaccagactgttagggacgagaaaggccggtacaaaaggttccacggtgcatttagtgggggcttttcagctggttacttcaacacagttggctctaaagaggggtggacgccgtcaacttttgtgtcgtcaagacagaatcgcgcagacaagtcagtcttgggcccagaggatttcatggatgaggaggatctgtccgagttcggcattgccccaaaagctatcgtgaccacggatgacttcgcatccaagacaaaagaccgcatccgggaaaaagcgcggcaactggcagcagccaccgcccctattcccggagctacactcctggatgacttgatcacccctgccaagctttcagtgggcttcgagcttctccgaaaaatgggatggaaggagggtcagggggtgggcccaagagttaagcgcaggcctaggaggcagaaaccagatcctggagtgaaaatttatggctgcgctctccctcctggtagttctgagggcagcgaaggagaagacgatgactatcttccagataatgtgacttttgcgcctaaggacgtgaccccagtagatttcacccccaaggacaacgtgcacgggctcgcatacaaagggctggatccacaccaagctcttttcggtaccagcggtgaacattttaacctgttcagcggggggtctgaacgtgccggtgatttaggagaaattgggctcaataaagggagaaagcttggtatcagcggccaggcattcggagttggggccttggaggaggaagatgatgacatttatgcaactgagacactgagcaagtacgatacggtgttaaaagatgaggagcctggagatggtctttatggctggactgccccccgccagtacaaaaatcaaaaggagagcgaaaaggacctcagatatgtgggcaaaatcctggatgggttctcccttgcttccaagccgttgagctcaaagaaaatttaccctccgcccgagttgccacgcgattatagacccgtgcactatttccgacccatggtggcggccacttccgaaaacagccacctgctgcaggttctatctgaatcagccggaaaagccacccctgatcctggcacacactccaaacatcagctaaacgcctctaagcgtgccgagttgcttggcgaaacccccatccagggcagtgctacatctgtgctggaatttctcagtcagaaagacaaagagagaataaaagaaatgaagcaagcaacagaccttaaggctgcacagctcaaggctcgaagcctggctcagaatgctcagtcctctcgagcacagctatcacccgctgcagccgccggccactgttcttggaatatggccttaggcggcggaactgcaacgctcaaggcctccaactttaagcccttcgccaaagatcccgaaaagcagaagcgctatgacgagtttttggtccatatgaagcaggggcaaaaggatgccctcgaaaggtgcctcgatccaagtatgactgaatgggagcgaggccgggaacgggatgagttcgctcgggctgctctcctctatgccagctcgcattcaacccttagcagccgatttacccacgctaaagaagaggacgatagtgaccaagtggaggtgccacgggaccaagaaaatgacgtgggcgataaacagtctgcagtcaaaatgaagatgtttggcaaacttaccagagacacatttgagtggcaccccgataagctgctctgcaaaagatttaacgtgcccgacccttatcccgatagcaccctggtgggccttccacgagtgaagcgtgataaatatagcgtcttcaatttcttgaccttgccggagacagcttcactaccaactactcaagcttctagtgagaaagtaagtcagcaccgtggacctgacaaatctagaaaaccctctcggtgggataccagtaagcacgaaaagaaggaggacagtatatcggaatttctcagcctcgcccggtcgaaagctgaacctccaaaacagcagtcatctccactggtcaataaggaggaggaacacgcacccgaactttcagccaaccagacagtgaataaggatgtggacgcccaggctgagggggagggttcgcggccaagcatggaccttttccgggcgatttttgcgtcatccagcgacgagaagagcagctccagcgaggatgaacagggggacagtgaagatgatcaggcaggcagcggggaggccaatttccagagctctcaggacaccgatcttggggaaacatcttcagtcgcccatgctctggtcccagcgccacaggagccacccccaagtttccccatacagaaaatgcagatcgatgaacgagaggagttcgggcccagactgccgccagttttttgccctaacgcgcgacaaaccctcgaagtgcctcagaaggagaagcataagaagaacaaagacaaacacaaggccaaaaaagagcatcgcaggaagaaagaaaagaaaaaaaagcacagaaagcataaacacaaaggcaaacagaaaaacaagaaaccggagaaatcgagtagcagtgaatcctcagattcatctgactcccagtccgacgaggaaaccgcagacgtctcccctcaggagctcctgagacgcctcaagagtttgcccttgagaaggcagtag

SEQ ID NO: 196235 - DNA, 2796 bp, Artificial Sequence
  derived and/or modified sequence
atggccgctagagacagcgatagtgaggaggacctcgtaagctatggtaccgggctggagcccctggaagagggggaaagacccaagaaacctatccctttacaggaccagacagtcagagatgaaaaaggccgatacaagcgcttccacggagcgttcagcgggggttttagcgcaggttatttcaacaccgtcgggagcaaagagggctggaccccaagcaccttcgtctcgagtagacagaatcgggctgataagtccgtcctcgggcctgaagatttcatggacgaggaggacctgtcggaatttgggattgctccgaaggccatcgtgacgacggatgactttgcttctaaaacaaaggaccgcattagagagaaagccagacagctggccgcagccacagccccaatccccggtgctactttgttggacgatttgatcactccagcaaagttatccgttggcttcgaactgctgcgcaagatgggctggaaagagggccaaggcgtgggccctagggtgaagcgcagacctagaagacagaagccagacccaggagtgaagatttacgggtgcgctctacccccaggttcttcagaggggtctgaaggcgaagatgacgattatttgcccgataatgtcacctttgcacctaaggacgtcacgcccgtcgatttcactcctaaggataacgtgcatggtcttgcttacaagggcttagatccacaccaggccctctttggcacctcgggtgaacacttcaatctcttcagcggcggttcagagagagctggtgatctgggagagatcggtctgaacaaaggaagaaagctcgggatctccggtcaggctttcggcgtgggagccctcgaggaagaggatgacgatatctacgccaccgagaccctgagtaagtatgatacagtgcttaaagacgaagagcctggggacggtctgtatggatggactgctcctcggcagtacaaaaatcaaaaagagagcgagaaagacctgagatatgttggcaaaattttggacggattctctctcgcctctaagccgctttccagtaaaaagatatacccccctcccgaactgcctcgcgactaccgcccagttcactatttccggcctatggttgccgcaacatccgagaactcacatctgctccaggtcctgtcagagtccgcgggaaaggccaccccagatcccggaacacattccaaacatcaactcaatgctagtaagagagctgagctccttggtgagactcccatccagggctccgcaacaagtgttctcgaatttctgagtcagaaagacaaagaacgcattaaagagatgaagcaggctaccgatctgaaggcagcccagctcaaagcgagaagcctagcccagaacgcacaatcctcccgtgctcagctgtcccccgctgccgctgccggacattgttcatggaacatggctttgggtgggggaaccgctacccttaaggcctcaaattttaaacctttcgcaaaggatcctgaaaaacaaaaaagatatgatgaatttctggtacacatgaagcagggacagaaggacgctctcgagcggtgcttggatcccagcatgaccgagtgggaaaggggtcgcgaacgagacgagttcgcccgtgccgctctgctgtacgcatcttcgcatagcacactctcaagcaggttcactcacgccaaagaggaagacgattccgaccaggttgaggtgccaagagatcaggaaaacgacgtgggagacaaacagagcgccgtcaaaatgaaaatgtttggaaagctgactagagacactttcgaatggcacccagacaaactgctgtgcaaaagatttaacgttcccgatccttacccagactctaccctggtgggattgccccgtgtgaaacgggataaatattcagtgtttaatttcctgaccttgcctgagacagctagcctaccgacgacccaggcctctagtgagaaagtcagccaacaccggggaccagacaagtctcgtaagccctcacgctgggatacttccaagcatgaaaaaaaagaagattccatttccgagtttctcagcctggctagatcaaaagccgagcctcctaagcagcagtcatccccattggtcaacaaagaagaggaacatgctcccgagctgagcgctaatcaaacagtaaataaagatgttgacgcacaggcggaaggagaggggtcgcgacctagtatggatctgtttcgggcaatcttcgcaagctcctccgacgaaaagtccagcagcagcgaagatgagcagggggactctgaggatgatcaggccggatctggcgaggctaacttccagtccagtcaagacacagacttgggagagaccagctcagttgcacatgctctagtccccgctccacaagagccccctccgagctttcctatacaaaagatgcaaatagatgagcgggaagagttcggtcccaggctgccacccgtcttctgtcccaatgcacggcagactttagaggtgcctcagaaagagaaacataagaagaataaagacaagcacaaggccaaaaaggagcataggcgtaaaaaggaaaagaaaaagaagcatagaaagcacaaacataaaggaaaacagaaaaacaaaaagcctgaaaagagttcaagcagtgagtcaagcgactccagcgacagccagtctgacgaagagaccgccgatgtgtctcctcaggaactccttcggagacttaagtcgctccccttgaggcggcaatag

SEQ ID NO: 196236 - DNA, 3362 bp, Artificial Sequence
  derived and/or modified sequence
caggcatcggtgtcgcctcgcagggaacagttgggtggcttccagcttatgccaggagtctcctcctcacccgcacatcgcggggctaggatgggatgtcgtggctgccaaatcctccgaggcaactcctgcctgggacggcctaccacaggatgggcctgagaatccggagcgcaggctcgggccgctaggacaccttcccccgcccgcggacccagccttccagcatcaccggggttcgcggaggagaaagaggaaaggcgtttggcctgccaaggccgccgtagcgagggggcggggcccggaagagcaggatggcggcgcgggacagtgacagcgaagaagatctggtcagctatgggaccgggctggagcctctggaagaaggtgaaagaccaaagaaaccaatccctcttcaggatcagactgtcagagatgaaaaaggaaggtataaacgattccacggggcctttagtggaggtttctctgctggatacttcaatactgttggctcaaaagaaggatggacaccctctacctttgtgtcttcacgacagaacagagcagacaaatctgttcttggtcctgaagattttatggatgaagaggatcttagtgaatttgggatagcacctaaagcgattgtcaccacagacgattttgcctccaaaaccaaagacagaatacgagaaaaggctaggcagttggccgctgctactgcccctattcctggagccaccctccttgatgacctcataacgccagcaaaattatctgttggtttcgaattgctaagaaaaatgggttggaaagaaggacaaggagttggtcctcgagtaaagagacggccacgccgacagaaacctgatcctggagtcaaaatctatggctgtgcattaccccctggaagctcggaaggatctgagggtgaagatgatgactacttgcctgataatgtgacctttgcacccaaagatgtcacacctgtggatttcacacctaaagataatgtgcatggtctagcttacaagggcctggatccccaccaggcactgtttggaacttcgggagaacattttaatcttttcagtggtggttctgagagagctggcgatcttggagaaattggactgaataaaggaagaaaattgggaatttcaggccaggcttttggtgtaggtgccctggaagaggaagatgatgatatctatgccacagaaactctatccaagtatgacactgttctgaaggacgaggagcctggagacggactctatggctggacagcacccaggcagtataaaaaccagaaagaatcagagaaagaccttcggtacgttggcaaaattttggatggattttccttggcttctaaacctttatcttctaagaaaatctatccacctccagagctgccaagagactatcgaccagtgcattatttcagacccatggtggccgccacctccgagaactcacacttactgcaggtattatcagagtcagctggaaaggcaacgcctgacccagggacacacagtaagcaccaactgaatgcctccaaacgggctgagttgcttggagagacgcctattcaaggttcagctacttcagtgttagaatttctgtcccaaaaagacaaagagagaatcaaagaaatgaagcaggcaactgacctgaaagcagctcagctcaaggccaggagtctggcccagaacgctcagagcagcagagcccagctctcccctgcagcggctgctgggcactgctcttggaacatggcattaggtggtgggacggccaccttaaaagccagcaacttcaagcctttcgccaaagatccggaaaagcaaaagcgatacgacgagttcttagtacacatgaaacagggtcagaaagatgctctggaacgctgtctggaccccagcatgacagagtgggagcgaggccgtgagcgggatgagtttgcccgggcggccctgctgtacgcatcttcccattcgaccttgtcctccaggttcactcacgccaaggaggaggatgactcagatcaggttgaagtccctcgagaccaagagaatgatgtcggggataagcagtcggctgtgaagatgaagatgtttgggaagctcacccgagacacgtttgagtggcaccctgacaagcttctatgtaagagatttaatgtccctgacccttatccagattcaactttagttggcttaccaagagtgaagcgtgacaagtactcagtcttcaactttctgacgctcccagagacagcttccttgcccaccactcaagcatcaagtgaaaaagtatcacagcaccgaggtcccgacaaatcaagaaaaccatccagatgggatacctctaaacacgaaaagaaagaagattccattagtgaatttttaagtttggctagatcaaaagccgagccacctaaacaacagtccagccccttagtaaacaaagaggaagagcatgcaccagaattatccgcaaatcagaccgtcaacaaagatgtggacgcacaggctgaaggagaagggagccgcccatccatggacttattcagggccatctttgccagttcctcagatgaaaagtcctcatcctccgaggatgagcaaggtgacagtgaagatgatcaggcaggctctggggaggccaacttccaaagctcccaagacactgacttgggggaaacatcatctgtggctcacgctcttgtgccagcaccccaggagccgccaccttccttcccgatacaaaagatgcagatagatgaaagagaagagttcggcccgcggctgcctcccgtcttctgccccaatgctcgtcagacacttgaggttcctcaaaaagagaaacataaaaagaacaaagacaagcacaaggccaagaaagagcacaggcggaagaaagagaagaaaaagaaacacaggaagcacaaacacaaaggcaagcaaaagaataaaaaaccagagaaaagtagtagctccgagagttccgacagcagcgacagccagagtgacgaggaaaccgcagacgtgtcgccccaggagctgctgagacggctgaaaagtcttccactaagaaggcagtaattgaatgctgccctggctcgtcctagaatcatttctcctccatgatggaagcccagtgattgttcagttaacgcattgtacagagtgtatttatatgtaaattcctgctgtaaaataatttttaaaaccttgacatttcaaagactgccttgaaaggtcgcagaaattgatttctatttttaatttcagttagtatcgggggaaaaaaatccagactgaacagtttaattaaagtggaatttttctattttc

SEQ ID NO: 196237 - DNA, 2796 bp, Artificial Sequence
  derived and/or modified sequence
atggccgccagagacagcgacagcgaggaggacctggtgagctacggcaccggcctggagcccctggaggagggcgagagacccaagaagcccatccccctgcaggaccagaccgtgagagacgagaagggcagatacaagagattccacggcgccttcagcggcggcttcagcgccggctacttcaacaccgtgggcagcaaggagggctggacccccagcaccttcgtgagcagcagacagaacagagccgacaagagcgtgctgggccccgaggacttcatggacgaggaggacctgagcgagttcggcatcgcccccaaggccatcgtgaccaccgacgacttcgccagcaagaccaaggacagaatcagagagaaggccagacagctggccgccgccaccgcccccatccccggcgccaccctgctggacgacctgatcacccccgccaagctgagcgtgggcttcgagctgctgagaaagatgggctggaaggagggccagggcgtgggccccagagtgaagagaagacccagaagacagaagcccgaccccggcgtgaagatctacggctgcgccctgccccccggcagcagcgagggcagcgagggcgaggacgacgactacctgcccgacaacgtgaccttcgcccccaaggacgtgacccccgtggacttcacccccaaggacaacgtgcacggcctggcctacaagggcctggacccccaccaggccctgttcggcaccagcggcgagcacttcaacctgttcagcggcggcagcgagagagccggcgacctgggcgagatcggcctgaacaagggcagaaagctgggcatcagcggccaggccttcggcgtgggcgccctggaggaggaggacgacgacatctacgccaccgagaccctgagcaagtacgacaccgtgctgaaggacgaggagcccggcgacggcctgtacggctggaccgcccccagacagtacaagaaccagaaggagagcgagaaggacctgagatacgtgggcaagatcctggacggcttcagcctggccagcaagcccctgagcagcaagaagatctaccccccccccgagctgcccagagactacagacccgtgcactacttcagacccatggtggccgccaccagcgagaacagccacctgctgcaggtgctgagcgagagcgccggcaaggccacccccgaccccggcacccacagcaagcaccagctgaacgccagcaagagagccgagctgctgggcgagacccccatccagggcagcgccaccagcgtgctggagttcctgagccagaaggacaaggagagaatcaaggagatgaagcaggccaccgacctgaaggccgcccagctgaaggccagaagcctggcccagaacgcccagagcagcagagcccagctgagccccgccgccgccgccggccactgcagctggaacatggccctgggcggcggcaccgccaccctgaaggccagcaacttcaagcccttcgccaaggaccccgagaagcagaagagatacgacgagttcctggtgcacatgaagcagggccagaaggacgccctggagagatgcctggaccccagcatgaccgagtgggagagaggcagagagagagacgagttcgccagagccgccctgctgtacgccagcagccacagcaccctgagcagcagattcacccacgccaaggaggaggacgacagcgaccaggtggaggtgcccagagaccaggagaacgacgtgggcgacaagcagagcgccgtgaagatgaagatgttcggcaagctgaccagagacaccttcgagtggcaccccgacaagctgctgtgcaagagattcaacgtgcccgacccctaccccgacagcaccctggtgggcctgcccagagtgaagagagacaagtacagcgtgttcaacttcctgaccctgcccgagaccgccagcctgcccaccacccaggccagcagcgagaaggtgagccagcacagaggccccgacaagagcagaaagcccagcagatgggacaccagcaagcacgagaagaaggaggacagcatcagcgagttcctgagcctggccagaagcaaggccgagccccccaagcagcagagcagccccctggtgaacaaggaggaggagcacgcccccgagctgagcgccaaccagaccgtgaacaaggacgtggacgcccaggccgagggcgagggcagcagacccagcatggacctgttcagagccatcttcgccagcagcagcgacgagaagagcagcagcagcgaggacgagcagggcgacagcgaggacgaccaggccggcagcggcgaggccaacttccagagcagccaggacaccgacctgggcgagaccagcagcgtggcccacgccctggtgcccgccccccaggagcccccccccagcttccccatccagaagatgcagatcgacgagagagaggagttcggccccagactgccccccgtgttctgccccaacgccagacagaccctggaggtgccccagaaggagaagcacaagaagaacaaggacaagcacaaggccaagaaggagcacagaagaaagaaggagaagaagaagaagcacagaaagcacaagcacaagggcaagcagaagaacaagaagcccgagaagagcagcagcagcgagagcagcgacagcagcgacagccagagcgacgaggagaccgccgacgtgagcccccaggagctgctgagaagactgaagagcctgcccctgagaagacagtag

SEQ ID NO: 196238 - DNA, 60 bp, Artificial Sequence
  derived and/or modified sequence
tggatttttatttttaagtgttccgtgatgtacgtgcacttcttttttgcttttttttag

SEQ ID NO: 196239 - protein, 963 aa, Artificial Sequence
  derived and/or modified sequence
MAERGGAGGGPGGAGGGSGQRGSGVAQSPQQPPPQQQQQQPPQQPTPPKLAQATSSSSSTSAAAASSSSSSTSTSMAVAVASGSAPPGGPGPGRTPAPVQMNLYATWEVDRSSSSCVPRLFSLTLKKLVMLKEMDKDLNSVVIAVKLQGSKRILRSNEIVLPASGLVETELQLTFSLQYPHFLKRDANKLQIMLQRRKRYKNRTILGYKTLAVGLINMAEVMQHPNEGALVLGLHSNVKDVSVPVAEIKIYSLSSQPIDHEGIKSKLSDRSPDIDNYSEEEEESFSSEQEGSDDPLHGQDLFYEDEDLRKVKKTRRKLTSTSAITRQPNIKQKFVALLKRFKVSDEVGFGLEHVSREQIREVEEDLDELYDSLEMYNPSDSGPEMEETESILSTPKPKLKPFFEGMSQSSSQTEIGSLNSKGSLGKDTTSPMELAALEKIKSTWIKNQDDSLTETDTLEITDQDMFGDASTSLVVPEKVKTPMKSSKTDLQGSASPSKVEGVHTPRQKRSTPLKERQLSKPLSERTNSSDSERSPDLGHSTQIPRKVVYDQLNQILVSDAALPENVILVNTTDWQGQYVAELLQDQRKPVVCTCSTVEVQAVLSALLTRIQRYCNCNSSMPRPVKVAAVGGQSYLSSILRFFVKSLANKTSDWLGYMRFLIIPLGSHPVAKYLGSVDSKYSSSFLDSGWRDLFSRSEPPVSEQLDVAGRVMQYVNGAATTHQLPVAEAMLTCRHKFPDEDSYQKFIPFIGVVKVGLVEDSPSTAGDGDDSPVVSLTVPSTSPPSSSGLSRDATATPPSSPSMSSALAIVGSPNSPYGDVIGLQVDYWLGHPGERRREGDKRDASSKNTLKSVFRSVQVSRLPHSGEAQLSGTMAMTVVTKEKNKKVPTIFLSKKPREKEVDSKSQVIEGISRLICSAKQQQTMLRVSIDGVEWSDIKFFQLAAQWPTHVKHFPVGLFSGSKAT

SEQ ID NO: 196240 - protein, 91 aa, Artificial Sequence
  derived and/or modified sequence
MAMTVVTKEKNKKVPTIFLSKKPREKEVDSKSQVIEGISRLICSAKQQQTMLRVSIDGVEWSDIKFFQLAAQWPTHVKHFPVGLFSGSKAT

SEQ ID NO: 196241 - DNA, 2892 bp, Artificial Sequence
  derived and/or modified sequence
atggccgagagaggcggcgccggaggcggtcctggaggtgctgggggcggatcggggcagagaggaagcggagtcgcacaatctccccagcagcccccaccccagcaacaacagcaacagccccctcagcagcccacaccccccaagctggcacaggccacctcctcttcgtcgagcacatccgccgccgcagcatcctcttcctccagttcaacaagcaccagcatggccgtggccgtagcttccggcagcgccccccccggcggcccgggacccggtaggaccccggcccccgtccagatgaatttgtatgctacatgggaagtagacaggtcaagtagcagctgcgtgccccggctgttctctttaactttaaaaaagctagttatgctgaaagagatggacaaggacctgaacagcgtggtgatagcagttaaactccaaggcagtaaacgaatcctccggtccaacgagatagtcttgcccgcatctgggctggtggagacagagctgcagctgactttctccctccagtatccacactttttgaagagggacgctaataagctccagattatgcttcaacggagaaagagatacaaaaaccgtaccatactggggtataaaaccctcgcggtcggtctcattaacatggccgaagtcatgcagcaccctaatgagggcgcactggtgctgggactgcactctaatgtcaaggacgtgtccgttcccgtggctgaaatcaaaatttattcactgagtagtcagcccatcgatcacgagggaattaaatctaaactgtcagacagatctccggacatagacaactactcagaggaggaagaggagtctttctcgagcgagcaggagggttctgatgatcctcttcacggtcaggatctgttctacgaagacgaggatctgagaaaagtcaagaagaccaggaggaagctgacctcaacttcagctatcacccgccagcctaatatcaagcaaaaatttgttgccctgctgaaaaggttcaaggtttcagatgaggtgggcttcggattggaacacgtgagccgagaacagattagggaagtggaagaggatttggatgagctgtacgacagtttggaaatgtacaatccaagtgacagcggacccgaaatggaggagaccgaaagcatcctgtccacgccaaaaccaaagctcaaaccattcttcgagggtatgtcgcagagttcgagtcaaacggaaatcgggtcattaaacagtaagggatccctaggaaaggatacaaccagtcctatggagctcgccgcattggagaaaattaagagcacatggattaagaatcaggacgattccttgaccgagacagatacgctcgagatcaccgatcaggacatgtttggcgacgcttcaacgagtctggtggtgcccgagaaggtaaagacaccaatgaagagtagtaaaacagatctgcagggcagcgccagcccatcaaaggttgaaggggtgcatacccctaggcagaagaggtctaccccactcaaggagcgccagttgagtaaaccactttccgagcggacaaattcaagcgacagtgaaagaagtccggacctgggccattctactcaaattcctcgaaaagtcgtatacgaccaactgaatcaaattctggtgtcagatgcggcgcttcccgaaaacgttattctagtgaatactactgactggcaggggcagtacgttgccgaactattgcaggatcagaggaagcccgtggtgtgcacctgctccaccgttgaagttcaggctgtgctgtcagccttgttaacgcgcattcagaggtactgtaattgtaactcaagtatgcctcggcccgtgaaagtcgccgcagtgggcgggcagtcatatttgtccagcattctgagatttttcgtaaagtctcttgcaaacaaaaccagcgactggctaggttacatgcggtttcttattattccccttggaagccacccagttgctaagtatttgggctctgtggactccaaatatagctcgtcattccttgacagcggctggagggacctgttctccagatcagaaccgcccgtgtccgagcaactggatgtggccgggagggttatgcaatatgttaatggcgccgctaccacacatcaactcccggtagccgaagccatgctcacttgccggcataagttcccagacgaggattcttatcagaagtttattccttttatcggagtggtcaaggttggactggtggaagatagcccaagcactgcgggggacggggatgactccccagtcgtgagcctgactgtgccatctactagcccaccctcctcttccggtttgagtcgagacgccacagccacaccacctagttcccctagtatgagctctgcacttgccatcgttggaagccctaattccccctatggcgacgtcatcggattgcaggttgattattggctggggcatccaggagaacgaaggcgcgaaggagacaagagggacgccagctccaaaaacaccctgaagtcggttttccgatccgtccaagtatcacgactaccccattccggggaagcccagctgagcggaaccatggcaatgactgtggtgactaaggagaagaataaaaaggtacccactatctttctcagcaagaaacccagagaaaaggaggtggattccaagtcacaagttatcgaaggcatatcccggttaatctgctcagccaagcaacagcagacaatgcttagagtgtccatagatggcgtggagtggtctgatataaaatttttccagctcgccgcccagtggcccacccacgtaaagcatttcccggtcgggttgttctccggttctaaagccacatag

SEQ ID NO: 196242 - DNA, 2892 bp, Artificial Sequence
  derived and/or modified sequence
atggccgagcggggcggggccggcggcggccctggaggagctgggggcggcagcggccagaggggcagcggcgtggcccagagcccccagcagcccccaccccagcagcagcagcagcagcccccccagcagcccaccccacccaagctggcccaggccaccagcagcagcagcagcaccagcgctgctgctgccagcagcagcagcagcagcaccagcacctccatggctgtggccgtggccagcggcagcgcccctcctgggggccctggccctggccgcaccccagcccctgtgcagatgaacctgtatgccacctgggaggtggacaggagcagcagcagctgtgtgcccaggctcttcagcctgaccctgaagaagctggtgatgctgaaggagatggacaaggacctgaacagcgtggtgattgctgtgaagctgcagggcagcaagaggatcctgcggagcaatgaaattgtgctgcctgccagcggcctggtggagacagagctgcagctgaccttcagcctgcagtacccccacttcctgaagagagatgccaacaagctgcagatcatgctgcagaggaggaagcgctacaagaacagaaccatcctgggctacaagaccctggccgtgggcctcatcaacatggccgaggtgatgcagcaccccaatgaaggagccctggtgctgggcctgcacagcaatgtgaaggatgtgtctgtgcctgtggccgagatcaagatctacagcctgagcagccagcccatcgaccacgagggcatcaagagcaagctgagtgacaggagcccagacatcgacaactacagcgaggaggaggaggagagcttcagcagcgagcaggagggcagtgatgaccccctgcacggccaggacctcttctatgaagatgaggacctgaggaaggtgaagaagaccaggaggaagctgaccagcaccagcgccatcacccggcagcccaacatcaagcagaagtttgtggccctgctgaagcgcttcaaggtgtctgatgaggtgggcttcggcctggagcacgtgtcccgggagcagatccgggaggtggaggaggacctggatgagctgtatgacagcctggagatgtacaaccccagcgacagcggccctgagatggaggagacagagagcatcctgagcacccccaagcccaagctgaagcccttctttgagggcatgagccagagcagcagccagacagaaattggcagcctgaacagcaagggcagcctgggcaaggacaccaccagccccatggagctggccgccctggagaagatcaagagcacctggatcaagaaccaggatgacagcctgacagaaacagacaccctggagatcacagaccaggacatgtttggagatgccagcaccagcctggtggtgcctgagaaggtgaagacccccatgaagagcagcaagacagacctgcagggcagcgccagccccagcaaggtggagggcgtgcacaccccccggcagaagaggagcacccccctgaaggagcggcagctgagcaagcccctgtctgagaggaccaacagcagtgacagcgagaggagcccagacctgggccacagcacccagatccccaggaaggtggtgtatgaccagctgaaccagatcctggtgtctgatgctgccctgcctgaaaatgtcatcctggtgaacaccacagactggcagggccagtatgtggccgagctgctgcaggaccagaggaagcctgtggtgtgcacctgcagcacagtggaggtgcaggccgtgctgagcgccctgctgacccgcatccagcgctactgcaactgcaacagctccatgcccaggcctgtgaaggtggccgctgtgggcggccagagctacctgagcagcatcctgcgcttctttgtgaagagcctggccaacaagaccagtgactggctgggctacatgaggttcctgatcatccccctgggcagccaccctgtggccaagtacctgggctctgtggacagcaagtacagcagcagcttcctggacagcggctggagggacctcttcagccgctctgagccccctgtgtctgagcagctggatgtggccggccgggtgatgcagtatgtgaatggagctgccaccacccaccagctgcctgtggccgaggccatgctgacctgccgccacaagttcccagatgaagattcctaccagaagttcatccccttcatcggcgtggtgaaggtgggcctggtggaggacagccccagcacagctggagatggagatgacagccctgtggtgtccctgactgtgcccagcaccagcccccccagcagcagcggcctgagcagagatgccacagccaccccacccagcagccccagcatgagcagcgccctggccatcgtgggcagccccaacagcccctatggagatgtgattggcctgcaggtggactactggctgggccaccctggagagaggagaagagaaggagacaagagagatgccagcagcaagaacaccctgaagtctgtgttccgctctgtgcaggtgtcccggctgccccacagcggggaggcccagctgagcggcaccatggccatgacagtggtgaccaaggagaagaacaagaaggtgcccaccatcttcctgagcaagaagccccgggagaaggaggtggacagcaagagccaggtgattgagggcatcagccgcctcatctgcagcgccaagcagcagcagaccatgctgcgggtgtccattgatggagtggagtggagcgacatcaagttcttccagctggccgcccagtggcccacccacgtgaagcacttccctgtgggcctcttcagcggcagcaaggccacctag

SEQ ID NO: 196243 - DNA, 2892 bp, Artificial Sequence
  derived and/or modified sequence
atggccgagcggggcggcgccggcggcggccccggcggcgccggcggaggctctgggcagagaggaagcggggtggctcaatcaccgcagcagcctccaccgcaacagcaacagcagcagccaccgcagcagccaactccgcccaagttagcacaggctaccagctcatctagctcaacgtccgcagccgctgccagctcctcaagttcctccacctcaacgagtatggcagttgccgtggcaagcggctcggcacctccagggggcccagggccgggccggaccccggcgcccgtccagatgaacttgtatgcaacatgggaggtggatcgttcctcctcgtcatgtgtcccacgactgttcagtctgactctaaaaaagttagtaatgctgaaggaaatggacaaggacctgaatagcgtcgtcattgctgtaaaattgcagggatctaaacggattcttcgaagtaatgaaatcgttctgcctgctagcggactcgtcgagaccgaattgcaactgacattctcccttcaataccctcactttctaaagcgcgacgccaacaaactgcagatcatgctgcagagacggaagcggtacaaaaaccggaccattctcggatataagaccctggccgtgggcctcattaacatggccgaggttatgcagcatcccaatgaaggggccttggttttaggactgcactctaacgtgaaggacgtgagcgtcccggtagcagagatcaagatctattcactgagttctcagccaatcgaccatgagggaattaaaagtaagcttagtgataggtcaccagatatcgataattactctgaggaggaagaggagtccttttcctcagaacaggagggctccgatgaccctctccacgggcaggacctcttttatgaagacgaagaccttcgcaaggtgaaaaagaccaggcgaaagttaacttccacatctgcaattacaaggcaacctaacatcaaacagaagtttgtcgctttgttgaaacggtttaaggtgtcagatgaggtggggttcggtctcgagcatgtgagccgggagcagattcgggaagtagaagaggacctggatgagctgtatgatagcctggagatgtacaaccccagcgatagcggtcccgagatggaagagacagaaagtatcctctctacccctaagccgaagctgaagcccttcttcgagggaatgtcacagagtagttctcagacagagatcggctcactgaactccaaaggatcactgggcaaggatacaaccagccctatggagctagcggccctggagaaaattaagagtacatggattaagaaccaggacgacagcctgacagaaaccgacacactggagattaccgatcaggatatgtttggggacgcctcaacttctttggtggtgccagagaaggtcaaaacccccatgaagtcttccaagaccgatttgcaggggtcagcctccccatctaaagtcgagggtgttcataccccaaggcaaaaaaggagcacccccctgaaagagagacaactctccaaacctttgtctgaacggaccaatagtagcgacagtgagagatctccggatctgggccattctacccagatccctcggaaagtggtgtacgatcaattaaatcagatcctggtgtcagacgccgctcttcctgagaacgtgattctcgttaacaccactgattggcagggccagtatgtggctgaactcctccaggatcagaggaagcctgtggtttgtacttgttctacagttgaggttcaagcggtgctgtccgccctgttaaccagaatccaacggtattgtaactgcaattcctccatgccaagacctgttaaggtcgccgccgtcggaggccagtcatacctgtcgtccatactgcgcttctttgttaagagcttggcaaataaaacttctgattggctcgggtacatgcgctttctcatcattcctctgggctctcatcctgtcgcaaaatacctgggttcggtcgactccaagtactccagctcatttttggactccggatggcgagacctcttctctagatctgagccccctgtaagcgagcagttggatgtagcaggacgcgtgatgcagtatgtgaatggggctgctactacacaccagctacccgtggctgaggccatgcttacatgcagacataagtttcccgacgaagatagctaccaaaagttcattcccttcatcggtgtcgtaaaggtgggcctagtcgaggactctcctagcaccgctggcgacggcgatgattcacccgtggtttccctgaccgtgccatccacttctcctccatcctcttcaggtttgagccgggatgccactgcaacaccaccaagtagtccttccatgtcctccgcccttgcgatcgttggctctcccaatagcccttacggagacgtaatcggtctacaagtcgattattggctggggcatccaggcgaaaggcgccgagagggagacaagagggacgctagcagcaagaacactttaaaatctgtgtttagaagcgtccaggtgagcaggcttccacattccggcgaggctcagctgtcgggcacaatggctatgactgtggtcactaaggaaaagaataaaaaggtgcctaccattttccttagtaagaagccccgggaaaaggaggttgacagcaagtcccaggtcatcgaaggtatcagcaggctgatctgctccgctaaacagcagcagactatgctgagggtgagtattgacggggttgaatggtctgatatcaaattctttcagctggccgctcagtggcctacccacgtgaaacacttccctgtgggtttgttttctgggagcaaagcgacgtag

SEQ ID NO: 196244 - DNA, 2892 bp, Artificial Sequence
  derived and/or modified sequence
atggccgagcgtggcggagccggagggggtccaggaggcgcaggaggcggatcagggcagaggggcagcggagtagcacagagccctcaacagccgccaccacagcaacaacagcagcaaccccctcaacaaccaacgcctcctaaattggctcaggctacttctagttcttccagcacttcggccgcagctgctagctcatcctcctcctctacatccacaagtatggcggtcgcggtggcaagtggctcagctcccccagggggtcccggtcctggtcgcacaccagcacctgtgcaaatgaacctttacgcaacttgggaggtggataggtccagttctagctgcgtgcctaggttattttccctgaccctgaagaagctggtgatgctgaaggagatggataaagacttgaacagcgtggtcattgcggtgaaactgcaaggatctaagcggatccttagaagcaacgaaatcgtactccccgctagcggcctcgtggaaaccgagctacagcttactttctccttgcagtatcctcacttcttgaagcgcgatgctaacaagctgcaaattatgctgcagagaagaaaacgctataagaatcggaccattctcggatataagaccttagcagtgggtctgattaacatggctgaggtaatgcaacaccctaatgagggggctctcgttctggggttacacagtaatgtaaaagacgtttccgtgcctgtggctgagatcaagatttattccctcagttctcagcccatagatcatgagggcataaagagcaaactctcggaccgatctccagacattgacaactatagcgaggaggaagaggagtcattcagctccgaacaggaggggtcagatgatccactccatgggcaggatctcttttatgaggacgaagatctaagaaaggtgaagaaaactagacgtaagttaacctctacttccgctatcacgcggcagcccaatatcaaacagaaattcgtggccctgctcaaacgctttaaggtgagcgacgaagtcggattcggcctggaacatgtgtccagggagcaaattcgtgaggtggaagaggaccttgatgaactctatgatagtcttgagatgtacaacccatccgacagcggaccagagatggaagagacagaatccatcctgtccacccctaagcctaaattaaagccattcttcgaggggatgtctcagtcctccagccagactgaaatcggctcgctcaacagtaagggttccctggggaaagacaccacttccccaatggagttggcagctctcgaaaaaataaagagcacatggatcaagaaccaggacgactcactgacggaaacggacacacttgaaatcacagatcaggatatgtttggcgacgcctctacatcgctggttgtgcccgagaaagtaaaaactccaatgaaaagtagcaagacagatctgcaggggtctgccagcccgtccaaggtggagggcgtgcacaccccaagacagaaacgtagcacccccttaaaagagcgccagctgtcaaaacccctgtccgagcgcaccaactctagcgattctgagcgtagccccgatctaggacacagcactcagattccgagaaaagtagtctatgaccagctgaaccaaattcttgtcagcgacgccgcattaccggaaaatgtgatcctggtgaacaccactgattggcaggggcagtacgtcgcagagttattgcaggatcagcgaaagccagtggtgtgtacttgttcgacggtggaggtgcaggcggtcctgagcgccctccttacaaggatacagcgatattgcaactgcaactcaagtatgccaagacccgttaaggttgcagcagtcggcggacaatcatatttgagttccattttaaggttctttgtcaagtcacttgctaacaagacctccgactggctcggttacatgcggtttttaatcatacctctggggtcccacccagttgccaagtatctcgggagtgtagactctaagtacagttcttcctttctcgacagtggctggagggacttgttctccaggagcgaacctcctgtctccgagcagttagatgtcgcaggccgagttatgcaatacgtcaatggtgctgccacgacacaccagctgccggtcgcagaagcaatgctaacctgtcgacacaaatttcctgatgaagacagctatcagaagtttatcccttttattggggtggtcaaggtgggcctcgtcgaggactctccaagcaccgcaggtgatggcgacgattcccccgttgtgagcctgaccgtcccaagtactagcccaccatcgagctcagggcttagccgcgacgccacagccacacccccatcaagcccttccatgtcctctgccctagccatcgtggggtctcctaatagcccctacggagatgtgatcgggctgcaggtggactattggttgggccaccccggtgaaagacggcgagagggcgataaaagagatgcctcttcgaaaaacacactcaagagcgtgttcaggagtgtacaggtgagccgacttccacatagtggggaagcccagctctctgggacaatggctatgaccgttgtcaccaaagagaaaaataagaaagtccctacaatttttctgtctaagaagccccgtgagaaagaagtcgattcgaagtctcaggtgatcgaagggatctcgaggctgatttgcagcgctaagcaacaacagacaatgttaagggtgagcatcgacggggtggagtggagtgatatcaaattttttcagctagcggcacagtggcctactcacgtcaaacattttccagtgggcctattctcaggatctaaagccacctag

SEQ ID NO: 196245 - DNA, 4392 bp, Artificial Sequence
  derived and/or modified sequence
cctcggcctccgtaacccccgcctagccgggccatggcggaacgcggaggggcgggcggtggtcccggaggcgccgggggcggcagcggccagcggggatccggggtcgcccagtcccctcagcagccgccgccgcagcagcagcagcagcagccgccgcagcagccgacgccccccaagctggcccaggccacctcgtcgtcctcgtccacctcggcggcggctgcctcctcctcgtcctcgtctacctccacctccatggccgtggcggtggcctcgggctccgcgcctcccggtggcccggggccaggccgcacccccgccccggtgcagatgaacctgtacgccacctgggaggtggaccggagctcgtccagctgcgtgcctaggctattcagcttgaccctgaagaaactcgtcatgctaaaagaaatggacaaagatcttaactcagtggtcatcgctgtgaagctgcagggttcaaaaagaattcttcgctccaacgagatcgtccttccagctagtggactggtggaaacagagctccaattaaccttctcccttcagtaccctcatttccttaagcgagatgccaacaagctgcagatcatgctgcaaaggagaaaacgttacaagaatcggaccatcttgggctataagaccttggccgtgggactcatcaacatggcagaggtgatgcagcatcctaatgaaggcgcactggtgcttggcctacacagcaacgtgaaggatgtctctgtgcctgtggcagaaataaagatctactccctgtccagccaacccattgaccatgaaggaatcaaatccaagctttctgatcgttctcctgatattgacaattattctgaggaagaggaagagagtttctcatcagaacaggaaggcagtgatgatccattgcatgggcaggacttgttctacgaagacgaagatctccggaaagtgaagaagacccggaggaaactaacctcaacctctgccatcacaaggcaacctaacatcaaacagaagtttgtggccctcctgaagcggtttaaagtttcagatgaggtgggctttgggctggagcatgtgtcccgcgagcagatccgggaagtggaagaggacttggatgaattgtatgacagtctggagatgtacaaccccagcgacagtggccctgagatggaggagacagaaagcatcctcagcacgccaaagcccaagctcaagcctttctttgaggggatgtcgcagtccagctcccagacggagattggcagcctcaacagcaaaggcagcctcggaaaagacaccaccagccctatggaattggctgctctagaaaaaattaaatctacttggattaaaaaccaagatgacagcttgactgaaacagacactctggaaatcactgaccaggacatgtttggagatgccagcacgagtctggttgtgccggagaaagtcaaaactcccatgaagtccagtaaaacggatctccagggctctgcctcccccagcaaagtggagggggtgcacacaccccggcagaagaggagcacgcccctgaaggagcggcagctctccaagcccctaagtgagaggaccaacagttccgacagcgagcgctccccagatctgggccacagcacgcagattccaagaaaggtggtgtatgaccagctcaatcagatcctggtgtcagatgcagccctcccagaaaatgtcattctggtgaacaccactgactggcagggccagtatgtggctgagctgctccaggaccagcggaagcctgtggtgtgcacctgctccaccgtggaggtccaggccgtgctgtccgccctgctcacccggatccagcgctactgcaactgcaactcttccatgccgaggccagtgaaggtggctgctgtgggaggccagagctacctgagctccatcctcaggttctttgtcaagtccctggccaacaagacctccgactggcttggctacatgcgcttcctcatcatccccctcggttctcaccctgtggccaaatacttggggtcagtcgacagtaaatacagtagttccttcctggattctggttggagagatctgttcagtcgctcggagccaccagtgtcagagcaactggacgtggcagggcgggtgatgcagtacgtcaacggggcagccacgacacaccagcttcccgtggccgaagccatgctgacttgccggcataagttccctgatgaagactcctatcagaagtttattcccttcattggcgtggtgaaggtgggtctggttgaagactctccctccacagcaggcgatggggacgattctcctgtggtcagccttactgtgccctccacatcaccaccctccagctcgggcctgagccgagacgccacggccacccctccctcctccccatctatgagcagcgccctggccatcgtggggagccctaatagcccatatggggacgtgattggcctccaggtggactactggctgggccaccccggggagcggaggagggaaggcgacaagagggacgccagctcgaagaacaccctcaagagtgtcttccgctcagtgcaggtgtcccgcctgccccatagtggggaggcccagctttctggcaccatggccatgactgtggtcaccaaagaaaagaacaagaaagttcccaccatcttcctgagcaagaaaccccgagaaaaggaggtggattctaagagccaggtcattgaaggcatcagccgcctcatctgctcagccaagcagcagcagactatgctgagagtgtccatcgatggggtcgagtggagtgacatcaagttcttccagctggcagcccagtggcccacccatgtcaagcactttccagtgggactcttcagtggcagcaaggccacctgaggccctgtctcccagccactttccctcctggcactgccaccagcctcaccgcctgcgggcagggggaggccagcaggcccgggcccagcaccccttccctggcaccagggtctgcctctcactcgcccaggtcccgaaggacactgccacagggacgccttccctcccctcccctccagcccacccctgcacagcccctcctccttcccgcttttccccttctccctcctgctccaggcccaaggcgtgttggttttgccttctggtgcccatagtcccctggactgagtcccccaggccttccttcacccgacttccaaactcttccttgtggtatcagtttccttctcggaaatgagaaagctggaatcctggtccccagcaggagagcctagtcctcccccagcccctccagccaccagggtgtcctctaggatgcagctgccagatccactcactctgctgcctccagcaggacccaaggccactttcaactcttatggggttctccacctgccccagagcttctcaagggagggtaagggggcaccctgagcccacaggacccctacttcacagctcacaggggcaggaggcagctcccctgcctccaggaccctgttgctatggtgacacagcgtttctaggacagaggggcctcccagtctccccccaccacccgtgcacgacttcctcaccacccccaggttccctgcagatgtcgtgtgtgtcctgagtgtttctttggttctttgcacgccaagtctcttggttgtaccatgtgacacaccctgtgcactggtcgctgtcttcgtggcttccacccttgttaatgatgctcctgcctctgcctcccagcccctcacccagcacagctctgcctggacttggagagatgggaggcagacccccaccaccatacatgctgtctgtggcccctcagacattctgtttcatctcccattcatctccctcctcccaccgtgtcagtttttctgcctttccctgctctgttcttccccctccttaggccccagcctgggcccagacccatcctcccagccaggtttccctccagcaggctccttccctccctgtcacctccctctcaccaacccggggtctgagcccctcattcctgaccgtccgtgttctcaggagtggttgaggacacagggccccagcccagccctctgcaccccccagcccggccatctgcgccccacagcccctttggagcttttctcttgtcctctcactccttcccagaagtttttgcacagaacttcattttgaaagtgtttttctcattctccatacctcccccaagctctcctccagcccttcccagggctcagccctgctgtcctgagcgtctcctgggccagagagaggagatgggggtgggagggactgagttgatgttgggtttttcattcaataaattggtgatttcttaccgactgc

SEQ ID NO: 196246 - DNA, 2892 bp, Artificial Sequence
  derived and/or modified sequence
atggccgagagaggcggcgccggcggcggccccggcggcgccggcggcggcagcggccagagaggcagcggcgtggcccagagcccccagcagccccccccccagcagcagcagcagcagcccccccagcagcccaccccccccaagctggcccaggccaccagcagcagcagcagcaccagcgccgccgccgccagcagcagcagcagcagcaccagcaccagcatggccgtggccgtggccagcggcagcgccccccccggcggccccggccccggcagaacccccgcccccgtgcagatgaacctgtacgccacctgggaggtggacagaagcagcagcagctgcgtgcccagactgttcagcctgaccctgaagaagctggtgatgctgaaggagatggacaaggacctgaacagcgtggtgatcgccgtgaagctgcagggcagcaagagaatcctgagaagcaacgagatcgtgctgcccgccagcggcctggtggagaccgagctgcagctgaccttcagcctgcagtacccccacttcctgaagagagacgccaacaagctgcagatcatgctgcagagaagaaagagatacaagaacagaaccatcctgggctacaagaccctggccgtgggcctgatcaacatggccgaggtgatgcagcaccccaacgagggcgccctggtgctgggcctgcacagcaacgtgaaggacgtgagcgtgcccgtggccgagatcaagatctacagcctgagcagccagcccatcgaccacgagggcatcaagagcaagctgagcgacagaagccccgacatcgacaactacagcgaggaggaggaggagagcttcagcagcgagcaggagggcagcgacgaccccctgcacggccaggacctgttctacgaggacgaggacctgagaaaggtgaagaagaccagaagaaagctgaccagcaccagcgccatcaccagacagcccaacatcaagcagaagttcgtggccctgctgaagagattcaaggtgagcgacgaggtgggcttcggcctggagcacgtgagcagagagcagatcagagaggtggaggaggacctggacgagctgtacgacagcctggagatgtacaaccccagcgacagcggccccgagatggaggagaccgagagcatcctgagcacccccaagcccaagctgaagcccttcttcgagggcatgagccagagcagcagccagaccgagatcggcagcctgaacagcaagggcagcctgggcaaggacaccaccagccccatggagctggccgccctggagaagatcaagagcacctggatcaagaaccaggacgacagcctgaccgagaccgacaccctggagatcaccgaccaggacatgttcggcgacgccagcaccagcctggtggtgcccgagaaggtgaagacccccatgaagagcagcaagaccgacctgcagggcagcgccagccccagcaaggtggagggcgtgcacacccccagacagaagagaagcacccccctgaaggagagacagctgagcaagcccctgagcgagagaaccaacagcagcgacagcgagagaagccccgacctgggccacagcacccagatccccagaaaggtggtgtacgaccagctgaaccagatcctggtgagcgacgccgccctgcccgagaacgtgatcctggtgaacaccaccgactggcagggccagtacgtggccgagctgctgcaggaccagagaaagcccgtggtgtgcacctgcagcaccgtggaggtgcaggccgtgctgagcgccctgctgaccagaatccagagatactgcaactgcaacagcagcatgcccagacccgtgaaggtggccgccgtgggcggccagagctacctgagcagcatcctgagattcttcgtgaagagcctggccaacaagaccagcgactggctgggctacatgagattcctgatcatccccctgggcagccaccccgtggccaagtacctgggcagcgtggacagcaagtacagcagcagcttcctggacagcggctggagagacctgttcagcagaagcgagccccccgtgagcgagcagctggacgtggccggcagagtgatgcagtacgtgaacggcgccgccaccacccaccagctgcccgtggccgaggccatgctgacctgcagacacaagttccccgacgaggacagctaccagaagttcatccccttcatcggcgtggtgaaggtgggcctggtggaggacagccccagcaccgccggcgacggcgacgacagccccgtggtgagcctgaccgtgcccagcaccagcccccccagcagcagcggcctgagcagagacgccaccgccaccccccccagcagccccagcatgagcagcgccctggccatcgtgggcagccccaacagcccctacggcgacgtgatcggcctgcaggtggactactggctgggccaccccggcgagagaagaagagagggcgacaagagagacgccagcagcaagaacaccctgaagagcgtgttcagaagcgtgcaggtgagcagactgccccacagcggcgaggcccagctgagcggcaccatggccatgaccgtggtgaccaaggagaagaacaagaaggtgcccaccatcttcctgagcaagaagcccagagagaaggaggtggacagcaagagccaggtgatcgagggcatcagcagactgatctgcagcgccaagcagcagcagaccatgctgagagtgagcatcgacggcgtggagtggagcgacatcaagttcttccagctggccgcccagtggcccacccacgtgaagcacttccccgtgggcctgttcagcggcagcaaggccacctag

SEQ ID NO: 196247 - protein, 1039 aa, Artificial Sequence
  derived and/or modified sequence
MAVQLVPDSALGLLMMTEGRRCQVHLLDDRKLELLVQPKLLAKELLDLVASHFNLKEKEYFGIAFTDETGHLNWLQLDRRVLEHDFPKKSGPVVLYFCVRFYIESISYLKDNATIELFFLNAKSCIYKELIDVDSEVVFELASYILQEAKGDFSSNEVVRSDLKKLPALPTQALKEHPSLAYCEDRVIEHYKKLNGQTRGQAIVNYMSIVESLPTYGVHYYAVKDKQGIPWWLGLSYKGIFQYDYHDKVKPRKIFQWRQLENLYFREKKFSVEVHDPRRASVTRRTFGHSGIAVHTWYACPALIKSIWAMAISQHQFYLDRKQSKSKIHAARSLSEIAIDLTETGTLKTSKLANMGSKGKIISGSSGSLLSSGSQESDSSQSAKKDMLAALKSRQEALEETLRQRLEELKKLCLREAELTGKLPVEYPLDPGEEPPIVRRRIGTAFKLDEQKILPKGEEAELERLEREFAIQSQITEAARRLASDPNVSKKLKKQRKTSYLNALKKLQEIENAINENRIKSGKKPTQRASLIIDDGNIASEDSSLSDALVLEDEDSQVTSTISPLHSPHKGLPPRPPSHNRPPPPQSLEGLRQMHYHRNDYDKSPIKPKMWSESSLDEPYEKVKKRSSHSHSSSHKRFPSTGSCAEAGGGSNSLQNSPIRGLPHWNSQSSMPSTPDLRVRSPHYVHSTRSVDISPTRLHSLALHFRHRSSSLESQGKLLGSENDTGSPDFYTPRTRSSNGSDPMDDCSSCTSHSSSEHYYPAQMNANYSTLAEDSPSKARQRQRQRQRAAGALGSASSGSMPNLAARGGAGGAGGAGGGVYLHSQSQPSSQYRIKEYPLYIEGGATPVVVRSLESDQEGHYSVKAQFKTSNSYTAGGLFKESWRGGGGDEGDTGRLTPSRSQILRTPSLGREGAHDKGAGRAAVSDELRQWYQRSTASHKEHSRLSHTSSTSSDSGSQYSTSSQSTFVAHSRVTRMPQMCKATSAALPQSQRSSTPSSEIGATPPSSPHHILTWQTGEATENSPILDGSESPPHQSTDE

SEQ ID NO: 196248 - DNA, 3120 bp, Artificial Sequence
  derived and/or modified sequence
atggccgtgcagctggtgcccgacagcgccctgggcctgctgatgatgaccgagggcagaagatgccaggtgcacctgctggacgacagaaagctggagctgctggtgcagcccaagctgctggccaaggagctgctggacctggtggccagccacttcaacctgaaggagaaggagtacttcggcatcgccttcaccgacgagaccggccacctgaactggctgcagctggacagaagagtgctggagcacgacttccccaagaagagcggccccgtggtgctgtacttctgcgtgagattctacatcgagagcatcagctacctgaaggacaacgccaccatcgagctgttcttcctgaacgccaagagctgcatctacaaggagctgatcgacgtggacagcgaggtggtgttcgagctggccagctacatcctgcaggaggccaagggcgacttcagcagcaacgaggtggtgagaagcgacctgaagaagctgcccgccctgcccacccaggccctgaaggagcaccccagcctggcctactgcgaggacagagtgatcgagcactacaagaagctgaacggccagaccagaggccaggccatcgtgaactacatgagcatcgtggagagcctgcccacctacggcgtgcactactacgccgtgaaggacaagcagggcatcccctggtggctgggcctgagctacaagggcatcttccagtacgactaccacgacaaggtgaagcccagaaagatcttccagtggagacagctggagaacctgtacttcagagagaagaagttcagcgtggaggtgcacgaccccagaagagccagcgtgaccagaagaaccttcggccacagcggcatcgccgtgcacacctggtacgcctgccccgccctgatcaagagcatctgggccatggccatcagccagcaccagttctacctggacagaaagcagagcaagagcaagatccacgccgccagaagcctgagcgagatcgccatcgacctgaccgagaccggcaccctgaagaccagcaagctggccaacatgggcagcaagggcaagatcatcagcggcagcagcggcagcctgctgagcagcggcagccaggagagcgacagcagccagagcgccaagaaggacatgctggccgccctgaagagcagacaggaggccctggaggagaccctgagacagagactggaggagctgaagaagctgtgcctgagagaggccgagctgaccggcaagctgcccgtggagtaccccctggaccccggcgaggagccccccatcgtgagaagaagaatcggcaccgccttcaagctggacgagcagaagatcctgcccaagggcgaggaggccgagctggagagactggagagagagttcgccatccagagccagatcaccgaggccgccagaagactggccagcgaccccaacgtgagcaagaagctgaagaagcagagaaagaccagctacctgaacgccctgaagaagctgcaggagatcgagaacgccatcaacgagaacagaatcaagagcggcaagaagcccacccagagagccagcctgatcatcgacgacggcaacatcgccagcgaggacagcagcctgagcgacgccctggtgctggaggacgaggacagccaggtgaccagcaccatcagccccctgcacagcccccacaagggcctgccccccagaccccccagccacaacagacccccccccccccagagcctggagggcctgagacagatgcactaccacagaaacgactacgacaagagccccatcaagcccaagatgtggagcgagagcagcctggacgagccctacgagaaggtgaagaagagaagcagccacagccacagcagcagccacaagagattccccagcaccggcagctgcgccgaggccggcggcggcagcaacagcctgcagaacagccccatcagaggcctgccccactggaacagccagagcagcatgcccagcacccccgacctgagagtgagaagcccccactacgtgcacagcaccagaagcgtggacatcagccccaccagactgcacagcctggccctgcacttcagacacagaagcagcagcctggagagccagggcaagctgctgggcagcgagaacgacaccggcagccccgacttctacacccccagaaccagaagcagcaacggcagcgaccccatggacgactgcagcagctgcaccagccacagcagcagcgagcactactaccccgcccagatgaacgccaactacagcaccctggccgaggacagccccagcaaggccagacagagacagagacagagacagagagccgccggcgccctgggcagcgccagcagcggcagcatgcccaacctggccgccagaggcggcgccggcggcgccggcggcgccggcggcggcgtgtacctgcacagccagagccagcccagcagccagtacagaatcaaggagtaccccctgtacatcgagggcggcgccacccccgtggtggtgagaagcctggagagcgaccaggagggccactacagcgtgaaggcccagttcaagaccagcaacagctacaccgccggcggcctgttcaaggagagctggagaggcggcggcggcgacgagggcgacaccggcagactgacccccagcagaagccagatcctgagaacccccagcctgggcagagagggcgcccacgacaagggcgccggcagagccgccgtgagcgacgagctgagacagtggtaccagagaagcaccgccagccacaaggagcacagcagactgagccacaccagcagcaccagcagcgacagcggcagccagtacagcaccagcagccagagcaccttcgtggcccacagcagagtgaccagaatgccccagatgtgcaaggccaccagcgccgccctgccccagagccagagaagcagcacccccagcagcgagatcggcgccaccccccccagcagcccccaccacatcctgacctggcagaccggcgaggccaccgagaacagccccatcctggacggcagcgagagccccccccaccagagcaccgacgagtag

SEQ ID NO: 196249 - DNA, 3120 bp, Artificial Sequence
  derived and/or modified sequence
atggcagtgcaacttgtgcctgatagtgccctaggcctgctcatgatgactgagggaagacgatgccaggttcacctgttagacgacaggaaattggaactgctagtccagcctaagctcctcgccaaggaactcctggatctcgtggctagccacttcaatctgaaagagaaggaatacttcggcattgcttttacagatgaaacaggacatctgaattggctgcagctggatagaagagtgctggagcacgatttccctaagaaatcaggacccgtggtgctgtacttctgtgtgcggttttatatcgaatccatcagctatctaaaggacaacgcaaccattgaactgtttttcttgaacgccaagtcttgcatctataaggaactgattgacgtggattcagaggtagtgtttgagctagcttcctacatattacaagaagctaaaggggacttctcatctaacgaggtggtgagatcggacctcaagaagctgccagctcttcccacccaggctctgaaggaacacccttctctggcctactgtgaagatcgagtgatcgaacattataaaaagctgaatgggcagaccagaggacaggccatcgtaaactacatgagcatcgtggagtcactccctacctacggggtgcactactacgcggtcaaggacaaacagggcataccatggtggctcggactttcatacaaggggatcttccaatacgactatcacgacaaggtgaaaccacggaaaatattccagtggcggcagcttgagaacctctactttagagagaagaagtttagtgtggaagtgcacgacccaaggagagcttctgtgaccagacgtaccttcgggcacagcgggatcgctgtacacacctggtacgcttgccctgcactgataaaaagcatctgggccatggccatatcccagcaccagttctacttagatagaaagcaaagcaagtccaagatccatgccgctcgctccctttctgagatagctattgacctgacggagactggcaccctgaaaactagcaaactagccaatatgggcagcaaaggtaaaataattagcggaagctcaggctcattgctgtcatccggcagtcaagaaagtgattcatcgcagtcggcaaagaaagacatgcttgcagctctgaagagtagacaggaagccctcgaggagacgttgcggcagagacttgaggagcttaaaaagctttgtctgcgggaagccgagttgacgggaaagctgccggtggaatatccactcgatcccggggaagagccgcccatagttcgccggcggattggcactgctttcaaactggatgagcaaaaaattcttcccaagggtgaggaggccgagcttgaacggctggagcgcgagtttgctatccagtcccaaattactgaggccgcccggaggttagccagtgaccctaatgtgagtaagaaactcaagaaacagagaaagacgtcctatcttaacgccttgaagaagctccaggaaattgaaaatgccattaacgagaatcgtattaaaagcggcaaaaagccaacccaaagggcttcattgatcatagacgacgggaacatcgcttcagaggattcttcactttctgacgccttggtgctagaggacgaagactctcaggtcacatctactatcagtcccttgcactctcctcacaagggtctccccccaaggccgccatcccataacaggcctccccctccgcagtccctggaaggactgcgccaaatgcattatcacaggaatgattatgacaagtcacctatcaaacctaaaatgtggagcgaatctagtctggatgagccctacgaaaaagtaaagaaaagaagctcacatagccatagcagttcacacaagaggtttccatcaacgggctcatgtgcagaggccgggggcggcagcaattctcttcagaacagtcccatccgcggcctaccacattggaattcacaaagctccatgccttcaacgccggacctacgggtacggtcaccccattatgttcactcaacacgttcagtggatataagccctacacgcctacacagtctggcgttgcacttccgacacagaagctcctcgctggagagccaaggtaaactgctaggctccgaaaacgacaccggctctccggatttttatactccaaggacaaggtcaagtaacggctccgaccccatggatgattgtagttcttgtactagccacagtagtagcgaacactactacccggcccagatgaacgccaactatagtacgttggccgaggatagccccagtaaagcccggcagagacaacgtcaaaggcaaagggccgcaggtgcactcggtagcgcctcgagcggtagtatgcccaatcttgccgctcgggggggcgccgggggcgctggtggggccggcggtggcgtttatcttcatagccagagtcagccctccagtcagtaccgaatcaaggagtatcccttgtacattgaaggcggggccacccctgtcgtggtgcggtctctggaatcggatcaggagggacactactcagtgaaggctcagtttaagaccagcaattcgtatactgccgggggactgtttaaggaatcatggcgcggcggcggcggcgacgagggcgatactggccgtctgaccccaagccgcagccagattctgaggaccccttcgttagggcgggagggcgcacacgataaaggagccgggagagcagccgtgagcgatgagcttcgtcaatggtatcagaggagtacggctagccacaaggagcactcccgactgagccacacctcgagtacctcctccgactctgggagtcagtattctacctctagccagtccacttttgttgctcactctcgggtaactcgcatgcctcagatgtgtaaggccactagtgccgccctacctcagtctcagcggtctagcacaccttcatctgaaattggtgcgacacccccatcctcaccacaccacatcctgacctggcagacaggcgaagccactgagaacagcccaatactcgatggatcagagagccctcctcaccagtccacagatgagtag

SEQ ID NO: 196250 - DNA, 3120 bp, Artificial Sequence
  derived and/or modified sequence
atggcggtgcaattggtgccagactcagcgctgggcctgctcatgatgacagaaggtcggcgctgccaggtgcacttactggacgataggaaactggagctcctcgttcagcccaaactgctggctaaggagcttttagacttggtcgcatcgcactttaaccttaaggagaaagagtatttcggtatcgccttcaccgatgaaactggccatttgaattggctgcagctggatcgccgcgtgttggagcatgatttccccaaaaaatccggcccggtggtgttgtatttctgcgttagattctacattgagagtatctcttacctgaaagacaatgccacgatcgagctgttctttctgaatgctaagagctgcatctataaagaactgatcgacgtggactctgaagtggtttttgaactcgctagctatattctacaggaggccaagggagactttagtagcaatgaggtggtccgctctgatcttaagaaactcccagcattacctacacaggccttgaaggaacatccttcccttgcttactgtgaggacagagttatcgagcattacaagaagctgaatggccagacgcggggacaagcgatcgttaactacatgtcaattgtggagtcactacccacttacggcgtgcactattatgctgtgaaggacaaacagggcatcccttggtggctcggtctgtcatataaagggatcttccagtacgactatcacgataaggtcaagccacggaaaatttttcagtggagacagctggagaacttgtatttccgcgaaaagaagtttagcgtcgaggtgcatgacccccgaagggctagtgtcacccgacgaacctttggccacagcggcatcgccgttcatacatggtacgcttgccctgctctgatcaagagtatctgggcaatggccataagccagcatcagttttaccttgatcggaagcagtcaaagagcaagattcacgccgcgagatccttgagtgagatcgccatcgatctgactgagactggtacactgaaaacatcaaagctcgccaatatgggtagtaagggtaagattattagcggctcttctggcagcctgctgtctagcggctcacaagaaagtgatagctcccagtcagccaagaaggacatgctcgccgcccttaagagcagacaggaagccctggaagagacattgaggcaaagactagaagagctgaagaaattgtgcctcagagaagccgaactcacaggcaaacttccggttgagtaccccctggaccccggagaggaaccacctatcgtacgccggcggataggcacagcatttaaattggacgaacaaaagatcctgcccaaaggagaggaggccgagctggaaagacttgaaagggagtttgccattcagtcacagatcacggaggcagctcgccgcttggcctcagatcctaatgtctccaagaagttgaagaagcagaggaaaacttcctacttgaacgcattaaagaaactccaagaaattgaaaacgccattaacgagaatcgcatcaaatccgggaagaagcctacacagagggcctccctcattatcgatgacggaaatatcgcttctgaggacagctccctgagcgacgctctggttctggaggacgaggacagtcaggttacctcgacaatcagccccctacatagtcctcacaaaggtttacctcctaggccgcccagccataatcggccgccacctccacaatccttagagggcctccgccagatgcactatcatcgcaacgactatgacaagagccctatcaagcctaaaatgtggtcagagtcgagtctagacgagccttacgaaaaagtcaagaagcgcagtagtcattcccacagtagtagtcataaaaggttcccctcaacaggctcatgtgctgaggctgggggtggctcaaacagcctacagaacagccccattcgaggtcttccacactggaatagccagagttcaatgccatccacaccggacctgcgagtgaggagcccacactatgtccattcgaccaggtcagtagatatctcccccactcggctgcattctcttgcattacacttcaggcacaggtcatcctcccttgagagccaaggcaaactgctcggctccgagaacgatactggatcacccgacttttacaccccacggacaagaagtagcaatggaagcgacccgatggatgactgcagttcctgcacatcacattctagcagcgagcactattacccagcacaaatgaacgctaactacagcactctggctgaggattctccatctaaggccagacagcggcagaggcaacgtcagcgggcggctggcgccttgggctctgcttcgtctgggtctatgccaaatctggctgctcgtggcggggccggtggagcaggcggcgcaggcgggggcgtctacctgcactctcagtcccaacctagttcacagtatagaattaaggaatatcctctctatatagagggtggggcaacccctgtggtggtccgttccctggaaagtgaccaagagggccactatagcgtgaaggctcaatttaagacctcgaattcatacacagccggtggcctgtttaaagaatcatggcgggggggaggcggagacgagggagacaccggcagactgaccccaagcaggagtcaaatcttgcggacaccaagtctgggtcgcgagggcgctcatgataagggcgctggtagagccgccgtgagcgatgaacttcgacaatggtaccaaagatcgaccgctagccataaagagcactctaggctcagtcacactagctcaacgagttctgattcaggctctcagtacagtacaagcagtcagtcgacattcgtggctcattctagagttacgcggatgccccagatgtgtaaggccacttcggctgctctgccccaatcccagagatcaagcacccctagtagcgagattggagcaacaccaccttcttcaccgcatcatatcctcacctggcagactggtgaagcaaccgaaaattctcccatactggacggttccgaatctccgccccaccagtcaaccgacgaatag

SEQ ID NO: 196251 - DNA, 3120 bp, Artificial Sequence
  derived and/or modified sequence
atggctgtgcagctggtgcctgattctgccctgggcctgctgatgatgacagagggccgccgctgccaggtgcacctgctggatgacaggaagctggagctgctggtgcagcccaagctgctggccaaggagctgctggacctggtggccagccacttcaacctgaaggagaaggagtactttggaattgccttcacagatgaaacaggccacctgaactggctgcagctggacagaagagtgctggagcatgacttccccaagaagagcggccctgtggtgctgtacttctgtgtgcgcttctacatcgagagcatctcctacctgaaggacaatgccaccatcgagctgttcttcctgaatgccaagagctgcatctacaaggagctgattgatgtggacagcgaggtggtgtttgagctggccagctacatcctgcaggaggccaagggggacttcagcagcaatgaggtggtgcggagtgacctgaagaagctgcctgccctgcccacccaggccctgaaggagcaccccagcctggcctactgtgaggacagagtcatcgagcactacaagaagctgaatggccagacccggggccaggccatcgtgaactacatgagcatcgtggagagcctgcccacctacggcgtgcactactatgctgtgaaggacaagcagggcatcccctggtggctgggcctgagctacaagggcatcttccagtatgactaccatgacaaggtgaagcccaggaagatcttccagtggaggcagctggagaacctgtacttccgggagaagaagttctctgtggaggtgcatgacccccggcgggcctctgtgaccaggaggaccttcggccacagcggcattgctgtgcacacctggtacgcctgcccagccctgatcaagagcatctgggccatggccatcagccagcaccagttctacctggacaggaagcagagcaagagcaagatccacgccgcccggagcctgtctgaaattgccatcgacctgacagagaccggcaccctgaagaccagcaagctggccaacatgggcagcaagggcaagatcatcagcggcagcagcggcagcctgctgagcagcggcagccaggagagtgacagcagccagagcgccaagaaggacatgctggccgccctgaagagccggcaggaggccctggaggagaccctgcggcagaggctggaggagctgaagaagctgtgcctgcgggaggccgagctgaccgggaagctgcctgtggagtaccccctggaccctggagaggagccccccatcgtgagaagacgcatcggcacagccttcaagctggatgagcagaagatcctgcccaagggggaggaggccgagctggagcggctggagcgggagtttgccatccagagccagatcacagaggccgcccggcggctggccagtgaccccaacgtgtccaagaagctgaagaagcagaggaagaccagctacctgaatgccctgaagaagctgcaggagattgaaaatgccatcaatgaaaatcgcatcaagagcggcaagaagcccacccagagggccagcctcatcattgatgatggcaacatcgccagcgaggacagcagcctgagtgatgccctggtgctggaggatgaggacagccaggtgaccagcaccatcagccccctgcacagcccccacaagggcctgcccccccggccccccagccacaaccggcccccaccaccccagagcctggagggcctgcggcagatgcactaccacagaaatgactatgacaagagccccatcaagcccaagatgtggagcgagagcagcctggatgagccctatgagaaggtgaagaagaggagcagccacagccacagcagcagccacaagcgcttccccagcacaggcagctgtgccgaggccggcggcggcagcaacagcctgcagaacagccccatccggggcctgccccactggaacagccagagctccatgcccagcaccccagacctgcgggtgcgcagcccccactacgtgcacagcaccaggtctgtggacatcagccccacccggctgcacagcctggccctgcacttccgccacaggagcagcagcctggagagccagggcaagctgctgggctctgaaaatgacaccggcagcccagacttctacacccccaggaccaggagcagcaatggaagtgaccccatggatgactgcagcagctgcaccagccacagcagcagcgagcactactacccagcccagatgaatgccaactacagcaccctggccgaggacagccccagcaaggcccggcagaggcagaggcagaggcagagagctgctggggccctgggcagcgccagcagcggctccatgcccaacctggccgcccggggcggggccggcggggccggcggggccggcggcggcgtgtacctgcacagccagagccagcccagcagccagtaccgcatcaaggagtaccccctgtacattgaaggaggagccacccctgtggtggtgcgcagcctggagagtgaccaggagggccactacagcgtgaaggcccagttcaagaccagcaacagctacacagctgggggcctcttcaaggagagctggaggggcggcggcggagatgaaggagacaccggccgcctgacccccagccgcagccagatcctgcggacccccagcctgggccgggagggcgcccatgacaagggagctggccgggctgctgtgtctgatgagctgcggcagtggtaccagaggagcacagccagccacaaggagcacagccggctgagccacaccagcagcaccagcagtgacagcggcagccagtacagcaccagcagccagagcacctttgtggcccacagccgggtgaccaggatgccccagatgtgcaaggccaccagcgctgccctgccccagagccagaggagcagcacccccagcagcgagatcggggccaccccacccagcagcccccaccacatcctgacctggcagacaggagaggccacagagaacagccccatcctggatggcagcgagagccccccccaccagagcacagatgaatag

SEQ ID NO: 196252 - DNA, 3120 bp, Artificial Sequence
  derived and/or modified sequence
atggcagtgcagctggtgcccgactcagctctcggcctgctgatgatgacggagggccgccgatgtcaagtacatcttcttgatgacaggaagctggaactcctagtacagcccaagctgttggccaaggagcttcttgaccttgtggcttctcacttcaatctgaaggaaaaggagtactttggaatagcattcacagatgaaacgggacacttaaactggcttcagctagatcgaagagtattggaacatgacttccctaaaaagtcaggacccgtggttttatacttttgtgtcaggttctatatagaaagcatttcatacctgaaggataatgctaccattgagcttttctttctgaacgcgaagtcctgcatctacaaggagcttattgacgttgacagcgaagtggtgtttgaattagcttcctatattttacaggaggcaaagggagatttttctagcaatgaagttgtgaggagtgacttgaagaagctgccagcccttcccacccaagccctgaaggagcacccttccctggcctactgtgaagacagagtcattgagcactacaagaaactgaacggtcagacaagaggtcaagcaatcgtaaactacatgagcatcgtggagtctctcccaacctacggggttcactattatgcagtgaaggacaagcagggcataccatggtggctgggcctgagctacaaagggatcttccagtatgactaccatgataaagtgaagccaagaaagatattccaatggagacagttggaaaacctgtacttcagagaaaagaagttttccgtggaagttcatgacccacgcagggcttcagtgacaaggaggacgtttgggcacagcggcattgcagtgcacacgtggtatgcatgtccggcattgatcaagtccatctgggctatggccataagccaacaccagttctatctggacagaaagcagagtaagtccaaaatccatgcagcacgcagcctgagtgagatcgccatcgacctgaccgagacggggacgctgaagacctcgaagctggccaacatgggtagcaaggggaagatcatcagcggcagcagcggcagcctgctgtcttcaggttctcaggaatcagatagctcgcagtcggccaagaaggacatgctggctgccttgaagtccaggcaggaagctctggaggaaaccctgcgtcagaggctggaggaactgaagaagctgtgtctccgagaagctgagctcacgggcaagctgccagtagaatatcccctggatccaggggaggaaccacccattgttcggagaagaataggaacagccttcaaactggatgaacagaaaatcctgcccaaaggagaggaagctgagctggaacgcctggaacgagagtttgccattcagtcccagattacggaggccgcccgccgcctagccagtgaccccaacgtcagcaaaaaactgaagaaacaaaggaaaacctcgtatctgaatgcactgaagaaactgcaggagattgaaaatgcaatcaatgagaaccgcatcaagtctgggaagaaacccacccagagggcttcgctgatcatagacgatggaaacattgccagtgaagacagctccctctcagatgcccttgttcttgaggatgaagactctcaggttaccagcacaatatcccccctacattctcctcacaagggactccctcctcggccaccgtcgcacaacaggcctcctcctccccagtccctggagggactccgacagatgcactatcaccgcaacgactatgacaagtcacccatcaagcccaaaatgtggagtgagtcctctttagatgaaccctatgagaaggtcaagaagcgctcctctcacagccattccagcagccacaagcgcttccccagcacaggaagctgtgcggaagccggcggaggaagcaactccttgcagaacagccccatccgcggcctcccgcactggaactcccagtccagcatgccgtccacgccagacctgcgggtccggagtccccactacgtccattccacgaggtcggtggacatcagccccacccgactgcacagcctcgcactgcactttaggcaccggagctccagcctggagtcccagggcaagctcctgggctcggaaaacgacaccgggagccccgacttctacaccccgcggactcgtagcagcaacggctcagaccccatggacgactgctcgtcgtgcaccagccactcgagctcggagcactactacccggcgcagatgaacgccaactactccacgctggccgaggactcgccgtccaaggcgcgccagaggcagaggcagcggcagcgggcggcgggcgcactgggctcagccagctcgggcagcatgcccaacctggcggcgcgcgggggtgcggggggcgcggggggcgcggggggcggtgtgtacctgcacagccagagccagcccagctcgcagtaccgcatcaaggagtacccgctgtacatcgagggcggcgccacgcccgtggtggtgcgcagcctggagagcgaccaggagggccactacagcgtcaaggctcagttcaagacgtccaactcctacacggcgggcggcctgttcaaggagagctggcgcggcggcggcggcgacgagggcgacacgggccgcctgacgccgtcgcgatcgcagatcctgcggactccgtcgctgggccgcgagggcgcccacgacaagggcgcgggccgtgccgccgtctcagacgagctgcgccagtggtaccagcgttccaccgcctcgcacaaggagcacagccgcctgtcgcacaccagctccacctcctcggacagcggctcgcagtacagcacctcctcccagagcaccttcgtggcgcacagcagggtcaccaggatgccccagatgtgcaaggccacgtcagctgccttacctcaaagccagagaagctcgacaccgtcaagtgaaattggagccacccccccaagcagcccccaccacatcctaacctggcagactggagaagcaacagaaaactcacccattctggatgggtctgagtctccacctcaccaaagtactgatgaatag

SEQ ID NO: 196253 - DNA, 3120 bp, Artificial Sequence
  derived and/or modified sequence
atggccgtgcagctggtgcccgacagcgccctgggcctgctgatgatgaccgaaggacgacgatgccaggtgcatcttcttgatgacagaaaactcgaactgttggtgcagccaaaactcctggccaaagaactcctggatttggtggcatctcattttaatcttaaggaaaaagaatatttcggtatcgcctttacagacgagacaggccatctgaactggctccagttggataggcgggtcctggaacatgatttccccaagaaatctgggcctgtggttctatacttttgtgtcaggttttacatcgaatcaatcagttatctgaaggataacgcgacaatagagctgtttttcctcaatgcgaaatcttgcatctacaaagagctgatagatgtggatagtgaagtggtgtttgaactggcctcttacatccttcaggaggcaaagggggatttcagctctaacgaagtggtgcggtccgacctgaagaaactcccagctctgcctacccaggcactcaaggagcatccgtccctagcctactgcgaggatagggtaatcgagcactataagaagctcaatggccagacccgaggacaagccattgtgaattatatgtcaatcgtcgaatccctgccgacctacggggtgcactattatgctgtgaaagacaagcagggaattccatggtggctaggcctgtcttataaagggatctttcaatatgactaccatgataaagttaaaccacgcaagatatttcagtggcggcaactggagaatctgtattttcgggaaaaaaagttttctgtggaggtgcatgatccgagacgagcctcagtaacccgccgcacttttggtcactcggggattgccgttcacacttggtacgcttgtcccgctctgataaagagcatttgggccatggcaatctcccagcaccagttctatctggatcgcaagcagtccaaatctaagatccacgccgcccgatccctaagtgaaattgctatagatctgactgaaaccggtactctgaaaacaagcaagctcgctaatatgggctcaaaggggaaaatcataagcggttcatccggcagcctacttagttctggatcccaggagtccgatagctcacagtccgctaaaaaggacatgttagcagcattgaaatcccgacaggaagccttagaggagactttaaggcagcgcctggaagagcttaagaagctctgcctccgagaggccgagcttacgggaaaactgcctgtggagtatcctttagaccccggagaggagccacccattgtccgccgacggattgggactgcctttaagctggacgaacaaaaaattctccccaaaggagaagaggctgagctggagagactggagagggaattcgcaatccagtctcagatcactgaggccgctcggagactggcttctgaccccaacgtgtccaagaaactgaagaagcagagaaagacgagctacctgaatgctcttaagaaactacaggagatcgagaatgccataaacgaaaaccggatcaaaagcggcaagaaacctactcagcgcgcctccctcataatcgatgatggaaacattgcatctgaagacagttctctgtccgatgcccttgtccttgaagacgaagacagccaggtaacgagcacgatctctccactacattcccctcacaaaggtcttccaccacggccgccatctcacaaccgtcctccaccccctcagtcccttgaggggcttcggcagatgcactaccacaggaacgactacgataagagccctataaaacccaagatgtggagcgagtcgtctctagacgagccttatgaaaaagtcaaaaaacgatctagccactctcattcatccagccataagcggtttcctagtaccgggagttgtgccgaggctggcggcggctccaatagcctccagaattctcctattagaggtctgccacactggaatagtcagagctctatgcctagcacccctgatctcagagtgcgcagccctcactacgttcattcaacgaggagcgtcgacatcagtcccacacgcctccacagcctggccctccattttcggcaccggtcctcctctttagagtcccagggaaagctgctgggctctgagaatgataccggcagtcccgacttttacaccccccggacccgtagtagtaatgggtccgatcccatggacgactgtagctcttgcaccagccactcctcctccgagcattattatccagctcagatgaatgccaactacagcaccctggcagaagactcaccttccaaagccaggcagcggcaacgtcaacggcagcgcgccgccggcgctttggggagtgcttcgtccggctccatgcccaacctggccgcccgaggtggggctgggggtgcaggcggtgcgggagggggggtttatctgcactcacagagccaacctagctcacagtacaggattaaggagtacccactgtacattgaaggcggcgccacacccgtggtcgttagaagcctggaaagcgaccaggaaggccactacagcgtgaaagcacagttcaaaacgagcaattcttacaccgctggaggactcttcaaggaatcctggaggggaggtggcggcgacgaaggagacacgggacgactgacgccaagcagatctcaaattttgcggacacctagtctcggtcgggaaggagcgcacgacaaaggcgctggaagagccgcagtgtcagatgagctgcgccagtggtaccagaggtctacagcgagccataaggagcatagccgcctatcccatacaagcagcacctccagtgacagcgggagccaatacagtacatcaagccagtccactttcgtcgcccattctagggtcacccggatgccacagatgtgcaaggctacttcagcagcattgccacagagccaacggagtagcactccatcctctgagatcggcgctacgcccccgagctcacctcaccacatcctgacatggcagactggcgaggccaccgaaaattcccccatcttggacggctcggagtctccacctcatcagagcacagacgagtag

SEQ ID NO: 196254 - DNA, 3120 bp, Artificial Sequence
  derived and/or modified sequence
atggccgtgcagctggtgcccgacagcgccctgggcctgctgatgatgacggaagggcgtaggtgccaggtccacttgctggacgaccgcaaactggagttgctggtgcagcctaagctcctagccaaggagctcctggacctggttgcaagtcactttaatcttaaagaaaaggaatatttcggaatcgctttcactgatgagaccggccaccttaattggctgcagctagacaggcgggtgctggaacatgacttcccaaaaaaatccggcccagtggtcctatatttctgtgttcgcttttatatcgaatccatcagttacttgaaggacaacgcaaccattgagcttttctttctgaacgccaagagttgtatctataaggagcttatagacgtggattctgaggttgtcttcgaactggcttcatatatcctgcaagaagccaagggcgacttctcttcaaatgaggtcgtccgttccgatctcaaaaagctgcctgccctgccaacccaggccctgaaggagcatcccagtctcgcctactgcgaggaccgagtaatcgagcactataaaaaactgaacggacagaccagagggcaggcaatcgtgaactatatgtcaatcgtcgagagtctgccaacatacggcgtgcactactatgcagtgaaggacaagcaagggatcccctggtggttgggactatcatataaggggatttttcaatatgactatcatgataaagttaagccacgcaaaatttttcaatggcgccagttggagaatctgtattttcgggagaaaaagttcagcgtagaagtgcacgacccccgtcgggcaagtgtgacgaggcggacgttcggtcattctgggattgcagtccacacatggtatgcctgtcccgccttaatcaaatccatttgggctatggcaatcagccagcaccagttttaccttgatcgcaagcagtccaagtctaagattcatgcagcacgctctttgagtgaaattgccattgatctcaccgagactggcacgctgaaaacctccaagcttgctaacatgggctccaaaggaaagatcattagtggatcatccggaagcctgctgtcttccgggagtcaggaatccgactcaagccagtcagcaaaaaaggacatgttggctgccctgaagagtaggcaagaagctttagaagaaacccttcgtcaacggctggaggaacttaagaaattgtgtctgagggaagctgaactaaccgggaaattgcccgtggagtacccattggatcctggagaggaacccccgatcgtacggcgccggatcggtactgcttttaagttggacgaacaaaagattttgcccaaaggggaagaggctgagctggaacggctcgagcgagagtttgcaatccagtctcagattacagaagccgcgcgacgccttgcatccgatccgaatgtgagcaagaagctgaagaagcagcggaagacttcttacctcaacgccctgaaaaaacttcaggagattgaaaacgccattaacgaaaacagaattaaatctgggaagaagccgacacagcgggcctcacttataattgatgatggcaacatcgccagcgaggactccagcctgtccgatgctctggtcttggaagacgaggatagccaagtaacaagtactatcagtcctttacatagccctcataaaggacttccaccacgcccccctagtcataatcgaccccccccaccacagagcctggagggtcttaggcagatgcactaccaccggaatgattacgacaagagccccatcaagccaaagatgtggtcagagtcctctctcgatgagccctatgaaaaggtcaaaaagcgctccagccactcacactcgtccagccacaagaggttcccctctaccgggagctgtgccgaggcgggcggaggaagcaacagtctgcagaacagcccaattagggggctgccacattggaactcgcagagctccatgccctctacgccggacctgcgggtgcgaagtccacactatgtccactcgacccgtagtgtggatataagccccacaaggctgcatagcttagcactccactttaggcataggtcatcttctttggagtcacagggcaagttattgggctcggagaatgacaccggatctcctgacttttatactcccagaacccggtcaagcaatggttccgacccgatggatgactgctccagttgcacctcacacagctctagcgaacattactatccggcgcagatgaacgctaattattcgacactggccgaggattccccttctaaggctcggcaaagacagcgacaaaggcagagggccgccggcgctctcggatcagcctccagcggcagcatgcctaaccttgcagccaggggcggtgctgggggggcaggcggggccggggggggcgtatatctgcactcacagtctcagcccagcagccagtaccgcatcaaagaataccctctttatattgagggaggagcaactccagtcgtggtgaggtctttagagagcgatcaggaaggccactacagtgtgaaagcgcagttcaaaacatcaaacagttacaccgccggcggtttattcaaggaatcatggcggggcggcggcggcgatgagggtgataccggaaggctaactccttcacgctcccagatccttcgtacaccatcactcggccgcgaaggagcccacgataaaggcgccgggcgcgccgcagtgtccgatgaacttcggcagtggtaccagcgaagtacagcatctcacaaggagcactcccgcctctcccacacatcctctacctcaagcgactctggcagccagtattcaacaagcagtcagtctacatttgtagcacatagccgcgtgaccagaatgccccagatgtgtaaggctacttctgccgcgctgccacagtcacaacgttccagcacccctagttctgagatcggtgccaccccccccagcagcccacaccatatactgacctggcagacaggcgaggctacagaaaactcacccatcttggacggatccgaatcgcccccacaccagagcaccgatgaatag

SEQ ID NO: 196255 - DNA, 3120 bp, Artificial Sequence
  derived and/or modified sequence
atggctgtgcaactggtacccgacagcgccttggggctgttaatgatgacagaagggcgtcgctgccaggtccacctcttggacgaccgcaagcttgaattgctggtgcaacccaagctcctggccaaggaattgttggatctggttgcttctcatttcaatctgaaggagaaggaatactttgggattgcctttaccgatgaaacgggtcatttgaactggcttcagctggacaggagagtgctggagcatgattttccaaaaaaatcagggcctgtggttctttacttttgcgtaagattttatatagaaagcatctcttatctcaaagacaacgcaaccatagagctgtttttcttaaatgcaaagtcatgcatttacaaagaactcattgatgttgactcagaagtggtcttcgagctggcgtcgtacatcctccaggaggccaagggagactttagttcgaacgaagtcgtgagaagtgatctgaaaaagctgccagcactccccacccaggccctgaaggagcacccctcactggcttattgtgaggatcgcgtgatagagcattacaagaagctgaacggacaaactagaggccaggccattgtcaattacatgagtattgtagagtccctgcctacgtacggcgtccactactatgctgtcaaagataagcaagggattccatggtggctcggactcagctacaagggaattttccagtatgattatcacgacaaagtgaaacccagaaaaatcttccagtggcgacaattggagaatctatatttcagagaaaagaagtttagcgtcgaggtgcacgatccgcgtcgggcttctgttactagacggactttcggacactccggaatcgcggttcacacgtggtacgcatgccctgcacttataaagtccatctgggcaatggccatttcccaacatcagttctacttggataggaaacagtcgaagagtaagatccatgcggcaagatctctatctgaaatcgctatcgatctgaccgagacaggcacactgaagacgagcaaactggctaatatgggcagcaaaggcaaaattataagcggctcttcaggttccctgctatcttccggctcgcaggaatcagattcaagtcagtctgccaaaaaagatatgctcgccgctctgaaatcacgtcaggaggccctggaagagactctccggcaacggctggaagaacttaaaaagctgtgcttacgcgaggctgaactaaccggaaagctgccagttgagtatcctctcgatccgggtgaagaaccccctatcgtgcgacgccgtattgggacagcctttaaattagatgaacagaagatcctccccaaaggcgaggaggctgaactggagcggcttgagcgcgagttcgccatccagtctcagatcacggaagccgcacggaggctcgcctcagaccccaacgtgagcaagaaacttaaaaaacagagaaaaaccagctacctgaacgcattgaaaaagctccaggagatcgaaaacgcaattaatgagaatcgcatcaagtccggcaaaaaaccaacccagcgggcatcactaatcattgatgacggcaacatcgcttctgaggacagttcactgagcgacgctctcgtgctcgaggacgaggacagtcaggtcacaagtactatttcgcccttgcatagtccgcataagggacttcctcccagaccccctagccataacaggcctccacctcctcagtccctagaaggcttaagacaaatgcactatcaccgaaatgactatgacaaatcacccataaagcctaagatgtggagcgagagcagtttggatgagccatacgaaaaagtcaagaagaggtcttcccattcacatagctcctcccataaaaggtttccttcaaccggttcctgcgccgaggcaggaggcggatccaatagtctacagaactccccaattcgcggactgccacattggaactcgcagagtagcatgcccagcacccccgatctgagggtgcgaagtccccattatgtacactcaacaagaagcgttgatataagtccaacacgtctgcactccctcgccctacacttcagacaccgctcgtccagtttagaaagtcaggggaagctgctcgggagtgaaaacgacactgggtctccggacttctacaccccaagaactcgcagtagcaatggttcagatccgatggatgactgcagttcttgtacctcacatagttcaagtgagcactactatccagctcagatgaacgccaattattccactctggccgaagactccccttccaaggctagacaaaggcagcgtcagcggcagcgggctgccggagcgctggggtcagcctccagtggaagtatgcctaaccttgccgctagaggtggcgcaggaggcgctggcggtgcaggagggggagtctacctgcacagccagagtcagccatcttcccagtatcgaatcaaggagtaccccctgtacatcgagggcggtgcgacccccgtagtggtgcgctccttggagagcgaccaggagggccattattcagtgaaagcccagttcaaaacgagtaattcatacacggctgggggtctgttcaaggaaagctggcgcggtggagggggagacgagggggacaccggcagactaacaccttctaggtcccagattctgcgcactcctagcctgggtcgcgagggagctcatgataaaggggctggcagggccgcagtgtccgacgaattacggcagtggtatcaacgcagcactgcgagccacaaagagcactccaggctgtcccacacgagttctacctcaagcgacagtgggtcacaatatagcacaagcagtcagtccaccttcgtcgctcacagcagggtcactcgcatgccccagatgtgcaaagcaacttctgctgccttaccacaatcacagcgctcaagcactccgtctagcgaaatcggcgctactccaccctccagtccacaccatatcctgacctggcaaaccggcgaggcaaccgaaaactcccctatcttagatgggtcggagtctcctccgcaccagagtactgatgagtag

SEQ ID NO: 196256 - DNA, 3120 bp, Artificial Sequence
  derived and/or modified sequence
atggccgtacagctcgtgccagactctgctctgggtttgctcatgatgactgaagggaggagatgccaggtacatctactggacgatcgaaagctcgaacttctagttcagcctaagctgttggccaaagagttgttggatctcgttgcctcccattttaacttgaaggaaaaggagtacttcggcattgccttcaccgatgagactgggcatctgaattggctgcaactcgataggagagttctcgagcatgatttccccaagaagagtggacccgtggtgttatacttctgcgtgagattctacatagagagcatctcgtatctgaaggacaatgccaccatcgagttattttttctaaatgcaaagtcttgcatctacaaggaactgatcgatgtcgactctgaggtcgttttcgagctggcatcatacatcctgcaagaggccaaaggcgattttagcagcaatgaagtggttcgatctgatctgaaaaagctgcccgctctacccacacaggccctaaaggaacatccaagcctggcctattgcgaggaccgcgtcatagagcactacaaaaaactgaacggtcagacacggggacaggcaattgtcaactacatgtccatcgtggaatccctgcccacctatggcgtccactattatgcagttaaagataagcaggggattccgtggtggctgggcctcagttacaaggggatttttcagtacgactatcacgataaggtcaaaccaaggaagatttttcaatggcggcagcttgagaacctgtacttcagagagaagaagttcagtgtggaagtccatgaccccagacgtgcttcggtaaccagaaggaccttcggccattcaggcatcgctgtgcacacttggtacgcatgcccggcactgatcaaaagcatctgggccatggcaattagtcagcatcagttttatttggacagaaagcaatcaaagtccaagattcacgccgctaggtctttgtctgaaatagcgatcgatctcaccgaaactggtacactgaaaacatccaaactagcaaatatggggagtaagggcaagattattagcgggtcctcaggctctcttctgtcaagcgggagccaggaatccgatagttcccagtcagctaagaaggacatgctcgcagccctgaagagccgccaggaagctttagaggagacgctgcggcaacgattagaagagctgaaaaagctctgcctaagggaggccgagctcaccggtaagcttcctgttgagtatccgctggatcccggtgaggagccccctattgtgcgacgcagaattggcacagcgtttaaactagacgagcagaaaattctcccgaagggagaagaggctgaactggagcggcttgagcgcgaattcgccatccagtctcaaattaccgaagcagctcgtcgtttggcctcagaccccaacgtttccaaaaagctgaaaaaacagcggaagacatcatacctgaatgctctgaagaaacttcaggagatagagaatgctattaacgaaaacagaatcaagtcaggcaagaagcccacgcagcgtgcttccctgatcatcgacgacgggaatatcgcatctgaagattctagtctgagtgatgctttggtgttagaggacgaggactcacaggttaccagcaccattagtcctcttcactcacctcacaaagggctgccacctagacccccttcccacaaccgaccacctcccccacagagtctggaaggtcttcgccaaatgcactatcacaggaacgattacgacaagtctcctatcaaacctaagatgtggtcggagagttctttagatgagccatatgagaaagtcaagaaaagaagtagccactctcactccagctcccataagcgctttccttccacagggtcatgtgctgaggctggaggcggatcaaactcactgcagaacagccctattagagggctccctcattggaacagtcagtccagtatgccaagcactcccgacttgcgcgtgcgaagcccccattacgttcattcaacacgtagcgtggatatcagcccgactaggttacacagtctcgctcttcatttccggcacagatccagctcactggagagccaaggcaaactgttgggatccgaaaacgacacaggcagtcctgacttttacacccctagaaccaggagctcgaatggcagtgatcctatggacgactgcagttcgtgtacatctcattccagctccgaacactactatcccgcacagatgaatgctaattactctactctggctgaggactccccgagtaaggcaagacaaagacagagacaacgccaaagagcagctggcgcactcggttcagcctcatccgggtctatgccaaaccttgccgctcgaggaggcgcagggggtgcaggaggggctggtggcggagtctacctgcattctcagagtcagccatcttcacagtatcgtatcaaggaatacccgttatacatcgaaggaggtgccacgccagttgtggtacggtcactggagagcgatcaagaaggacactactcagtaaaggcccagtttaaaacctccaattcgtacactgccggtggcctcttcaaggagtcctggaggggtggcggaggtgacgagggggacactgggaggctaacacccagcaggagccagatcctcagaactccgtcccttggtcgagagggtgcgcatgataagggcgcaggacgggctgctgtttcagatgagttgaggcagtggtatcagcggtccacagcttctcacaaagaacactcccgcctgagccacacttccagcacctcatctgatagcggctcccagtacagcacatcctcccagtccaccttcgtggcacatagccgcgttacccggatgccacagatgtgtaaggccacctccgccgctttgccccagagccagcggtcctcaacgccttctagcgagatcggcgctacaccacccagttcaccacaccacattttaacttggcagacaggggaggccaccgagaattcccctatcctggatgggtccgaatcacccccacaccagagcactgacgagtag

SEQ ID NO: 196257 - DNA, 1314 bp, Artificial Sequence
  derived and/or modified sequence
atgagtgaagagaaagactgcggaggcggcgacgcattgtccaacggcattaaaaagcaccggacatccctgccttcaccaatgttttcacggaacgacttctccatttggagtatccttcgcaagtgcatcggcatggagctgtcaaagataactatgccagtgatctttaacgaacctttgtccttcctgcagcgactcaccgagtacatggagcacacatacctgatccacaaagcttcgtcattgagcgacccggttgagcggatgcagtgcgtcgctgccttcgcggtgagcgctgtggccagtcaatgggaaagaactggtaaaccattcaatccattgctgggggagacatacgaacttgtaagagacgatttagggttcaggcttatatcagagcaggtttcacaccacccgccaatctctgccttccacgccgaaggcttgaacaatgactttattttccacggcagtatttaccctaagttgaaattctgggggaagtcagtggaagcggaacctaaaggaaccataacgctcgagctgctcgagcacaatgaagcctacacatggaccaatccgacctgctgtgtgcacaatatcatcgtcggaaagctgtggattgaacaatatggcaatgtcgaaatcataaaccataagacaggggataaatgtgtgttgaacttcaaaccatgtggcctctttggaaaagagctgcataaagtagagggatacatccaggataagagtaaaaagaaactgtgcgccctgtacggcaagtggacagagtgcctctacagtgtggacccagcaacctttgacgcgtacaaaaagaatgacaagaagaacaccgaagagaaaaagaattctaagcagatgagcacatcagaggagttagacgagatgccagttcccgattccgaatctgtctttatcatacccgggtctgttctcctgtggagaattgctcccagaccaccaaactccgctcagatgtataatttcacatctttcgcaatggtgctgaacgaagttgacaaagacatggaatcagtgatccctaaaactgattgtcggctccgccccgacatccgggctatggaaaacggtgagatagatcaggcgtctgaggaaaagaaacggttggaggaaaaacagcgcgccgcacggaaaaaccgttcaaaatccgaagaggattggaagacacgctggttccaccaagggcctaatccctacaacggcgcacaggattggatctattctggttcttattgggacaggaattacttcaatctcccggatatctattag

SEQ ID NO: 196258 - DNA, 1314 bp, Artificial Sequence
  derived and/or modified sequence
atgtctgaggagaaggactgtggcggcggagatgccctgagcaatggcatcaagaagcacaggaccagcctgcccagccccatgttcagcagaaatgacttcagcatctggagcatcctgaggaagtgcatcggcatggagctgagcaagatcaccatgcctgtgatcttcaatgagcccctgtccttcctgcagaggctgacagagtacatggagcacacctacctgatccacaaggccagcagcctgagtgaccctgtggagaggatgcagtgtgtggccgcctttgctgtgtctgctgtggccagccagtgggagaggacaggcaagcccttcaaccccctgctgggggagacctatgagctggtgagagatgacctgggcttccgcctcatcagcgagcaggtgagccaccacccccccatcagcgccttccacgccgagggcctgaacaatgacttcatcttccacggcagcatctaccccaagctgaagttctggggcaagtctgtggaggccgagcccaagggcaccatcaccctggagctgctggagcacaatgaggcctacacctggaccaaccccacctgctgcgtgcacaacatcatcgtgggcaagctgtggattgagcagtatggaaatgtggagatcatcaaccacaagacaggagacaagtgtgtgctgaacttcaagccctgtggcctgtttgggaaggagctgcacaaggtggagggctacatccaggacaagagcaagaagaagctgtgtgccctgtatggcaagtggacagagtgcctgtacagcgtggaccctgccacctttgatgcctacaagaagaatgacaagaagaacacagaggagaagaagaacagcaagcagatgagcaccagcgaggagctggatgagatgcctgtgcctgacagcgagagcgtcttcatcatccctggctctgtgctgctgtggagaattgcccccaggcctcccaacagcgcccagatgtacaacttcaccagctttgccatggtgctgaatgaggtggacaaggacatggagagcgtcatccccaagacagactgccgcctgcggccagacatccgggccatggagaatggagaaattgaccaggccagcgaggagaagaagaggctggaggagaagcagagagctgccaggaagaacagaagcaagtctgaggaggactggaagacccgctggttccaccagggccccaacccctacaacggggcccaggactggatctacagcggcagctactgggacaggaactacttcaacctgcctgacatctactag

SEQ ID NO: 196259 - DNA, 1314 bp, Artificial Sequence
  derived and/or modified sequence
atgagcgaggagaaggactgcggcggcggcgacgccctgagcaacgggattaagaaacaccggacatctcttcccagcccaatgttttccaggaacgatttctctatatggtctattttgagaaagtgtatcggaatggagctgtccaagattaccatgccggtgatcttcaatgaacccctgagctttctgcaacggctgacggaatacatggaacatacctacctgatccacaaggcgtcgagtttgagcgatcctgttgaacggatgcagtgcgttgccgccttcgcggtctctgccgtcgctagccagtgggaacggaccgggaaaccctttaacccactgttgggcgaaacctatgagttggtgcgcgacgacctgggcttccgtctaattagcgagcaagtctcccaccaccctcccattagtgcattccatgcggagggcctgaacaacgattttatattccatggcagcatttacccaaaacttaagttctggggaaaaagcgtagaagccgaaccgaagggtaccattaccctagagctcctggagcataatgaggcttatacctggacaaaccctacatgttgcgtccataacatcatagtgggaaagttatggatagaacaatacggaaatgtcgagatcattaaccataagacaggggacaagtgtgttctgaatttcaagccctgcggattgttcggaaaggagctgcataaagttgagggctacatacaggataaatccaagaaaaagctgtgtgcactgtacggaaagtggacagagtgcctctattcagttgaccctgctaccttcgatgcatacaagaaaaatgacaagaaaaacactgaagagaaaaaaaactctaagcaaatgtccacgagcgaagagttggatgagatgccagttcctgactctgagagtgtattcattattcccggctcagtgctactgtggcggattgccccacgaccgcccaacagcgcccagatgtacaacttcaccagcttcgccatggttcttaatgaagtggacaaagacatggaaagcgtgatcccaaagaccgactgccgccttcgaccggacattcgggcaatggaaaacggtgaaattgaccaggccagtgaagagaagaagcgtctagaggagaagcagcgcgctgcaaggaagaataggagtaagagcgaagaagattggaaaactagatggttccaccagggtcccaatccctacaacggagcccaggattggatatacagcggatcctactgggaccgaaattactttaatctcccggatatctattag

SEQ ID NO: 196260 - DNA, 1314 bp, Artificial Sequence
  derived and/or modified sequence
atgtcagaagagaaggactgtgggggtggcgatgctctgtccaacggcataaagaagcacagaactagccttcctagccctatgttttctcggaacgatttttctatctggtcaatcctgcgcaaatgcattggaatggagttatccaaaatcaccatgccagttatttttaacgagccactgtccttcttacagagattgacagagtacatggagcacacatacctgatccacaaggctagctcactgagtgatccagtggagcgcatgcagtgcgttgctgcgtttgccgtgtctgccgtggcgtcgcagtgggaaaggacagggaagccattcaaccccttgctgggggagacctacgagttagtccgggacgatctcgggtttagactgatcagtgaacaggtaagccaccaccccccaatctccgctttccatgctgaggggcttaataacgactttatctttcatggctctatctatccgaaactaaagttctgggggaagtccgtggaggcagagccaaagggcacaatcacactggaactgctggaacacaacgaggcctacacatggactaatccgacttgctgcgtgcacaatattattgtgggaaaactgtggatcgagcagtatgggaacgtggagatcattaaccataagaccggcgacaaatgtgtgctcaacttcaaaccttgcgggttatttggcaaggaactccataaggttgagggctacatccaggacaaaagtaaaaaaaaactgtgtgccttgtatggtaagtggaccgagtgtttgtactccgtcgaccctgcaactttcgacgcgtacaagaagaacgacaagaagaataccgaagagaagaagaactccaaacagatgtctacaagcgaggagcttgatgagatgcctgtgcctgactcggagagtgtcttcattatccccggttccgtgttactatggagaattgcaccccgaccacccaattccgcacagatgtataatttcacgagtttcgcgatggtgctgaatgaagtggacaaggatatggagtctgttatacctaaaactgattgtagattacgaccagatatcagagctatggaaaacggtgaaatcgaccaagcatctgaggagaagaagcgcctggaagagaagcagcgagccgcacgaaaaaaccggtcaaagtcggaagaagattggaaaaccagatggttccaccaggggccaaacccttacaacggcgcacaagattggatatacagcggaagctattgggatcgcaattactttaatctgcctgatatctactag

SEQ ID NO: 196261 - DNA, 1314 bp, Artificial Sequence
  derived and/or modified sequence
atgagcgaggagaaggactgcggcggcggcgacgccctgagcaacggcatcaagaagcacagaaccagcctgcccagccccatgttcagcagaaacgacttcagcatctggagcatcctgagaaagtgcatcggcatggagctgagcaagatcaccatgcccgtgatcttcaacgagcccctgagcttcctgcagagactgaccgagtacatggagcacacctacctgatccacaaggccagcagcctgagcgaccccgtggagagaatgcagtgcgtggccgccttcgccgtgagcgccgtggccagccagtgggagagaaccggcaagcccttcaaccccctgctgggcgagacctacgagctggtgagagacgacctgggcttcagactgatcagcgagcaggtgagccaccacccccccatcagcgccttccacgccgagggcctgaacaacgacttcatcttccacggcagcatctaccccaagctgaagttctggggcaagagcgtggaggccgagcccaagggcaccatcaccctggagctgctggagcacaacgaggcctacacctggaccaaccccacctgctgcgtgcacaacatcatcgtgggcaagctgtggatcgagcagtacggcaacgtggagatcatcaaccacaagaccggcgacaagtgcgtgctgaacttcaagccctgcggcctgttcggcaaggagctgcacaaggtggagggctacatccaggacaagagcaagaagaagctgtgcgccctgtacggcaagtggaccgagtgcctgtacagcgtggaccccgccaccttcgacgcctacaagaagaacgacaagaagaacaccgaggagaagaagaacagcaagcagatgagcaccagcgaggagctggacgagatgcccgtgcccgacagcgagagcgtgttcatcatccccggcagcgtgctgctgtggagaatcgcccccagaccccccaacagcgcccagatgtacaacttcaccagcttcgccatggtgctgaacgaggtggacaaggacatggagagcgtgatccccaagaccgactgcagactgagacccgacatcagagccatggagaacggcgagatcgaccaggccagcgaggagaagaagagactggaggagaagcagagagccgccagaaagaacagaagcaagagcgaggaggactggaagaccagatggttccaccagggccccaacccctacaacggcgcccaggactggatctacagcggcagctactgggacagaaactacttcaacctgcccgacatctactag

SEQ ID NO: 196262 - protein, 60 aa, Artificial Sequence
  derived and/or modified sequence
  misc_feature (1)..(1): Xaa can be any naturally occurring amino acid
XRRRSRSRDRRRRRSRSTSRERRKLSRSRSRDRHRRHRSRSRSHSRGHRRASRDRSAKYK

SEQ ID NO: 196263 - DNA, 1116 bp, Artificial Sequence
  derived and/or modified sequence
atgagcgcccaggcgcaaatgcgggccctgttggaccagctcatgggcaccgcacgggacggcgatgagactcgccagagagtgaagtttactgatgatcgagtgtgcaaatcccatctcctggactgttgtccccacgatattctagccggaaccagaatggatctgggtgagtgcacaaagatacatgatctggcactgcgggctgactacgaaatcgcctccaaagagagagatctgttctttgagttggacgctatggatcatctggagtcctttatagccgagtgcgataggcggaccgagctggctaagaagcggttggcagagacccaggaggaaatcagcgccgaagtaagcgccaaagccgagaaggtgcatgagttgaatgaggagattggtaagctgctcgccaaggcagagcagctcggagccgaggggaacgtggatgaatcccagaaaattttgatggaggtcgagaaggtaagagctaagaagaaggaagctgaggaagaataccgcaacagcatgcctgcatcatcttttcagcagcagaagctccgcgtttgtgaagtatgttcggcctacttagggctacatgacaatgaccggcggctggcagaccatttcggcggtaaactgcacttagggttcattcagattcgcgagaaacttgatcagttgcggaaaactgttgcggagaaacaggaaaaacgcaatcaggacagactgaggcggcgcgaggaacgcgaacgtgaggagaggttaagtaggcgcagcggcagtcgaactcgggacagacggcggagccggagcagagaccgcagacgtagaagatcaagatccacatctcgcgagagaagaaaattgagcagaagccggagccgggatcgacaccggaggcatagatcccgttcccggagccactcccgaggtcaccgtagagctagtagagacagatcggctaaatataagttctctagggaacgggctagcagggaggaatcctgggagtctggccgctccgagaggggcccacctgactggcggctggagagtagtaacggcaaaatggcttcgcgaagaagtgaggaaaaggaagcaggtgagatttag

SEQ ID NO: 196264 - DNA, 978 bp, Artificial Sequence
  derived and/or modified sequence
atgtctgcacaagcccagatgcgtgcacttctagaccagctgatgggcaccgctcgggacggggatgaaacccggcaacgtgttaagtttaccgacgaccgggtctgcaaaagtcaccttctggactgctgcccccacgatatcttggcgggcacaagaatggatctgggggagtgtaccaagatccacgacctggctctgagagccgattatgagatcgcctcgaaggagagagacttgttcttcgagcttgatgccatggatcacctggagtcattcattgctgaatgcgaccggagaacagaacttgctaaaaagcggctggctgagacacaagaggaaatatcagcggaagtgagcgccaaggccgagaaggtacacgagcttaatgaggagattggaaaactgctcgccaaggccgaacagcttggcgctgaaggtaacgttgacgagagtcagaaaatcctgatggaggttgagaaggtgagggctaaaaagaaagaggccgaggaagagtatagaaatagtatgcccgcttcatcattccagcagcagaaattgagagtctgtgaagtctgctcagcctatctcggtctccatgacaacgatcggcgtctcgccgaccattttggcgggaaactccacctcggattcattcagatcagagagaagttggatcaacttaggaaaacagtggccgaaaagcaagagaagagaaatcaggaccgcttacgccgcagagaggagcgcgagagagaagagcgactatcccgaaggagcggctcacgaactcgcgaccgacgaaggagtaggtctagggaccgcagacgtcgacgcagccgatctacctcccgcgaaagaaggaaactgtcaagaagtcggagccgcgaccgccatagacggcaccgtagtcggtcaagaagtcactcccgtggacatcgtcgggccagtagagatcgctctgctaagtacaaatag

SEQ ID NO: 196265 - DNA, 978 bp, Artificial Sequence
  derived and/or modified sequence
atgtcggctcaggctcagatgcgggcgctgctagaccagttgatgggtaccgcccgcgacggcgacgagaccaggcagagagtgaagtttactgacgaccgagtatgcaaatctcacctactggactgttgtccgcacgatatcctcgcgggtactaggatggatttgggagagtgtactaaaattcatgacctggccctccgagctgactacgaaatcgcaagcaaagaaagggatctgttttttgaactagacgccatggaccatctagagagctttatagctgaatgtgacagaaggacagagctagcaaagaagagattggcagagacccaagaagaaatatccgccgaggtgtcagccaaagcggaaaaagtgcatgagctgaacgaagagataggcaagcttctggcgaaggccgagcaactgggggccgaaggcaatgtggatgaatctcagaaaatccttatggaagtagagaaagtcagggccaagaaaaaggaagcggaagaggaatatagaaacagtatgcctgctagcagcttccagcagcagaagctacgtgtatgcgaggtgtgttccgcctatctcggcctacacgataacgatcggcggttggccgaccactttgggggaaagctgcacctggggtttatacagatcagggaaaagcttgaccagttacggaaaacagtggctgaaaaacaggaaaagagaaatcaggatcggcttcggcggagagaagagcgcgagagggaagagaggctgagccgcaggtcaggaagccgcacacgcgataggcggcgaagccggtcccgagacagacgccgtagacgctctcgttctacatccagggagcgacgaaagcttagcaggtccaggagcagagaccggcacagacggcataggtccagatccaggtcccattccaggggtcacagacgagccagccgggatcgttctgctaagtacaaatag

SEQ ID NO: 196266 - DNA, 1116 bp, Artificial Sequence
  derived and/or modified sequence
atgtctgcccaggcccagatgagggccctgctggaccagctgatgggcacagccagagatggagatgagacccggcagagggtgaagttcacagatgacagagtgtgcaagagccacctgctggactgctgcccccatgacatcctggccggcaccaggatggacctgggggagtgcaccaagatccatgacctggccctgcgggctgactatgaaattgccagcaaggagcgggacctcttctttgagctggatgccatggaccacctggagagcttcatcgccgagtgtgacagaagaacagagctggccaagaagaggctggccgagacccaggaggagatctctgctgaggtgtctgccaaggccgagaaggtgcatgagctgaatgaggagatcggcaagctgctggccaaggccgagcagctgggcgctgagggcaatgtggatgagagccagaagatcctgatggaggtggagaaggtgcgggccaagaagaaggaggccgaggaggagtacagaaacagcatgcctgccagcagcttccagcagcagaagctgcgggtgtgtgaggtgtgcagcgcctacctgggcctgcatgacaatgaccggcggctggccgaccactttggaggcaagctgcacctgggcttcatccagatccgggagaagctggaccagctgaggaagacagtggccgagaagcaggagaagaggaaccaggaccggctgcggcggcgggaggagcgggagcgggaggagcggctgagccgccgcagcggcagcaggacccgggacagaagaagaagccgcagccgggacagaagaagaagaagaagccgcagcaccagccgggagaggaggaagctgagccgcagccgcagccgggacagacaccggcggcacaggagccgcagccgcagccacagccggggccaccggcgggccagccgggacagaagtgccaagtacaagttcagccgggagcgggccagccgggaggagagctgggagagcggccgctctgagcggggccccccagactggaggctggagagcagcaatggcaagatggccagcagaagaagtgaggagaaggaggccggggagatctag

SEQ ID NO: 196267 - DNA, 978 bp, Artificial Sequence
  derived and/or modified sequence
atgtctgcccaggcccagatgagggccctgctggaccagctgatgggcacagccagagatggagatgagacccggcagagggtgaagttcacagatgacagagtgtgcaagagccacctgctggactgctgcccccatgacatcctggccggcaccaggatggacctgggggagtgcaccaagatccatgacctggccctgcgggctgactatgaaattgccagcaaggagcgggacctcttctttgagctggatgccatggaccacctggagagcttcatcgccgagtgtgacagaagaacagagctggccaagaagaggctggccgagacccaggaggagatctctgctgaggtgtctgccaaggccgagaaggtgcatgagctgaatgaggagatcggcaagctgctggccaaggccgagcagctgggcgctgagggcaatgtggatgagagccagaagatcctgatggaggtggagaaggtgcgggccaagaagaaggaggccgaggaggagtacagaaacagcatgcctgccagcagcttccagcagcagaagctgcgggtgtgtgaggtgtgcagcgcctacctgggcctgcatgacaatgaccggcggctggccgaccactttggaggcaagctgcacctgggcttcatccagatccgggagaagctggaccagctgaggaagacagtggccgagaagcaggagaagaggaaccaggaccggctgcggcggcgggaggagcgggagcgggaggagcggctgagccgccgcagcggcagcaggacccgggacagaagaagaagccgcagccgggacagaagaagaagaagaagccgcagcaccagccgggagaggaggaagctgagccgcagccgcagccgggacagacaccggcggcacaggagccgcagccgcagccacagccggggccaccggcgggccagccgggacagaagtgccaagtacaagtag

SEQ ID NO: 196268 - DNA, 1456 bp, Artificial Sequence
  derived and/or modified sequence
gaaagagccgagtgggctcgaggccgacgcgaccatcgtttgtcgacgccgctgccaccgcctgcctgagagaagtcgtcgcggccgaccccgtcgcctccgccggctaccatgtccgcccaggcgcagatgcgggccctgctggaccagctcatgggcacggctcgggacggagacgaaaccagacagagggtcaagtttacagatgaccgtgtctgcaagagtcaccttctggactgctgcccccatgacatcctggctgggacgcgcatggatttaggagaatgtaccaaaatccacgacttggccctccgagcagattatgagattgcaagtaaagaaagagacctgttttttgaattagatgcaatggatcacttggagtcctttattgctgaatgtgatcggagaactgagctcgccaagaagcggctggcagaaacacaggaggaaatcagtgcggaagtttctgcaaaggcagaaaaagtacatgagttaaatgaagaaataggaaaactccttgctaaagccgaacagctaggggctgaaggtaatgtggatgaatcccagaagattcttatggaagtggaaaaagttcgtgcgaagaaaaaagaagctgaggaagaatacagaaattccatgcctgcatccagttttcagcagcaaaagctgcgtgtctgcgaggtctgttcagcctaccttggtctccatgacaatgaccgtcgcctggcagaccacttcggtggcaagttacacttggggttcattcagatccgagagaagcttgatcagttgaggaaaactgtcgctgaaaagcaggagaagagaaatcaggatcgcttgaggaggagagaggagagggaacgggaggagcgtctgagcaggaggtcgggatcaagaaccagagatcgcaggaggtcacgctcccgggatcggcgtcggaggcggtcaagatctacctcccgagagcgacggaaattgtcccggtcccggtcccgagatagacatcggcgccaccgcagccgttcccggagccacagccggggacatcgtcgggcttcccgggaccgaagtgcgaaatacaagttctccagagagcgggcatccagagaggagtcctgggagagcgggcggagcgagcgagggcccccggactggaggcttgagagctccaacgggaagatggcttcacggaggtcagaagagaaggaggccggcgagatctgaacccgtctcccgggtgctgtaaatagtctgataaacgttcacacagtctaaaattaccctttatatttgctgaatacaactcatcttttgtagtttaaaatttctattgttttggagctagctgtgagtttctagaagtgtacagagttgctcctgtgttcccgggtcatgttgagtaggaataaataaatctgatgctgcctcctgaggctgcggggggtttctgctg

SEQ ID NO: 196269 - DNA, 2097 bp, Artificial Sequence
  derived and/or modified sequence
tcccccgcggcgggaaagagccgagtgggctcgaggccgacgcgaccatcgtttgtcgacgccgctgccaccgcctgcctgagagaagtcgtcgcggccgaccccgtcgcctccgccggctaccatgtccgcccaggcgcagatgcgggccctgctggaccagctcatgggcacggctcgggacggagacgaaaccagacagagggtcaagtttacagatgaccgtgtctgcaagagtcaccttctggactgctgcccccatgacatcctggctgggacgcgcatggatttaggagaatgtaccaaaatccacgacttggccctccgagcagattatgagattgcaagtaaagaaagagacctgttttttgaattagatgcaatggatcacttggagtcctttattgctgaatgtgatcggagaactgagctcgccaagaagcggctggcagaaacacaggaggaaatcagtgcggaagtttctgcaaaggcagaaaaagtacatgagttaaatgaagaaataggaaaactccttgctaaagccgaacagctaggggctgaaggtaatgtggatgaatcccagaagattcttatggaagtggaaaaagttcgtgcgaagaaaaaagaagctgaggaagaatacagaaattccatgcctgcatccagttttcagcagcaaaagctgcgtgtctgcgaggtctgttcagcctaccttggtctccatgacaatgaccgtcgcctggcagaccacttcggtggcaagttacacttggggttcattcagatccgagagaagcttgatcagttgaggaaaactgtcgctgaaaagcaggagaagagaaatcaggatcgcttgaggaggagagaggagagggaacgggaggagcgtctgagcaggaggtcgggatcaagaaccagagatcgcaggaggtcacgctcccgggatcggcgtcggaggcggtcaagatctacctcccgagagcgacggaaattgtcccggtcccggtcccgagatagacatcggcgccaccgcagccgttcccggagccacagccggggacatcgtcgggcttcccgggaccgaagtgcgaaatacaagtaactactctgactccttcggtagctgcaaccaggagtgagcccttctctgtgttcccagggtctgctgagggccgtgtctggtggggatggggctgggctcaccctcaggagtagggctggggagtcgtgaacgggactcaggtgtgggaagaggcgagagggctgtggaggagctcgcacggcgccaggtgatgggctgcacaggcactgtcccctgcctgcgtcctggggcctgtgcactgttgcgtccatgctcagagtggctgagacttgtgtcctgaccaggccctgcttacctctgttttggtttttgtttttgatatttttttttccattgtgtttttacgtagtgtcatgttctgtgcatatagtgttgtattctcctttgcactgtttatgttacagtgaaggctctccttattaaaaatcttcgcaaaggtcactttttaatggctatctaacactccatatgtggtgggcaagtctggttggcctccggggggtttccaggtataggggatgtagggccttgcctggcctggtctgcgggtccatcgtcagtgcctgagcggccagcagaaggggggcagcagcctccactgagcctctggttcccatttcccaggttctccagagagcgggcatccagagaggagtcctgggagagcgggcggagcgagcgagggcccccggactggaggcttgagagctccaacgggaagatggcttcacggaggtcagaagagaaggaggccggcgagatctgaacccgtctcccgggtgctgtaaatagtctgataaacgttcacacagtctaaaattaccctttatatttgctgaatacaactcatcttttgtagtttaaaatttctattgttttggagctagctgtgagtttctagaagtgtacagagttgctcctgtgttcccgggtcatgttgagtaggaataaataaatctgatgctgcctcctgaggctgcggggggtttctgctg

SEQ ID NO: 196270 - DNA, 1335 bp, Artificial Sequence
  derived and/or modified sequence
gtggttcatggacctctgattagcttgggttttgcagtctcattgccacatgtatatgtggagccaatggccttttggtgctcagctgtttacgtctgactccttgacttctttggtacagtgatggagtcagatctcattaagtgtgattctccatgatataactagcctcaaaaaaatgtgtattccactccagttgtaaatatctttagatcagcttttcattgcatttgatggggagaacacagaaatgatagtctgcaaatcatccaggtgaattgttatactagttattttttggtggttaatgtgataatattgtcttatttaaaaccacaaatgaatttcaggagacgaaaccagacagagggtcaagtttacagatgaccgtgtctgcaagagtcaccttctggactgctgcccccatgacatcctggctgggacgcgcatggatttaggagaatgtaccaaaatccacgacttggccctccgagcagattatgagattgcaagtaaagaaagagacctgttttttgaattagatgcaatggatcacttggagtcctttattgctgaatgtgatcggagaactgagctcgccaagaagcggctggcagaaacacaggaggaaatcagtgcggaagtttctgcaaaggcagaaaaagtacatgagttaaatgaagaaataggaaaactccttgctaaagccgaacagctaggggctgaaggtaatgtggatgaatcccagaagattcttatggaagtggaaaaagttcgtgcgaagaaaaaagaagctgaggaagaatacagaaattccatgcctgcatccagttttcagcagcaaaagctgcgtgtctgcgaggtctgttcagcctaccttggtctccatgacaatgaccgtcgcctggcagaccacttcggtggcaagttacacttggggttcattcagatccgagagaagcttgatcagttgaggaaaactgtcgctgaaaagcaggagaagagaaatcaggatcgcttgaggaggagagaggagagggaacgggaggagcgtctgagcaggaggtcgggatcaagaaccagagatcgcaggaggtcacgctcccgggatcggcgtcggaggcggtcaagatctacctcccgagagcgacggaaattgtcccggtcccggtcccgagatagacatcggcgccaccgcagccgttcccggagccacagccggggacatcgtcgggcttcccgggaccgaagtgcgaaatacaagtaactactctgactccttcggtagctgcaaccaggagtgagcccttctctgtgttcccagggtctgctgag

SEQ ID NO: 196271 - DNA, 1504 bp, Artificial Sequence
  derived and/or modified sequence
tcccccgcggcgggaaagagccgagtgggctcgaggccgacgcgaccatcgtttgtcgacgccgctgccaccgcctgcctgagagaagtcgtcgcggccgaccccgtcgcctccgccggctaccatgtccgcccaggcgcagatgcgggccctgctggaccagctcatgggcacggctcgggacggagacgaaaccagacagagggtcaagtttacagatgaccgtgtctgcaagagtcaccttctggactgctgcccccatgacatcctggctgggacgcgcatggatttaggagaatgtaccaaaatccacgacttggccctccgagcagattatgagattgcaagtaaagaaagagacctgttttttgaattagatgcaatggatcacttggagtcctttattgctgaatgtgatcggagaactgagctcgccaagaagcggctggcagaaacacaggaggaaatcagtgcggaagtttctgcaaaggcagaaaaagtacatgagttaaatgaagaaataggaaaactccttgctaaagccgaacagctaggggctgaaggtaatgtggatgaatcccagaagattcttatggaagtggaaaaagttcgtgcgaagaaaaaagaagctgaggaagaatacagaaattccatgcctgcatccagttttcagcagcaaaagctgcgtgtctgcgaggtctgttcagcctaccttggtctccatgacaatgaccgtcgcctggcagaccacttcggtggcaagttacacttggggttcattcagatccgagagaagcttgatcagttgaggaaaactgtcgctgaaaagcaggagaagagaaatcaggatcgcttgaggaggagagaggagagggaacgggaggagcgtctgagcaggaggtcgggatcaagaaccagagatcgcaggaggtcacgctcccgggatcggcgtcggaggcggtcaagatctacctcccgagagcgacggaaattgtcccggtcccggtcccgagatagacatcggcgccaccgcagccgttcccggagccacagccggggacatcgtcgggcttcccgggaccgaagtgcgaaatacaagtaactactctgactccttcggtagctgcaaccaggagttctccagagagcgggcatccagagaggagtcctgggagagcgggcggagcgagcgagggcccccggactggaggcttgagagctccaacgggaagatggcttcacggaggtcagaagagaaggaggccggcgagatctgaacccgtctcccgggtgctgtaaatagtctgataaacgttcacacagtctaaaattaccctttatatttgctgaatacaactcatcttttgtagtttaaaatttctattgttttggagctagctgtgagtttctagaagtgtacagagttgctcctgtgttcccgggtcatgttgagtaggaataaataaatctgatgctgcctcctgaggctgcggggggtttctgc

SEQ ID NO: 196272 - DNA, 498 bp, Artificial Sequence
  derived and/or modified sequence
gccagcgcttgacagtcgttaggtaggttgtactgtgtagggaggagctcaagatcatgatggttgtcacaggagaaagcggttgcatctttgcaaaactatatacctgctgtggtttgtgttttcttttctgctgagtaatgaagttgtaagttcacactggcacattctcagggctgtgcagattatttgcactttatttcataggtgaataagtgctttttagctttctttgttcagtgtatctttgcctgcctacatcaatctgcaagggagttgcagaaagcctcatgttcatcgagccgagacgaaaccagacagagggtcaagtttacagatgaccgtgtctgcaagagtcaccttctggactgctgcccccatgacatcctggctgggacgcgcatggatttaggagaatgtaccaaaatccacgacttggccctccgagcagattatgagattgcaagtaaagaaagagacctgttttttgaattagat

SEQ ID NO: 196273 - DNA, 1116 bp, Artificial Sequence
  derived and/or modified sequence
atgagcgcccaggcccagatgcgggccctgctggaccagctgatgggaacagcaagagatggggacgagacacggcagcgggtcaaatttactgacgatcgtgtttgtaaaagccatttgctggattgctgtccccacgacatactggctggcactcgaatggacttgggtgaatgcacaaagatccatgatctagcacttcgcgcggactatgagattgcatccaaggagagggatctatttttcgaacttgacgccatggaccacctggaatcctttattgcggagtgcgacaggagaacagagctggccaagaaacgtttggccgagacccaggaggagataagcgccgaagtatctgccaaggcagagaaggtacacgaactgaacgaggagattggcaaattactagctaaagctgaacagctgggagcggaaggaaatgtggatgagtcccagaaaatcctgatggaggtcgagaaggtgagagccaagaaaaaggaagcagaggaggagtacaggaactccatgcctgcatcgagtttccagcagcaaaagctgcgggtttgtgaggtctgctccgcctatctgggcctacatgataatgatcgaaggcttgccgaccactttggaggaaaactacacctgggctttatccagattagagaaaagctggaccaattgaggaaaactgtcgcagagaaacaggagaaaaggaaccaggataggctccgaaggagggaggaacgggagcgtgaggagcgactttcccggcggagcgggtcaagaacacgcgatcggaggcggtcccggtcacgcgaccgccgtcggcgaagatcgcgaagcactagccgtgagcgccggaaactatccaggtcgaggagtcgcgatcggcacagaagacacaggtccaggagtagatctcactcacggggacacagacgcgcctctcgggataggtcagctaagtacaagtttagccgggaaagggcttcaagagaggaatcgtgggagagcggcagatccgaaagaggcccacctgattggcgcctcgaaagctccaatgggaaaatggctagcaggaggtccgaagaaaaggaagccggtgagatatag

SEQ ID NO: 196274 - DNA, 978 bp, Artificial Sequence
  derived and/or modified sequence
atgagcgcccaggcccagatgcgggccctgctggaccagctgatgggcacagcaagagacggtgacgagacacgacagagggtgaagtttaccgatgaccgggtttgtaagtcccatctactggattgctgcccccacgacatactcgctggcacccgaatggacctgggcgagtgtacaaaaatccacgacttggccctcagggccgactatgagatagccagtaaggaacgagatctgttttttgagctggatgccatggatcaccttgagtctttcatagctgaatgcgaccggagaactgagctggctaaaaaacggcttgccgagactcaggaggagatcagcgcggaggtgtcggctaaggctgagaaagtgcacgagttaaacgaggagatcggcaagctcctggccaaggcagaacagctgggcgcagaagggaatgtggatgaatcccaaaaaattttgatggaggtggaaaaagttcgggccaagaagaaagaggcagaagaagagtaccgcaatagcatgccagcctcgagcttccagcagcaaaaattacgagtatgcgaagtgtgcagtgcgtacctagggctccatgataacgacaggagactggccgatcacttcggggggaagctgcacctgggtttcatccaaatacgcgagaaattggatcagctgcgcaagactgtggctgagaaacaggaaaaacgcaatcaggataggctgcgccggcgtgaagagagggagagagaggaacggctgtctcgtagaagtggatcacggacccgtgatcgccgacggtcccgcagtagggatcggaggaggcgccggtctcggtccacatcgcgcgagaggcggaaattgagtaggagtcgctccagagatcgacaccgccgtcaccgctccagatcccgcagccacagtagagggcacaggcgggcctctagggatagaagcgctaagtataagtag

SEQ ID NO: 196275 - DNA, 978 bp, Artificial Sequence
  derived and/or modified sequence
atgagcgcccaggcccagatgcgggccctgctggaccagctgatgggtacagcccgcgatggcgatgagactagacaacgcgttaagttcacagacgaccgcgtgtgcaaaagccacctgctcgattgttgtccccacgatattctggcgggcacgaggatggacctgggcgagtgtaccaagattcatgatctcgcactaagagccgactacgagatcgcctctaaagagcgcgatctcttctttgagctggacgccatggatcatctggagagctttattgcggaatgtgacaggcggacagagctggctaagaagcggctcgctgaaacccaggaagagatatcagcggaggtgtcagcaaaggccgagaaagtgcatgagttaaacgaagaaattggcaagttgctcgctaaagccgaacaactaggggcagagggcaatgtcgatgagagccagaaaatccttatggaagtagaaaaggtgagggccaagaaaaaggaagcagaggaggagtaccgaaatagcatgccggcaagtagtttccagcagcagaaactgagggtgtgcgaggtatgctctgcatacctggggctccacgacaacgaccggagactcgccgatcactttgggggaaagctgcacctgggatttatccagatcagggagaaactggatcagctgagaaaaacggttgctgagaaacaggagaagagaaaccaggacagactgagaagacgggaggagagagagagagaggagaggctgagccgtcgaagtggcagcaggaccagagaccgacgtaggtctcgtagtagggaccgccggaggcgcagaagccgctcgacctcccgggaacgcagaaaactgagtagatccaggtccagggacaggcatcggcggcataggagccgcagcagatcacacagtaggggccaccgccgcgccagtcgcgacagatccgctaagtacaagtag

SEQ ID NO: 196276 - DNA, 1116 bp, Artificial Sequence
  derived and/or modified sequence
atgagtgcgcaggctcagatgcgcgctcttctcgatcagctgatgggcactgcccgagatggcgacgaaactagacagagggtcaagtttacagatgatcgagtctgtaaatcacatctgttggattgttgtccccatgatatacttgccggtaccaggatggacttgggggagtgtaccaagatacatgatctggccttgcgtgcagactatgagatcgcctccaaagagagggacctgttctttgagttggacgcaatggatcaccttgaaagcttcatcgcagaatgcgatcggaggactgaactagctaagaaacgccttgccgaaactcaggaagaaatcagcgccgaagtgtctgcaaaggccgagaaggtgcacgaactaaacgaggagatcggtaagttattggccaaagctgaacaattaggcgctgagggcaatgtggacgagtctcagaagattttaatggaggtcgaaaaggtccgagccaaaaagaaagaggctgaagaggagtatagaaactccatgcccgcttcatcttttcaacagcagaagctgcgggtgtgcgaggtgtgcagtgcgtacctgggattacacgacaatgaccgccgactggccgatcacttcggaggaaaattacatttaggcttcatccaaatccgggagaagctggatcagctgcgtaaaacggttgctgaaaagcaggagaagcgaaatcaagatcgtctgcgcaggcgagaggagagagaacgtgaggagcggctgagccgcagaagcggtagtcgcactagggaccggagaagatcacgctcaagggataggcgcaggcgacggtcgcgatctacatcgcgagaacggagaaagttgtctcggagccgaagccgagatcgccatcgcagacatcgctcaagaagccggagtcattccagggggcaccgacgcgctagtcgagacaggagtgctaaatacaagtttagcagagagagagctagccgcgaagagtcatgggagtctggccgttcggagagagggcctcccgactggcggttggaaagtagcaatggtaagatggcctcccgccgatccgaagagaaagaggcgggagaaatatag

SEQ ID NO: 196277 - DNA, 978 bp, Artificial Sequence
  derived and/or modified sequence
atgtctgcacaggcccagatgcgcgcactgctggatcagctgatgggcaccgcccgagacggcgatgaaacgcggcagcgagtcaaatttactgacgatcgggtgtgtaaaagtcacttacttgattgctgcccccatgatatacttgctggaacacgcatggaccttggcgaatgcaccaaaatccacgacctggcgttgcgggcagactatgaaatcgcctctaaagagagggacttgttctttgaactggacgctatggatcatctcgagagcttcattgccgaatgcgaccgacgtaccgaattggctaagaagcgcctggccgaaacccaagaggaaatcagtgcagaagtgagcgccaaagctgagaaggtgcatgagctcaatgaagagatcggcaaattgctcgcaaaagctgagcagctgggggctgagggaaacgtggacgagtcccagaaaatattaatggaggttgaaaaggttcgggctaagaagaaggaggcggaggaagagtaccggaattcaatgccggcatccagcttccagcagcagaagctgagggtctgcgaggtctgctccgcctacctcggcctccatgacaatgataggcgattagcagatcatttcgggggaaagttgcatctcgggttcattcagatccgggagaaactggatcaactgcggaagaccgtggcagagaaacaggagaagagaaaccaggatagactccggcgtcgggaagagcgggagagagaggaaaggctgagccgccgaagcggatcgaggacgcgggatagaaggagaagcagaagcagagataggaggagacgtagatcgcggtctacgagcagagaaaggaggaagctctcaaggtcgcgttcacgcgatcgccataggcgccaccgttcaagaagtcggtctcatagtcggggacataggagagcatcgagggacaggtcagcaaagtacaaatag

SEQ ID NO: 196278 - DNA, 978 bp, Artificial Sequence
  derived and/or modified sequence
atgtccgctcaagcacagatgcgcgctctgttagatcaactaatgggcaccgctcgagacggagatgaaactcgacagcgcgtaaagtttacagatgaccgggtatgcaagtcccatctactggattgttgtcctcatgacatcttggccggtacccgtatggatctgggtgaatgtaccaaaatccacgacctggctttgagggcggattacgagattgcaagcaaagagagagacttgttttttgagctggatgccatggatcatcttgagagcttcatcgctgaatgtgataggcgcacggagttggccaaaaaaaggcttgcagagacccaggaagaaatctccgctgaggtgagcgcaaaggccgaaaaagtgcacgagctgaatgaagagataggaaagctgttggcaaaagcggagcagttaggggctgagggaaatgtggatgaaagtcaaaaaatcctgatggaagtggaaaaggtgagagccaaaaagaaagaagccgaggaagagtaccgcaactctatgcccgctagttccttccagcagcagaaactccgggtttgcgaagtctgttctgcttaccttgggttgcacgataatgataggcgactggcagatcacttcggcggtaaactgcatctaggatttatccagataagggagaaactggaccagctccgaaaaactgtggctgaaaagcaagagaagcggaatcaggacagactgcgcaggcgagaggaacgggagcgggaggagcggttgtcgcggaggagcgggagtagaacacgagatcgacggaggtctaggagcagagatcgccgaaggaggcgcagccggagcacctcccgtgaaagaaggaaactctctcggagccgttcaagagatagacaccggagacatagaagccggtcacgttctcactcccggggacaccgcagagcgagccgcgaccgatccgcgaaatataagtag

SEQ ID NO: 196279 - DNA, 1116 bp, Artificial Sequence
  derived and/or modified sequence
atgagcgcccaggcccagatgagagccctgctggaccagctgatgggcaccgccagagacggcgacgagaccagacagagagtgaagttcaccgacgacagagtgtgcaagagccacctgctggactgctgcccccacgacatcctggccggcaccagaatggacctgggcgagtgcaccaagatccacgacctggccctgagagccgactacgagatcgccagcaaggagagagacctgttcttcgagctggacgccatggaccacctggagagcttcatcgccgagtgcgacagaagaaccgagctggccaagaagagactggccgagacccaggaggagatcagcgccgaggtgagcgccaaggccgagaaggtgcacgagctgaacgaggagatcggcaagctgctggccaaggccgagcagctgggcgccgagggcaacgtggacgagagccagaagatcctgatggaggtggagaaggtgagagccaagaagaaggaggccgaggaggagtacagaaacagcatgcccgccagcagcttccagcagcagaagctgagagtgtgcgaggtgtgcagcgcctacctgggcctgcacgacaacgacagaagactggccgaccacttcggcggcaagctgcacctgggcttcatccagatcagagagaagctggaccagctgagaaagaccgtggccgagaagcaggagaagagaaaccaggacagactgagaagaagagaggagagagagagagaggagagactgagcagaagaagcggcagcagaaccagagacagaagaagaagcagaagcagagacagaagaagaagaagaagcagaagcaccagcagagagagaagaaagctgagcagaagcagaagcagagacagacacagaagacacagaagcagaagcagaagccacagcagaggccacagaagagccagcagagacagaagcgccaagtacaagttcagcagagagagagccagcagagaggagagctgggagagcggcagaagcgagagaggcccccccgactggagactggagagcagcaacggcaagatggccagcagaagaagcgaggagaaggaggccggcgagatctag

SEQ ID NO: 196280 - DNA, 978 bp, Artificial Sequence
  derived and/or modified sequence
atgagcgcccaggcccagatgagagccctgctggaccagctgatgggcaccgccagagacggcgacgagaccagacagagagtgaagttcaccgacgacagagtgtgcaagagccacctgctggactgctgcccccacgacatcctggccggcaccagaatggacctgggcgagtgcaccaagatccacgacctggccctgagagccgactacgagatcgccagcaaggagagagacctgttcttcgagctggacgccatggaccacctggagagcttcatcgccgagtgcgacagaagaaccgagctggccaagaagagactggccgagacccaggaggagatcagcgccgaggtgagcgccaaggccgagaaggtgcacgagctgaacgaggagatcggcaagctgctggccaaggccgagcagctgggcgccgagggcaacgtggacgagagccagaagatcctgatggaggtggagaaggtgagagccaagaagaaggaggccgaggaggagtacagaaacagcatgcccgccagcagcttccagcagcagaagctgagagtgtgcgaggtgtgcagcgcctacctgggcctgcacgacaacgacagaagactggccgaccacttcggcggcaagctgcacctgggcttcatccagatcagagagaagctggaccagctgagaaagaccgtggccgagaagcaggagaagagaaaccaggacagactgagaagaagagaggagagagagagagaggagagactgagcagaagaagcggcagcagaaccagagacagaagaagaagcagaagcagagacagaagaagaagaagaagcagaagcaccagcagagagagaagaaagctgagcagaagcagaagcagagacagacacagaagacacagaagcagaagcagaagccacagcagaggccacagaagagccagcagagacagaagcgccaagtacaagtag

SEQ ID NO: 196281 - protein, 654 aa, Artificial Sequence
  derived and/or modified sequence
MERSGPSEVTGSDASGPDPQLAVTMGFTGFGKKARTFDLEAMFEQTRRTAVERSRKTLEAREKEEEMNREKELRRQNEDIEPTSSRSNVVRDCSKSSSRDTSSSESEQSSDSSDDELIGPPLPPKMVGKPVNFMEEDILGPLPPPLNEEEEEAEEEEEEEEEEENPVHKIPDSHEITLKHGTKTVSALGLDPSGARLVTGGYDYDVKFWDFAGMDASFKAFRSLQPCECHQIKSLQYSNTGDMILVVSGSSQAKVIDRDGFEVMECIKGDQYIVDMANTKGHTAMLHTGSWHPKIKGEFMTCSNDATVRTWEVENPKKQKSVFKPRTMQGKKVIPTTCTYSRDGNLIAAACQNGSIQIWDRNLTVHPKFHYKQAHDSGTDTSCVTFSYDGNVLASRGGDDSLKLWDIRQFNKPLFSASGLPTMFPMTDCCFSPDDKLIVTGTSIQRGCGSGKLVFFERRTFQRVYEIDITDASVVRCLWHPKLNQIMVGTGNGLAKVYYDPNKSQRGAKLCVVKTQRKAKQAETLTQDYIITPHALPMFREPRQRSTRKQLEKDRLDPLKSHKPEPPVAGPGRGGRVGTHGGTLSSYIVKNIALDKTDDSNPREAILRHAKAAEDSPYWVSPAYSKTQPKTMFAQVESDDEEAKNEPEWKKRKI

SEQ ID NO: 196282 - DNA, 1965 bp, Artificial Sequence
  derived and/or modified sequence
atggagagaagcggccccagcgaggtgaccggcagcgacgccagcggccccgacccccagctggccgtgaccatgggcttcaccggcttcggcaagaaggccagaaccttcgacctggaggccatgttcgagcagaccagaagaaccgccgtggagagaagcagaaagaccctggaggccagagagaaggaggaggagatgaacagagagaaggagctgagaagacagaacgaggacatcgagcccaccagcagcagaagcaacgtggtgagagactgcagcaagagcagcagcagagacaccagcagcagcgagagcgagcagagcagcgacagcagcgacgacgagctgatcggcccccccctgccccccaagatggtgggcaagcccgtgaacttcatggaggaggacatcctgggccccctgcccccccccctgaacgaggaggaggaggaggccgaggaggaggaggaggaggaggaggaggaggagaaccccgtgcacaagatccccgacagccacgagatcaccctgaagcacggcaccaagaccgtgagcgccctgggcctggaccccagcggcgccagactggtgaccggcggctacgactacgacgtgaagttctgggacttcgccggcatggacgccagcttcaaggccttcagaagcctgcagccctgcgagtgccaccagatcaagagcctgcagtacagcaacaccggcgacatgatcctggtggtgagcggcagcagccaggccaaggtgatcgacagagacggcttcgaggtgatggagtgcatcaagggcgaccagtacatcgtggacatggccaacaccaagggccacaccgccatgctgcacaccggcagctggcaccccaagatcaagggcgagttcatgacctgcagcaacgacgccaccgtgagaacctgggaggtggagaaccccaagaagcagaagagcgtgttcaagcccagaaccatgcagggcaagaaggtgatccccaccacctgcacctacagcagagacggcaacctgatcgccgccgcctgccagaacggcagcatccagatctgggacagaaacctgaccgtgcaccccaagttccactacaagcaggcccacgacagcggcaccgacaccagctgcgtgaccttcagctacgacggcaacgtgctggccagcagaggcggcgacgacagcctgaagctgtgggacatcagacagttcaacaagcccctgttcagcgccagcggcctgcccaccatgttccccatgaccgactgctgcttcagccccgacgacaagctgatcgtgaccggcaccagcatccagagaggctgcggcagcggcaagctggtgttcttcgagagaagaaccttccagagagtgtacgagatcgacatcaccgacgccagcgtggtgagatgcctgtggcaccccaagctgaaccagatcatggtgggcaccggcaacggcctggccaaggtgtactacgaccccaacaagagccagagaggcgccaagctgtgcgtggtgaagacccagagaaaggccaagcaggccgagaccctgacccaggactacatcatcaccccccacgccctgcccatgttcagagagcccagacagagaagcaccagaaagcagctggagaaggacagactggaccccctgaagagccacaagcccgagccccccgtggccggccccggcagaggcggcagagtgggcacccacggcggcaccctgagcagctacatcgtgaagaacatcgccctggacaagaccgacgacagcaaccccagagaggccatcctgagacacgccaaggccgccgaggacagcccctactgggtgagccccgcctacagcaagacccagcccaagaccatgttcgcccaggtggagagcgacgacgaggaggccaagaacgagcccgagtggaagaagagaaagatctag

SEQ ID NO: 196283 - DNA, 1965 bp, Artificial Sequence
  derived and/or modified sequence
atggagaggagcggcccatccgaggtaaccggtagcgacgcatcggggcctgacccccagctagccgttacaatgggctttacgggctttggtaagaaggcccgcaccttcgatctcgaggcgatgttcgagcaaaccaggcgaacagctgttgagaggagcaggaaaacattggaggcaagggagaaggaagaggagatgaaccgtgagaaggagctccgccggcagaacgaggacattgagcccacatcctcacgctcgaatgtcgtccgcgactgcagcaaaagtagttctagagatacctcgtcctctgagtccgagcagtcaagcgacagttccgacgacgaactgattgggccaccacttccacctaaaatggtcggaaagcccgttaactttatggaagaggatattctgggcccgctccctccgccactgaatgaggaagaggaagaggcggaggaggaggaggaagaagaggaggaagaggagaatcctgttcataaaatccccgattcccatgagattacgcttaagcacggaaccaagacagtgtccgctctcggacttgacccttctggcgcccgtctggtgactggaggctatgactacgatgtaaagttctgggatttcgctggaatggacgcctcattcaaagcattcagaagcctgcagccctgcgaatgtcaccaaatcaagtccctgcagtacagtaatacaggagacatgatcctcgtggtctctggatcgtcacaggcaaaggtaatagaccgtgacggattcgaggtgatggagtgcatcaaaggggaccagtacatcgtggatatggctaataccaaaggccatacagctatgctccacaccggctcctggcatcccaagattaagggagagtttatgacttgtagcaacgacgctacagtccggacttgggaggtggagaaccctaagaaacagaaatccgtcttcaagcctcggactatgcaggggaaaaaggtgataccaactacctgcacctattctagggacggcaacctcatagccgctgcgtgtcagaacggttcaattcagatctgggaccgaaacctgactgtacacccaaagtttcactataagcaagcacacgactctggaactgacacttcttgcgtgactttctcctatgatggcaacgttctggcttcccgtgggggagacgactccctgaagctgtgggacattcgccagtttaacaaaccactcttctccgcttcaggcctgccgacaatgtttccaatgactgattgctgtttcagccccgacgacaaattaattgtcacgggcacctcaattcagagagggtgtggaagtgggaaattagtgttcttcgagagaaggacatttcaacgggtgtacgagatcgatattactgacgcttccgtggttcgttgcctttggcaccccaagttaaaccagattatggtgggtacaggaaatggccttgccaaggtctattacgatcctaataagtcacagcgaggagcgaagttgtgcgtggtaaagacacaaagaaaggcaaagcaggccgagacactgacccaagattacattataaccccccacgccttaccgatgttcagagagcctcgccagcgttcaacaaggaaacagctggagaaggaccgcctagatcctctgaagtctcacaagccagagcctccagtggccggccccggaaggggaggacgcgtgggtacacacggcgggactctttcctcctacatcgtgaaaaatattgcattagataaaacagacgacagtaatccaagagaggctatcctccgccatgccaaggccgcagaggattcaccatactgggtgagcccagcttacagtaagacacagcccaagaccatgtttgcccaggtcgagagcgatgatgaggaagctaaaaatgagcccgaatggaaaaaaaggaaaatctag

SEQ ID NO: 196284 - DNA, 1965 bp, Artificial Sequence
  derived and/or modified sequence
atggagaggagcggccccagcgaggtgacaggcagtgatgccagcggccctgacccccagctggccgtgaccatgggcttcaccggctttgggaagaaggcccggacctttgacctggaggccatgtttgagcagaccaggagaacagctgtggagaggagcaggaagaccctggaggcccgggagaaggaggaggagatgaaccgggagaaggagctgcggcggcagaatgaagacatcgagcccaccagcagccgcagcaatgtggtgcgggactgcagcaagagcagcagccgggacaccagcagcagcgagagcgagcagagcagtgacagcagtgatgatgagctgattggcccccccctgccccccaagatggtgggcaagcctgtgaacttcatggaggaggacatcctgggccccctgcccccacccctgaatgaggaggaggaggaggccgaggaggaggaggaggaggaggaggaggaggagaaccctgtgcacaagatcccagacagccatgagatcaccctgaagcacggcaccaagacagtgtctgccctgggcctggaccccagcggggcccggctggtgactggaggctatgactatgatgtgaagttctgggactttgctggcatggatgccagcttcaaggccttccgcagcctgcagccctgtgagtgccaccagatcaagagcctgcagtacagcaacacaggagacatgatcctggtggtgtctggcagcagccaggccaaggtgattgacagagatggctttgaggtgatggagtgcatcaagggggaccagtacatcgtggacatggccaacaccaagggccacacagccatgctgcacacaggctcctggcaccccaagatcaagggggagttcatgacctgcagcaatgatgccaccgtgaggacctgggaggtggagaaccccaagaagcagaagtctgtgttcaagcccaggaccatgcagggcaagaaggtgatccccaccacctgcacctacagcagagatggcaacctgattgctgctgcctgccagaatggcagcatccagatctgggacaggaacctgactgtgcaccccaagttccactacaagcaggcccatgattctggaacagacaccagctgtgtgaccttctcctatgatggaaatgtgctggccagcagaggaggagatgacagcctgaagctgtgggacatccggcagttcaacaagcccctcttcagcgccagcggcctgcccaccatgttccccatgacagactgctgcttctccccagatgacaagctgattgtgacaggcaccagcatccagaggggctgcggcagcggcaagctggtgttctttgagaggaggaccttccagagggtgtatgaaattgacatcacagatgcctctgtggtgcgctgcctgtggcaccccaagctgaaccagatcatggtgggcactggaaatggcctggccaaggtgtactatgaccccaacaagagccagagaggagccaagctgtgtgtggtgaagacccagaggaaggccaagcaggccgagaccctgacccaggactacatcatcaccccccacgccctgcccatgttccgggagccccggcagaggagcaccaggaagcagctggagaaggaccggctggaccccctgaagagccacaagccagagccccctgtggccggccctggccggggcggccgggtgggcacccacggcggcaccctgagcagctacatcgtgaagaacatcgccctggacaagacagatgacagcaacccccgggaggccatcctgcggcatgccaaggctgctgaggacagcccctactgggtgtccccagcctacagcaagacccagcccaagaccatgtttgcccaggtggagagtgatgatgaggaggccaagaatgaacctgagtggaagaagaggaagatctag

SEQ ID NO: 196285 - DNA, 1965 bp, Artificial Sequence
  derived and/or modified sequence
atggagcggagcggccccagcgaggtgaccggcagcgacgccagcgggcctgaccctcagctggccgttacgatgggcttcacagggttcggaaagaaggcccgtacatttgacctggaagcgatgttcgaacaaacacgacgcaccgccgtggagagaagcagaaaaaccttggaagcccgagagaaagaggaggagatgaacagagaaaaggaactgcggcgccaaaacgaggacattgagccaacctcgtcgcggagtaacgtcgttagagactgcagtaagtccagcagtcgtgacactagctcctcggaatcggagcagtccagcgattccagcgatgatgagttaatcgggccaccgttgcctccaaagatggtggggaaacctgtaaacttcatggaagaagacatccttggacccctcccgcccccactaaacgaagaagaggaagaagcggaagaagaggaagaggaagaggaggaggaggagaacccagtccataagatccccgatagccacgaaataacgttaaaacatggaacgaaaacagtgtctgcccttggattggatccgagtggagcaagactggtaaccggcgggtacgattatgatgtgaaattctgggattttgccgggatggacgcgtcgttcaaagcatttcgatccctacagccatgcgagtgccaccagattaaatctttgcagtacagcaataccggcgacatgatactggtggtgtctggaagttctcaggcaaaggtaattgatcgtgatggctttgaggttatggagtgcatcaagggcgaccagtacatcgtggatatggcaaacaccaagggacacactgccatgctgcataccgggagttggcatccaaagatcaagggagaattcatgacctgcagtaatgatgcaacagtgcgcacatgggaggtggagaaccccaaaaaacagaagtctgtctttaaaccacggacaatgcaggggaaaaaggtgatcccaaccacgtgcacatattcgcgcgatggtaacctcatcgcagcagcttgccagaatggctccattcaaatatgggatcgaaatttaactgttcatcccaaatttcactacaagcaggcgcatgattcaggcactgatacatcctgtgttactttctcctatgacggaaatgtcctcgcatctcgcggtggggacgactctttaaagttatgggacatcaggcagtttaataagccgttattttcagcttccgggctgccaaccatgttcccaatgaccgactgctgcttctcaccagacgacaagctcattgtcaccggaacttcaattcaaagagggtgtggttcaggtaaactggtcttttttgaacgccgcacttttcagagagtatatgaaattgacataaccgatgcgtccgtggtccggtgcctctggcacccaaagcttaatcagataatggtgggaacgggtaacggtttggcgaaggtttactacgatcctaacaagagtcagagaggggctaagctgtgcgtcgtcaaaacacagcgaaaagccaaacaggccgagaccttaacacaggattacattatcactccacacgccttgcccatgttccgcgaaccgcgtcagcgcagtacccgtaaacagcttgaaaaggacagacttgatcctttgaaaagccataagcctgagcctcctgttgccggaccaggtcggggggggagggtcggtacacacggaggaaccctgagcagttacatagttaagaacatcgccctggacaagaccgacgactccaacccgcgcgaagccatcctcaggcatgcaaaagctgctgaggactccccttactgggtatccccggcatatagtaagactcagcccaagactatgttcgcccaggtagagtcagatgatgaagaggctaagaatgaacctgagtggaagaaacgtaaaatttag

SEQ ID NO: 196286 - DNA, 1965 bp, Artificial Sequence
  derived and/or modified sequence
atggagcgatccggtccctcagaagtcaccggatctgatgcttccggccctgacccacagttggccgttactatgggcttcacagggtttggtaagaaagcaagaaccttcgacctagaggcaatgtttgaacagacgcggcgtactgctgtggaaagaagtcgaaagaccctagaagccagggagaaggaagaagaaatgaatcgggagaaagaattgcgcaggcagaatgaggacatagagcccactagctcaagatcaaacgttgtgagagattgttccaaaagttctagcagggacacctccagctcagagagcgaacaatcttccgactcctctgatgatgagttaataggcccaccccttccgcctaagatggttgggaagccggtcaacttcatggaggaggatatccttggcccactgccccctccacttaacgaagaggaagaggaagccgaggaggaggaagaagaagaggaggaggaggaaaatcctgtccacaagatccccgactcgcatgagatcaccctgaaacatggtaccaaaactgtttccgcgctaggcctggatccaagtggggctcgtctcgtgactggcggatatgactacgatgttaaattttgggattttgccggtatggacgcctcttttaaggcgtttcgctcactccaaccgtgcgaatgccaccagatcaaaagcctgcagtactctaacaccggagacatgatcctagtcgtcagcgggtccagccaggccaaagtgattgaccgcgatggcttcgaagttatggagtgcattaagggggaccagtacatagttgacatggccaacactaagggacataccgcgatgctgcatactggcagctggcaccctaaaatcaagggcgagtttatgacgtgttctaatgacgccacggtaaggacctgggaggtggaaaaccccaaaaaacaaaagagcgtgttcaagcctagaacaatgcagggtaaaaaggtgatccctaccacctgtacatactctcgggatggcaacctgatcgccgcagcttgccagaatggctccattcagatttgggaccgaaacctgacagtgcatcctaagtttcactacaaacaggcccacgatagtggaaccgatactagctgtgtgacattttcctacgatgggaacgttctcgccagcagaggaggagacgattctctaaagttatgggacattagacagttcaataagcccctattctctgcgagtggtctgccaacaatgttccccatgactgactgttgcttctcgcctgacgacaagctcattgtgactggcacgagtattcaaaggggctgcggttcaggaaagctcgttttcttcgaacgccgtacctttcagcgagtatacgagattgatatcacagacgcaagcgttgttaggtgtctgtggcatcccaaactcaatcagatcatggtgggaactgggaacggccttgccaaagtctactacgacccgaacaaatcccaaaggggcgcaaagttatgcgtggtcaagacccaaaggaaggctaagcaggcagagactctgactcaagactacattattacccctcacgccctcccaatgtttcgagagccgagacagcgatctactcggaagcagctggaaaaagaccgcctcgacccattgaaaagccataaaccagagccgcctgtggcagggcctgggaggggcggacgtgtcggtactcacggaggaaccctgtcaagctacatcgtgaaaaacattgctctagataagaccgacgattccaaccccagggaagcaattttgcggcacgcaaaagctgctgaggattcaccatactgggttagcccggcatatagtaagacccagcctaagaccatgttcgcacaggtcgaatccgacgatgaggaggcaaaaaatgagccagagtggaagaaacggaaaatatag

SEQ ID NO: 196287 - DNA, 2983 bp, Artificial Sequence
  derived and/or modified sequence
cgcggtccctctgcggaaggcgccgctcttggcttcggcggcgccgctgtagcttgaaggcggtacttcctccagcatttgccgcaagttattggcaagttcccctgcagttgtttgggctgtccctgtggctggttctggggtgtgcggccagccatggagcgctctgggcccagcgaagtgacaggctcagacgcgtcgggaccggacccgcagcttgcggtcaccatgggcttcacggggttcggtaaaaaagctcgcacatttgacttggaagcaatgtttgaacaaactcgaaggacagctgtggaaagaagtcgcaaaacactggaagcaagagaaaaagaggaagaaatgaacagagagaaagaattaagaagacaaaatgaagatattgagccaacatcctcaagatcaaatgtggtcagagattgctccaaatcatcttccagggatacgagcagcagtgaaagtgaacagagttctgactcttctgatgatgagttaattggccctcctttaccccctaaaatggtaggaaaaccagttaattttatggaggaagatatcctcggtcctttacctccacctcttaatgaagaagaagaagaagcagaggaagaagaagaggaagaggaggaagaggaaaatcctgttcacaagattcctgactcgcatgagataacgctgaagcatggcactaaaacagtgtctgctttgggtctggatccctcaggtgcccgtttggtgacaggaggatatgactatgatgttaagttttgggattttgctggaatggatgcttcttttaaggcatttcgatcccttcagccctgtgagtgccatcagatcaagtcattacagtatagtaacacaggagacatgattcttgttgtatctggaagctctcaggccaaggtgattgacagagatggttttgaagtaatggaatgtataaaaggagaccagtatattgtggacatggccaacaccaagggtcatacagcaatgcttcatactggctcatggcatcccaaaataaagggagaatttatgacttgctcaaatgatgcgactgtgaggacgtgggaagttgaaaatccaaagaagcaaaaaagtgtgtttaaaccacggacgatgcaaggcaaaaaagtcattcccactacgtgcacatatagtagagatggaaacctcatagcagctgcctgccagaatggaagcatacagatctgggaccgaaatttgactgttcatcctaagttccactataaacaggctcatgactcgggcacagacacttcttgcgtgactttttcctatgatggtaatgtccttgcctctcgtggaggtgacgattcattaaaattatgggacatccgacaatttaataaaccacttttttcagcctcgggtcttcccaccatgttcccaatgactgactgctgtttcagtccagatgataagctcatagtcactggtacatctattcaaagaggatgtggcagcggcaaacttgttttctttgagcgtaggactttccaaagggtgtatgaaatagacatcacagatgcgagtgttgttcgctgcctgtggcatccaaagctgaaccagatcatggttggaactggaaatggattggctaaagtctattacgaccccaacaagagtcagaggggagcaaaattatgtgtggttaaaacccagcggaaggcaaaacaagctgagactctaactcaggactacatcatcacccctcatgccttgcctatgttccgtgagccccgccaacggagtacaaggaaacagctggagaaggacagactggatcccctgaagtcgcataaacctgaacctcctgtagcaggcccaggtcgtggtggccgagttggaacccacgggggcactctctcttcctatattgtgaagaacattgctttggacaagaccgatgacagtaatcctcgggaagccattttgcgtcatgccaaagcagcagaagacagcccatattgggtttctccagcatattccaagactcagcccaaaaccatgtttgcccaagttgaatctgatgatgaggaagcaaagaatgagccagaatggaaaaaacgtaaaatttgaagaatctcatttgagagctgtttgcatgagtgggaggggtatgggacaggtttgggttttttttttatgctcatgaaattaaaaattcatttttatgaacaggttttgtcctttgcattattgaactggtcaaaagtttggtggctaggcttcactaaaattgtgcttaaattttcttacctgcaactattaaactgattacagataaacaagaaacagattcttagtctattaccaagtactttaggtatttggaaactttattcaacaattattggtcttgtccagattctcataaccttagagaggaaaatgtacattaagatgtgcatctgtctctagcaattctaggaacataatatagaaatagagatcaaaaagtttaatgtttctgtataatttcacaacagttgtttacatgactgtaattaattaggctgagttcaaaccaaatacattgccatactgggaaagagcattatctcattatccttcaatagcagaatacagtggttaagagttaggagtgggctttgaagtcagactcatgtggattcaagtcctggctttgctctttacttctgggtcatcttaagagagttatttaacttttcttttctagcctcagatgatgaaatagtacgtactttgcaggttcgtcagaagaattaaatgggacatgcctcacagagcatttagtacagtacctggaacacagtaaatgtataccaaatatttgctattttaaaatagggctaatatttactttgcttggtttttatcagtattaaattagaaaggtatagaattgctttgtaaatgtaaagactaaacagaagacattaaaaattattctaaaaaa

SEQ ID NO: 196288 - protein, 2078 aa, Artificial Sequence
  derived and/or modified sequence
MPWPFSESIKKRACRYLLQRYLGHFLQEKLSLEQLSLDLYQGTGSLAQVPLDKWCLNEILESADAPLEVTEGFIQSISLSVPWGSLLQDNCALEVRGLEMVFRPRPRPATGSEPMYWSSFMTSSMQLAKECLSQKLTDEQGEGSQPFEGLEKFAETIETVLRRVKVTFIDTVLRIEHVPENSKTGTALEIRIERTVYCDETADESSGINVHQPTAFAHKLLQLSGVSLFWDEFSASAKSSPVCSTAPVETEPKLSPSWNPKIIYEPHPQLTRNLPEIAPSDPVQIGRLIGRLELSLTLKQNEVLPGAKLDVDGQIDSIHLLLSPRQVHLLLDMLAAIAGPENSSKIGLANKDRKNRPMQQEDEYRIQMELNRYYLRKDSLSVGVSSEQSFYETETARTPSSREEEVFFSMADMDMSHSLSSLPPLGDPPNMDLELSLTSTYTNTPAGSPLSATVLQPTWGEFLDHHKEQPVRGSTFPSNLVHPTPLQKTSLPSRSVSVDESRPELIFRLAVGTFSISVLHIDPLSPPETSQNLNPLTPMAVAFFTCIEKIDPARFSTEDFKSFRAVFAEACSHDHLRFIGTGIKVSYEQRQRSASRYFSTDMSIGQMEFLECLFPTDFHSVPPHYTELLTFHSKEETGSHSPVCLQLHYKHSENRGPQGNQARLSSVPHKAELQIKLNPVCCELDISIVDRLNSLLQPQKLATVEMMASHMYTSYNKHISLHKAFTEVFLDDSHSPANCRISVQVATPALNLSVRFPIPDLRSDQERGPWFKKSLQKEILYLAFTDLEFKTEFIGGSTPEQIKLELTFRELIGSFQEEKGDPSIKFFHVSSGVDGDTTSSDDFDWPRIVLKINPPAMHSILERIAAEEEEENDGHYQEEEEGGAHSLKDVCDLRRPAPSPFSSRRVMFENEQMVMPGDPVEMTEFQDKAISNSHYVLELTLPNIYVTLPNKSFYEKLYNRIFNDLLLWEPTAPSPVETFENISYGIGLSVASQLINTFNKDSFSAFKSAVHYDEESGSEEETLQYFSTVDPNYRSRRKKKLDSQNKNSQSFLSVLLNINHGLIAVFTDVKQDNGDLLENKHGEFWLEFNSGSLFCVTKYEGFDDKHYICLHSSSFSLYHKGIVNGVILPTETRLPSSTRPHWLEPTIYSSEEDGLSKTSSDGVGGDSLNMLSVAVKILSDKSESNTKEFLIAVGLKGATLQHRMLPSGLSWHEQILYFLNIADEPVLGYNPPTSFTTFHVHLWSCALDYRPLYLPIRSLLTVETFSVSSSVALDKSSSTLRIILDEAALHLSDKCNTVTINLSRDYVRVMDMGLLELTITAVKSDSDGEQTEPRFELHCSSDVVHIRTCSDSCAALMNLIQYIASYGDLQTPNKADMKPGAFQRRSKVDSSGRSSSRGPVLPEADQQMLRDLMSDAMEEIDMQQGTSSVKPQANGVLDEKSQIQEPCCSDLFLFPDESGNVSQESGPTYASFSHHFISDAMTGVPTENDDFCILFAPKAAMQEKEEEPVIKIMVDDAIVIRDNYFSLPVNKTDTSKAPLHFPIPVIRYVVKEVSLVWHLYGGKDFGIVPPTSPAKSYISPHSSPSHTPTRHGRNTVCGGKGRNHDFLMEIQLSKVKFQHEVYPPCKPDCDSSLSEHPVSRQVFIVQDLEIRDRLATSQMNKFLYLYCSKEMPRKAHSNMLTVKALHVCPESGRSPQECCLRVSLMPLRLNIDQDALFFLKDFFTSLSAEVELQMTPDPEVKKSPGADVTCSLPRHLSTSKEPNLVISFSGPKQPSQNDSANSVEVVNGMEEKNFSAEEASFRDQPVFFREFRFTSEVPIRLDYHGKHVSMDQGTLAGILIGLAQLNCSELKLKRLSYRHGLLGVDKLFSYAITEWLNDIKKNQLPGILGGVGPMHSLVQLVQGLKDLVWLPIEQYRKDGRIVRGFQRGAASFGTSTAMAALELTNRMVQTIQAAAETAYDMVSPGTLSIEPKKTKRFPHHRLAHQPVDLREGVAKAYSVVKEGITDTAQTIYETAAREHESRGVTGAVGEVLRQIPPAVVKPLIVATEATSNVLGGMRNQIRPDVRQDESQKWRHGDD

SEQ ID NO: 196289 - DNA, 6237 bp, Artificial Sequence
  derived and/or modified sequence
atgccctggcccttcagcgagagcatcaagaagagagcctgcagatacctgctgcagagatacctgggccacttcctgcaggagaagctgagcctggagcagctgagcctggacctgtaccagggcaccggcagcctggcccaggtgcccctggacaagtggtgcctgaacgagatcctggagagcgccgacgcccccctggaggtgaccgagggcttcatccagagcatcagcctgagcgtgccctggggcagcctgctgcaggacaactgcgccctggaggtgagaggcctggagatggtgttcagacccagacccagacccgccaccggcagcgagcccatgtactggagcagcttcatgaccagcagcatgcagctggccaaggagtgcctgagccagaagctgaccgacgagcagggcgagggcagccagcccttcgagggcctggagaagttcgccgagaccatcgagaccgtgctgagaagagtgaaggtgaccttcatcgacaccgtgctgagaatcgagcacgtgcccgagaacagcaagaccggcaccgccctggagatcagaatcgagagaaccgtgtactgcgacgagaccgccgacgagagcagcggcatcaacgtgcaccagcccaccgccttcgcccacaagctgctgcagctgagcggcgtgagcctgttctgggacgagttcagcgccagcgccaagagcagccccgtgtgcagcaccgcccccgtggagaccgagcccaagctgagccccagctggaaccccaagatcatctacgagccccacccccagctgaccagaaacctgcccgagatcgcccccagcgaccccgtgcagatcggcagactgatcggcagactggagctgagcctgaccctgaagcagaacgaggtgctgcccggcgccaagctggacgtggacggccagatcgacagcatccacctgctgctgagccccagacaggtgcacctgctgctggacatgctggccgccatcgccggccccgagaacagcagcaagatcggcctggccaacaaggacagaaagaacagacccatgcagcaggaggacgagtacagaatccagatggagctgaacagatactacctgagaaaggacagcctgagcgtgggcgtgagcagcgagcagagcttctacgagaccgagaccgccagaacccccagcagcagagaggaggaggtgttcttcagcatggccgacatggacatgagccacagcctgagcagcctgccccccctgggcgacccccccaacatggacctggagctgagcctgaccagcacctacaccaacacccccgccggcagccccctgagcgccaccgtgctgcagcccacctggggcgagttcctggaccaccacaaggagcagcccgtgagaggcagcaccttccccagcaacctggtgcaccccacccccctgcagaagaccagcctgcccagcagaagcgtgagcgtggacgagagcagacccgagctgatcttcagactggccgtgggcaccttcagcatcagcgtgctgcacatcgaccccctgagcccccccgagaccagccagaacctgaaccccctgacccccatggccgtggccttcttcacctgcatcgagaagatcgaccccgccagattcagcaccgaggacttcaagagcttcagagccgtgttcgccgaggcctgcagccacgaccacctgagattcatcggcaccggcatcaaggtgagctacgagcagagacagagaagcgccagcagatacttcagcaccgacatgagcatcggccagatggagttcctggagtgcctgttccccaccgacttccacagcgtgcccccccactacaccgagctgctgaccttccacagcaaggaggagaccggcagccacagccccgtgtgcctgcagctgcactacaagcacagcgagaacagaggcccccagggcaaccaggccagactgagcagcgtgccccacaaggccgagctgcagatcaagctgaaccccgtgtgctgcgagctggacatcagcatcgtggacagactgaacagcctgctgcagccccagaagctggccaccgtggagatgatggccagccacatgtacaccagctacaacaagcacatcagcctgcacaaggccttcaccgaggtgttcctggacgacagccacagccccgccaactgcagaatcagcgtgcaggtggccacccccgccctgaacctgagcgtgagattccccatccccgacctgagaagcgaccaggagagaggcccctggttcaagaagagcctgcagaaggagatcctgtacctggccttcaccgacctggagttcaagaccgagttcatcggcggcagcacccccgagcagatcaagctggagctgaccttcagagagctgatcggcagcttccaggaggagaagggcgaccccagcatcaagttcttccacgtgagcagcggcgtggacggcgacaccaccagcagcgacgacttcgactggcccagaatcgtgctgaagatcaacccccccgccatgcacagcatcctggagagaatcgccgccgaggaggaggaggagaacgacggccactaccaggaggaggaggagggcggcgcccacagcctgaaggacgtgtgcgacctgagaagacccgcccccagccccttcagcagcagaagagtgatgttcgagaacgagcagatggtgatgcccggcgaccccgtggagatgaccgagttccaggacaaggccatcagcaacagccactacgtgctggagctgaccctgcccaacatctacgtgaccctgcccaacaagagcttctacgagaagctgtacaacagaatcttcaacgacctgctgctgtgggagcccaccgcccccagccccgtggagaccttcgagaacatcagctacggcatcggcctgagcgtggccagccagctgatcaacaccttcaacaaggacagcttcagcgccttcaagagcgccgtgcactacgacgaggagagcggcagcgaggaggagaccctgcagtacttcagcaccgtggaccccaactacagaagcagaagaaagaagaagctggacagccagaacaagaacagccagagcttcctgagcgtgctgctgaacatcaaccacggcctgatcgccgtgttcaccgacgtgaagcaggacaacggcgacctgctggagaacaagcacggcgagttctggctggagttcaacagcggcagcctgttctgcgtgaccaagtacgagggcttcgacgacaagcactacatctgcctgcacagcagcagcttcagcctgtaccacaagggcatcgtgaacggcgtgatcctgcccaccgagaccagactgcccagcagcaccagaccccactggctggagcccaccatctacagcagcgaggaggacggcctgagcaagaccagcagcgacggcgtgggcggcgacagcctgaacatgctgagcgtggccgtgaagatcctgagcgacaagagcgagagcaacaccaaggagttcctgatcgccgtgggcctgaagggcgccaccctgcagcacagaatgctgcccagcggcctgagctggcacgagcagatcctgtacttcctgaacatcgccgacgagcccgtgctgggctacaacccccccaccagcttcaccaccttccacgtgcacctgtggagctgcgccctggactacagacccctgtacctgcccatcagaagcctgctgaccgtggagaccttcagcgtgagcagcagcgtggccctggacaagagcagcagcaccctgagaatcatcctggacgaggccgccctgcacctgagcgacaagtgcaacaccgtgaccatcaacctgagcagagactacgtgagagtgatggacatgggcctgctggagctgaccatcaccgccgtgaagagcgacagcgacggcgagcagaccgagcccagattcgagctgcactgcagcagcgacgtggtgcacatcagaacctgcagcgacagctgcgccgccctgatgaacctgatccagtacatcgccagctacggcgacctgcagacccccaacaaggccgacatgaagcccggcgccttccagagaagaagcaaggtggacagcagcggcagaagcagcagcagaggccccgtgctgcccgaggccgaccagcagatgctgagagacctgatgagcgacgccatggaggagatcgacatgcagcagggcaccagcagcgtgaagccccaggccaacggcgtgctggacgagaagagccagatccaggagccctgctgcagcgacctgttcctgttccccgacgagagcggcaacgtgagccaggagagcggccccacctacgccagcttcagccaccacttcatcagcgacgccatgaccggcgtgcccaccgagaacgacgacttctgcatcctgttcgcccccaaggccgccatgcaggagaaggaggaggagcccgtgatcaagatcatggtggacgacgccatcgtgatcagagacaactacttcagcctgcccgtgaacaagaccgacaccagcaaggcccccctgcacttccccatccccgtgatcagatacgtggtgaaggaggtgagcctggtgtggcacctgtacggcggcaaggacttcggcatcgtgccccccaccagccccgccaagagctacatcagcccccacagcagccccagccacacccccaccagacacggcagaaacaccgtgtgcggcggcaagggcagaaaccacgacttcctgatggagatccagctgagcaaggtgaagttccagcacgaggtgtaccccccctgcaagcccgactgcgacagcagcctgagcgagcaccccgtgagcagacaggtgttcatcgtgcaggacctggagatcagagacagactggccaccagccagatgaacaagttcctgtacctgtactgcagcaaggagatgcccagaaaggcccacagcaacatgctgaccgtgaaggccctgcacgtgtgccccgagagcggcagaagcccccaggagtgctgcctgagagtgagcctgatgcccctgagactgaacatcgaccaggacgccctgttcttcctgaaggacttcttcaccagcctgagcgccgaggtggagctgcagatgacccccgaccccgaggtgaagaagagccccggcgccgacgtgacctgcagcctgcccagacacctgagcaccagcaaggagcccaacctggtgatcagcttcagcggccccaagcagcccagccagaacgacagcgccaacagcgtggaggtggtgaacggcatggaggagaagaacttcagcgccgaggaggccagcttcagagaccagcccgtgttcttcagagagttcagattcaccagcgaggtgcccatcagactggactaccacggcaagcacgtgagcatggaccagggcaccctggccggcatcctgatcggcctggcccagctgaactgcagcgagctgaagctgaagagactgagctacagacacggcctgctgggcgtggacaagctgttcagctacgccatcaccgagtggctgaacgacatcaagaagaaccagctgcccggcatcctgggcggcgtgggccccatgcacagcctggtgcagctggtgcagggcctgaaggacctggtgtggctgcccatcgagcagtacagaaaggacggcagaatcgtgagaggcttccagagaggcgccgccagcttcggcaccagcaccgccatggccgccctggagctgaccaacagaatggtgcagaccatccaggccgccgccgagaccgcctacgacatggtgagccccggcaccctgagcatcgagcccaagaagaccaagagattcccccaccacagactggcccaccagcccgtggacctgagagagggcgtggccaaggcctacagcgtggtgaaggagggcatcaccgacaccgcccagaccatctacgagaccgccgccagagagcacgagagcagaggcgtgaccggcgccgtgggcgaggtgctgagacagatcccccccgccgtggtgaagcccctgatcgtggccaccgaggccaccagcaacgtgctgggcggcatgagaaaccagatcagacccgacgtgagacaggacgagagccagaagtggagacacggcgacgactag

SEQ ID NO: 196290 - DNA, 6237 bp, Artificial Sequence
  derived and/or modified sequence
atgccatggcccttttcggagagtataaagaaaagagcctgccgatatctgctccagagatacttagggcatttcctgcaagaaaaactgtcgctggaacagcttagcctggacttgtatcagggaacgggcagcctcgctcaggtacctctggacaaatggtgtcttaacgaaatcctggagagcgcagatgctcctctagaggtaacagaaggctttatccagagcatttccctgtccgtgccttggggttctcttctccaagacaattgcgccttggaagtgcgtggcctggaaatggtctttcgccctcgacctcgcccagcgacaggtagtgaaccaatgtactggagcagcttcatgacctcttcgatgcagctagccaaggaatgtctgagccaaaagctcactgacgagcagggtgaaggctcacagccatttgaaggattggaaaaattcgccgaaactatcgaaaccgtcttgcgacgagtgaaagtcaccttcatagatacagtgctcagaattgaacatgtcccagaaaattctaaaaccggaaccgcactggagatcagaatcgagcgaactgtatattgtgatgagaccgccgatgagtcctcgggaattaacgtgcaccagcctaccgccttcgctcataaattgcttcagctcagcggcgtcagcctgttctgggacgaattctctgcatcagcaaaatcgtccccagtgtgttccacggcccccgtggagactgagccaaagctgtctccctcatggaatccaaagattatttatgaaccacacccacaattaacgcggaacctccctgaaatcgcgcccagcgacccagtacagattggtaggctaatcggccgactcgaactgtcactcactttgaaacagaatgaggtccttcccggcgctaagctcgacgtggacggccaaattgattctatacacttgctactgtccccccgacaggtgcatctgctgctagatatgctggccgccatagctggcccagaaaacagcagcaagattggactggccaacaaggatcgcaaaaacaggccaatgcagcaagaagatgaatatagaatccagatggagctgaaccggtactatttacggaaggatagtctgtccgtgggtgtctcaagtgaacagagcttctacgagacagaaacggcgcggacaccatccagccgggaagaggaggtgttcttcagtatggctgacatggacatgtcccattctttgtcctccttgcctcccttaggcgaccctccaaacatggatcttgaattaagcctgacctcaacctacactaatacaccagctggaagccccctgtctgccacagttctgcaacctacctggggtgagttcctagaccatcacaaagagcaaccagtgagaggatctacctttcctagcaacctggtacaccctacccctctgcagaagacctctctgccgtcccgtagcgtcagcgtggatgagagtcggccagaactgatttttcggctggctgtgggcaccttcagcatctccgttctccacatcgaccccctatcaccaccggagacttcccagaacctgaatccactgactcccatggccgtggccttcttcacttgtattgagaagatagacccagctaggttctcaaccgaagacttcaaatcatttcgcgctgtctttgcggaggcgtgtagccacgaccacctgcggttcatcggcacaggcataaaggtgtcctacgagcagaggcaacgcagcgccagtagatacttttccaccgatatgtcaatcggccagatggaatttctggagtgcttgttcccaacagatttccactccgtgcccccccattatactgagcttctgaccttccacagcaaggaagaaaccggatcacacagccctgtatgtctgcagctccattataaacattcggagaacaggggcccacagggtaaccaggctagattgagttcagtgcctcacaaagcagagctccagatcaagcttaaccctgtatgttgtgaattggacattagcattgtggaccgattgaattctttgctccagccgcagaagcttgcgaccgtagaaatgatggcctctcacatgtatacctcatataataaacatatatccctgcataaggcgtttacggaggtcttcttagatgattctcacagccctgccaactgcaggatcagcgtccaggtggctacaccagcactgaatctgtctgttagattcccaatccccgatctcaggtctgatcaggaacgaggcccctggttcaaaaagagtttgcagaaagaaatcctgtacctggcgtttaccgatttggagtttaagacagagtttataggcggcagtactccggaacaaatcaagctggagctgactttcagggagctcatcggctcttttcaggaggagaaaggggatccgagcatcaagtttttccatgtgtcctccggagtagacggggataccaccagttccgatgatttcgattggccgagaattgtactaaagatcaatcctcccgccatgcactccattctcgagcgtatcgccgctgaagaggaagaggagaacgatggtcactatcaggaggaagaggaaggcggtgcccatagtctgaaagacgtttgcgatctgcggagacctgctccctctcccttttctagtcggcgcgtcatgtttgaaaatgagcaaatggtaatgcccggagatcccgtagaaatgacggagtttcaggataaagctatttctaatagccactacgtcctcgaactcactctgcccaatatttacgtaacgttgccgaacaaatctttttatgaaaaactctataaccggatcttcaatgacctactgctttgggagcctacagccccgtctccagtcgagacttttgaaaacattagttatggaattgggctgagtgtggcttcacaattaattaacacctttaacaaagacagcttttctgcctttaagagtgccgttcattacgatgaagagtctgggtccgaggaggaaactttacaatacttttctaccgtggatcctaactaccgaagccggaggaaaaagaaactggatagccaaaacaagaactcccagagcttcctaagcgtgttactgaacattaaccatgggctgatagctgtgtttaccgatgtgaagcaggataatggggatctgctcgaaaacaagcacggcgagttctggctggaatttaacagtggctcgctgttctgcgttaccaaatacgaaggatttgacgacaaacactacatctgcttgcattcctctagtttctcattgtaccataaaggcatcgtgaatggcgtgatattgccaacagagactaggcttcctagcagcactcgacctcattggcttgagcctactatatattccagtgaagaagacggcctgtctaagacctcatcagacggcgtcggcggggattcactgaacatgctgagtgtggccgtgaagatattaagcgacaagagcgagtctaacaccaaggagttcttgattgctgtgggtctcaaaggggccacgctgcagcaccgaatgttgcccagcgggctttcctggcatgaacaaatactgtattttcttaatattgccgacgagccagtgttgggttataatccaccgacatcttttactacattccacgtacatctgtggagttgcgctctggactataggcctctgtatctgccaatcagaagcctgctcactgtggaaactttcagcgtgtcttcttcagttgctctggataagagcagctctaccctgcggattattctggacgaagccgccctgcatctgagcgataagtgtaacaccgtgacaattaatctgagtcgcgactacgtgagagtcatggatatggggcttctcgaattgactataaccgccgtcaaaagcgactccgatggcgagcaaaccgagccaaggtttgagttacattgctcaagcgacgtggtccacatcagaacgtgcagtgacagctgtgcagctctgatgaaccttatccagtacattgcatcttacggtgacctgcaaacgcctaacaaggcagatatgaagcccggggcctttcagagacgctctaaggttgatagttcgggccgctcttcttctcggggccctgtgctgcccgaagcggatcagcagatgctccgggacttaatgtctgacgcgatggaagagatcgacatgcagcagggaactagtagcgttaagcctcaggcaaacggagtgcttgacgagaaatcacaaatacaggagccgtgttgttctgatctgttcctgttcccagacgagtctggcaatgtcagccaagagtctgggccaacttacgcctccttttctcaccattttattagcgatgccatgacaggagtcccaaccgagaacgatgacttctgcatcctgtttgcacccaaagccgcaatgcaggaaaaggaggaggaacccgtgatcaagattatggtagatgacgccatcgttatccgagataactacttttccctgcctgtgaataaaaccgatacctccaaagcgcctctgcatttcccgatccccgttataaggtatgtggttaaagaagtcagcctagtatggcatctctacgggggtaaggacttcggaatcgtccctccaacaagccccgccaagtcttacatctcaccccacagtagcccctcccacacccctactaggcatggcaggaacactgtctgcggtgggaagggccgcaatcacgatttcctcatggaaatccagctatctaaagttaagtttcagcacgaggtgtatccaccatgtaagcctgactgcgactcctctttgagtgagcaccctgtatctagacaggtgttcattgttcaggatctcgaaatacgcgatagactggcaactagccagatgaacaagttcctatacctgtattgcagcaaggagatgccccgtaaggcccactccaacatgttgacagtaaaggctctccatgtatgcccggagtccgggaggtccccacaagaatgttgtctccgagtatccctcatgccgctcagactgaatatcgaccaggatgctctgttcttcctgaaggatttctttactagtttatctgccgaagttgagctccagatgactcccgaccctgaagttaaaaaatcacccggagccgacgtaacatgttccctacctcggcatctgagcacctctaaggaacccaatctagtgatcagctttagcggtcctaagcagcctagccagaatgattctgccaatagtgtggaggttgtaaatggcatggaggaaaagaatttctccgcggaagaagcctcctttagggaccagccggtcttcttcagggaatttagatttacaagtgaagtgcccatcagactggactaccatggcaaacacgtgagtatggaccagggtactctagctgggatcttgattgggctggcccaactgaactgtagcgaactgaagttaaagcggctgagttacaggcacggacttttaggcgtggacaaattattttcatacgcaatcactgagtggctaaacgatattaagaagaatcagctgccaggtattctgggaggagtgggacccatgcattcccttgtgcagctcgtccagggtctgaaggacctcgtctggttacccatcgaacaatatagaaaggatggacgaatagtgcggggatttcagcgcggggccgctagttttggcactagtactgccatggctgcactagagttgactaaccgcatggtgcaaaccatacaggccgcagcggagactgcctacgacatggtcagtcccgggaccttaagcatagaacccaagaaaacgaaacggttccctcatcatcgactggcgcaccaacctgtagatctccgggagggtgtggctaaggcttacagtgtggtcaaggaaggcatcacggacacggcccagactatttatgagacggctgcgagagaacacgaatcacgaggggtaaccggtgccgtgggggaggtgctgcgtcaaattcccccagctgtggtcaaaccactaatagtcgccactgaggccacctcaaacgtgctgggcggtatgcgaaaccagatcagacccgacgtgaggcaggacgagtctcagaagtggcgccacggcgacgattag

SEQ ID NO: 196291 - DNA, 6237 bp, Artificial Sequence
  derived and/or modified sequence
atgccctggcccttcagcgagagcatcaagaagagggcctgccgctacctgctgcagcgctacctgggccacttcctgcaggagaagctgagcctggagcagctgagcctggacctgtaccagggcaccggcagcctggcccaggtgcccctggacaagtggtgcctgaatgagatcctggagagcgcagatgcccccctggaggtgacagagggcttcatccagagcatcagcctgtctgtgccctggggcagcctgctgcaggacaactgtgccctggaggtgcggggcctggagatggtgttccggccccggcccaggcctgccaccggcagcgagcccatgtactggagcagcttcatgaccagctccatgcagctggccaaggagtgcctgagccagaagctgacagatgagcagggcgagggcagccagccctttgagggcctggagaagtttgctgagaccattgaaacagtgctgcggcgggtgaaggtgaccttcatcgacacagtgctgagaattgaacatgtgcctgagaacagcaagacaggaacagccctggagatccgcatcgagaggacagtgtactgtgatgaaacagcagatgagagcagcggcatcaacgtgcaccagcccacagcctttgcccacaagctgctgcagctgagcggcgtgtccctcttctgggatgagttcagcgccagcgccaagagcagccctgtgtgcagcacagcccctgtggagacagagcccaagctgagccccagctggaaccccaagatcatctatgagccccacccccagctgaccaggaacctgcctgagatcgcccccagcgaccctgtgcagatcggccgcctgattggccgcctggagctgagcctgaccctgaagcagaatgaggtgctgcccggggccaagctggatgtggatggccagattgacagcatccacctgctgctgagcccccggcaggtgcacctgctgctggacatgctggccgccatcgccggccctgagaacagcagcaagattggcctggccaacaaggacaggaagaaccggcccatgcagcaggaggatgagtaccgcatccagatggagctgaaccgctactacctgaggaaggacagcctgtctgtgggcgtgagcagcgagcagagcttctatgaaacagaaacagcccggacccccagcagccgggaggaggaggtgttcttctccatggctgacatggacatgagccacagcctgagcagcctgccccccctgggggacccccccaacatggacctggagctgagcctgaccagcacctacaccaacaccccagctggcagccccctgagcgccaccgtgctgcagcccacctggggcgagttcctggaccaccacaaggagcagcctgtgcggggcagcaccttccccagcaacctggtgcaccccacccccctgcagaagaccagcctgcccagccgctctgtgtctgtggatgagagcaggcctgagctgatcttccggctggccgtgggcaccttcagcatctctgtgctgcacatcgaccccctgagccccccagagaccagccagaacctgaaccccctgacccccatggctgtggccttcttcacctgcatcgagaagattgatcctgcccgcttcagcacagaggacttcaagagcttccgggctgtgtttgctgaggcctgcagccatgaccacctgcgcttcatcggcaccggcatcaaggtgtcctatgagcagaggcagaggtctgccagccgctacttcagcacagacatgagcatcggccagatggagttcctggagtgcctcttccccacagacttccacagcgtgcccccccactacacagagctgctgaccttccacagcaaggaggagaccggcagccacagccctgtgtgcctgcagctgcactacaagcacagtgaaaatagaggcccccagggcaaccaggcccggctgagctctgtgccccacaaggccgagctgcagatcaagctgaaccctgtgtgctgtgagctggacatcagcatcgtggaccggctgaacagcctgctgcagccccagaagctggccaccgtggagatgatggccagccacatgtacaccagctacaacaagcacatcagcctgcacaaggccttcacagaggtgttcctggatgacagccacagccctgccaactgccgcatctctgtgcaggtggccaccccagccctgaacctgtctgtgcgcttccccatcccagacctgcggagtgaccaggagcggggcccctggttcaagaagagcctgcagaaggagatcctgtacctggccttcacagacctggagttcaagacagagttcatcggcggcagcaccccagagcagatcaagctggagctgaccttccgggagctgattggcagcttccaggaggagaagggggaccccagcatcaagttcttccacgtgtcctctggagtggatggagacaccaccagcagtgatgactttgactggccccgcatcgtgctgaagatcaaccccccagccatgcacagcatcctggagagaattgctgctgaggaggaggaggagaatgatggccactaccaggaggaggaggagggcggggcccacagcctgaaggatgtgtgtgacctgcggcggcctgcccccagccccttcagcagccggcgggtgatgtttgaaaatgagcagatggtgatgcctggggaccctgtggagatgacagagttccaggacaaggccatcagcaacagccactacgtgctggagctgaccctgcccaacatctacgtgaccctgcccaacaagagcttctatgagaagctgtacaaccgcatcttcaatgacctgctgctgtgggagcccacagcccccagccctgtggagacctttgagaacatctcctatggcatcggcctgtctgtggccagccagctgatcaacaccttcaacaaggacagcttcagcgccttcaagtctgctgtgcactatgatgaggagagcggcagcgaggaggagaccctgcagtacttcagcacagtggaccccaactaccgcagcaggaggaagaagaagctggacagccagaacaagaacagccagagcttcctgtctgtgctgctgaacatcaaccacggcctgattgctgtgttcacagatgtgaagcaggacaatggagacctgctggagaacaagcatggagagttctggctggagttcaacagcggcagcctcttctgtgtgaccaagtatgagggctttgatgacaagcactacatctgcctgcacagcagcagcttcagcctgtaccacaagggcatcgtgaatggagtcatcctgcccacagagacccggctgcccagcagcacccggccccactggctggagcccaccatctacagcagcgaggaggatggcctgagcaagaccagcagtgatggagtgggcggggacagcctgaacatgctgtctgtggccgtgaagatcctgagtgacaagtctgagagcaacaccaaggagttcctgattgctgtgggcctgaagggggccaccctgcagcacaggatgctgcccagcggcctgtcctggcatgagcagatcctgtacttcctgaacattgctgatgagcctgtgctgggctacaacccccccaccagcttcaccaccttccacgtgcacctgtggagctgtgccctggactaccggcccctgtacctgcccatccgcagcctgctgactgtggagaccttctctgtgagcagctctgtggccctggacaagagcagcagcaccctgcgcatcatcctggatgaagctgccctgcacctgagtgacaagtgcaacacagtgaccatcaacctgagccgggactatgtgcgggtgatggacatgggcctgctggagctgaccatcacagctgtgaagagtgacagtgatggagagcagacagagcccaggtttgagctgcactgcagcagtgatgtggtgcacatccgcacctgcagcgacagctgtgccgccctgatgaacctgatccagtacatcgccagctatggagacctgcagacccccaacaaggctgacatgaagccaggggccttccagaggaggagcaaggtggacagcagcggccgcagcagcagccggggccctgtgctgcctgaggccgaccagcagatgctgcgggacctgatgtctgatgccatggaggagattgacatgcagcagggcaccagctctgtgaagccccaggccaacggggtgctggatgagaagagccagatccaggagccctgctgcagcgacctcttcctgttcccagatgagagcggaaatgtgtcccaggagagcggccccacctacgccagcttcagccaccacttcatcagtgatgccatgactggagtgcccacagaaaatgatgacttctgcatcctgtttgcccccaaggccgccatgcaggagaaggaggaggagcccgtcatcaagatcatggtggatgatgccatcgtcatccgggacaactacttcagcctgcctgtgaacaagacagacaccagcaaggcccccctgcacttccccatccctgtgatccgctacgtggtgaaggaggtgtccctggtgtggcacctgtatggaggcaaggactttggaattgtgccccccaccagccctgccaagagctacatcagcccccacagcagccccagccacacccccaccaggcatggaagaaacacagtgtgtggcggcaagggcaggaaccacgacttcctgatggagatccagctgagcaaggtgaagttccagcacgaggtgtacccaccctgcaagccagactgtgacagcagcctgtctgagcaccctgtgtcccggcaggtgttcatcgtgcaggacctggagatccgggaccggctggccaccagccagatgaacaagttcctgtacctgtactgcagcaaggagatgcccaggaaggcccacagcaacatgctgactgtgaaggccctgcacgtgtgcccagagagcggccgcagcccccaggagtgctgcctgcgggtgtccctgatgcccctgcggctgaacatcgaccaggatgccctcttcttcctgaaggacttcttcaccagcctgtctgctgaggtggagctgcagatgaccccagaccctgaggtgaagaagagccctggagcagatgtgacctgcagcctgcccaggcacctgagcaccagcaaggagcccaacctggtgatctccttcagcggccccaagcagcccagccagaatgattctgccaacagcgtggaggtggtgaatggcatggaggagaagaacttctctgctgaggaggccagcttccgggaccagcctgtgttcttccgggagttccgcttcaccagcgaggtgcccatccggctggactaccacggcaagcacgtgtccatggaccagggcaccctggccggcatcctgattggcctggcccagctgaactgcagcgagctgaagctgaagaggctgagctacagacatggcctgctgggcgtggacaagctgttctcctatgccatcacagagtggctgaatgacatcaagaagaaccagctgcccggcatcctgggcggcgtgggccccatgcacagcctggtgcagctggtgcagggcctgaaggacctggtgtggctgcccatcgagcagtacaggaaggatggaagaattgtgcggggcttccagagaggagctgccagctttggcaccagcacagccatggccgccctggagctgaccaacaggatggtgcagaccatccaggccgctgctgagacagcctatgacatggtgtccccaggcaccctgagcattgagcccaagaagaccaagcgcttcccccaccaccggctggcccaccagcctgtggacctgcgggagggcgtggccaaggcctacagcgtggtgaaggagggcatcacagacacagcccagaccatctatgaaacagctgcccgggagcacgagagcagaggagtgactggagctgtgggggaggtgctgcggcagatccccccagctgtggtgaagcccctcatcgtggccacagaggccaccagcaatgtgctgggcggcatgaggaaccagatccggccagatgtgcggcaggatgagagccagaagtggaggcatggagatgactag

SEQ ID NO: 196292 - DNA, 6237 bp, Artificial Sequence
  derived and/or modified sequence
atgccctggcccttcagcgagagcatcaagaagcgggcctgccggtaccttctgcagcgatatctggggcattttctgcaagaaaagctgagcctggaacagctttccctggatctgtaccaaggtaccggtagcctggcccaggtgccgttagataagtggtgccttaatgagatcttggagtccgccgatgctccccttgaggtgaccgaaggattcatccagagcatctctctgagtgtcccctggggatccctgttacaggataactgcgccctggaagttagagggttggaaatggttttcaggccacggccacgccccgcaacaggcagtgaacccatgtattggagttctttcatgactagctctatgcagctcgctaaggaatgtctgtctcaaaagcttaccgatgagcagggggaggggagccagccctttgaaggactagagaaattcgctgagacaatcgaaacggtgcttcgtcgcgtgaaggttacatttatcgacaccgttctgcggattgaacatgtgccagaaaacagcaagactggcactgctctggaaatccggattgagagaacagtttattgcgacgaaacagcagacgagtcttctggtatcaacgtgcaccagcctaccgcattcgctcataagctcctacagctcagtggagtgtccttattctgggatgagttttctgcttccgcaaagagctcccccgtgtgcagtacagccccagtggagaccgaaccaaagctgtccccctcctggaacccaaagattatatacgagccgcacccacagctgaccaggaacctcccagagattgctccatcagatcccgtacagattggccgcctgataggtaggttggaactctctttgacactgaaacagaatgaggttctgccaggcgcaaaattggacgttgacgggcagatagatagcatccacctcttgctgtcaccccgccaggtgcatttgctgctcgatatgctagctgccatcgccggtccagaaaattcatctaagatcggcctggccaataaagaccgaaaaaaccgtcccatgcagcaggaagacgagtaccgcatacagatggagctcaatagatattatctgcgaaaagacagtctatctgtgggagtttcgagcgagcagtccttctatgagacagagacagcaaggacgccctctagcagagaagaggaggtgtttttctccatggcggacatggatatgagccacagcctgagcagccttcccccactgggagatccacctaatatggacctggaattgtctctcacctccacatacactaatactcccgcaggtagcccattgtcagcaactgtcctgcagccaacttggggcgaatttctagaccaccacaaagagcaaccagtgcgggggtccacatttccgagcaacctcgtccaccctacgcctctgcagaaaactagcctgccttctagatccgttagtgtagacgagtccaggccagagttgattttccggctggctgtggggacgttcagcatttctgtattacatatagatccattgtcccccccagagacatcacaaaacctgaatccactcaccccaatggccgttgcgtttttcacttgtattgagaagattgacccagcacggttttccaccgaggattttaagtcttttagggcagtctttgccgaggcatgtagccatgatcatctgcgcttcattgggactggcatcaaagtatcatacgagcaacggcagaggagtgcatcacgttatttctcgacagacatgtccattgggcagatggaatttcttgagtgcctctttccaaccgactttcacagtgtgccgccacactacacagagttgcttacatttcactcaaaggaagagacggggtcccactctcccgtttgtttacagctccactataaacacagtgaaaaccgcgggccccaagggaatcaggcaaggctgtcctctgtgccccataaagctgagctgcagataaaactgaatccggtgtgctgtgagctggacattagcattgtggaccgactgaactcattactccaacctcagaaactcgcaaccgttgaaatgatggcttcgcatatgtatacaagctacaacaaacacatatctctgcacaaagctttcactgaagtttttttggacgatagccatagtccagcaaactgtcggatctccgtgcaagtagccactcccgcgttgaatctcagcgtgcggtttccaatccccgacttacgttctgaccaagaacgggggccttggttcaaaaagtcacttcagaaagagatcctgtacctggcctttactgacctggagtttaagacagaattcattggcggcagtacccctgagcagatcaagctcgagttgactttccgtgagctgataggctcttttcaagaggagaagggagacccctcgataaagtttttccacgtgtcctccggggtagatggtgacacaactagctccgatgatttcgattggcctagaattgtgctgaagataaatcccccagctatgcactctatattagagagaattgcagccgaagaggaggaggagaatgatggacattatcaggaggaggaggaaggcggggcacacagtttgaaagatgtctgtgatttgcggaggccagcacctagcccattttcgtcacgtcgtgtgatgtttgagaatgaacagatggtcatgcctggcgaccctgtagaaatgactgagtttcaggacaaagcaatatccaactcacactatgtactagagctgacgctccccaatatctatgtcaccttacctaataagtcgttctacgagaagttgtacaacaggatattcaacgatctgctgctttgggaacccactgccccgagccctgtcgaaacctttgaaaatatctcctatgggatcggtctctcagtggccagccaactcatcaacacctttaataaagacagtttctcagccttcaagagtgcggtgcactacgacgaagagtccggaagcgaagaagagacgctgcaatactttagcaccgttgaccccaactaccgtagtcgcagaaagaaaaagcttgacagtcagaacaaaaattcccagagctttctgagcgtgctactcaacataaaccacggtctgatcgctgtgttcacagatgtgaaacaggataacggagatcttctggaaaataaacatggggaattctggctggagtttaattccggcagccttttctgcgtaacgaagtatgagggattcgatgacaagcattacatctgtcttcactcctcatcatttagtttgtaccataaaggtattgttaatggtgtcatcttgcctacagaaacccggctgccctccagcaccaggccacactggctagagcctaccatttacagctcggaggaggatggcctgtcaaagacaagctcagacggcgtgggcggggacagcctgaacatgttgtccgtggctgtgaaaatcctaagtgacaagtcagaaagcaacacgaaggagtttctaattgctgttggcctgaaaggggccacactccagcatcgaatgctcccgtcaggccttagctggcatgaacaaattctttatttccttaacatcgcagatgaacccgtcttgggatataatcccccaaccagttttacaacgttccatgtacacctttggagttgcgcgctagactacagacccctgtacctccccatccggtcactacttaccgtagagaccttttccgtgagctctagtgtggccttagataagtccagctcaactctgcgcatcatcctggacgaggctgccctgcatctgagcgataagtgtaacaccgttaccatcaatctgagcagagactacgtcagagtgatggatatgggcctgctcgagctaacaatcacagccgtcaaatcggacagcgatggcgaacaaaccgaaccacggtttgaactccattgtagctcagatgttgttcatattcggacctgcagtgactcgtgtgcagccttgatgaatctgatccaatatatcgcatcttacggagacctgcagacccctaacaaagccgacatgaaacccggcgcttttcagagacgaagcaaggttgactcttctggccgctcttcatcccgggggcccgtcctgcctgaggcggaccagcagatgttgagggatcttatgtctgatgccatggaggagatcgatatgcagcagggcacctcttcggttaagcctcaagcaaacggcgtgcttgatgaaaaatcacagattcaggagccctgttgctctgatctattcttgttcccggatgagagcggaaacgtgagccaggagagcggacccacatatgcctccttcagccatcacttcatcagtgacgccatgactggagtgcccaccgaaaacgacgacttctgtatcctatttgctcctaaggccgccatgcaggagaaggaggaggaaccagtcataaagattatggtcgatgatgccatagtgatccgagataactacttctctcttcctgttaataagaccgacacatccaaagctccgcttcacttccctatcccagtaatacggtatgtggtgaaagaggtcagccttgtgtggcacttatacggtggtaaagactttggcatcgtgccgccaacaagtccagcgaaaagctacattagccctcatagcagtccatcacacacacccaccagacacgggcggaacaccgtctgcgggggtaaaggcaggaatcacgactttcttatggagatccagctgagtaaagtgaaattccagcatgaagtgtacccaccctgtaagcctgactgcgattcctccctgtctgagcatcccgtctctcggcaggtgttcatcgtgcaggatctcgaaatccgagaccgcttggctacatctcaaatgaataagttcctgtatttatattgctctaaggaaatgccaaggaaggcacattctaatatgctgacggtgaaggccctgcacgtgtgccccgaatctggcaggtccccgcaggagtgctgcctgcgagtttccctgatgccgctccgcctcaacattgaccaggatgctctgttcttcttgaaagacttcttcacaagtctcagtgctgaagtcgagctgcaaatgacccccgacccggaggttaaaaagtccccaggcgccgatgtcacttgttccctgcctcgccaccttagtactagtaaagaacccaatttagtgatttctttcagcgggccgaagcaaccttctcagaatgattcagctaacagcgtcgaagtggttaatggaatggaggaaaaaaatttctcagcagaggaggcctcatttcgcgatcaacccgtgttcttccgtgaattcaggttcacaagtgaggtcccgatcagactcgactaccatggaaagcatgtgtctatggatcagggtacactcgctggtatcctcatcggactcgcccagctgaactgttcagaactcaagctgaagagactgagttaccgacatggcctgctcggcgtggacaaacttttttcatatgccataaccgagtggctgaacgatatcaaaaagaaccagttgcctggaatcctcggtggggtgggcccaatgcacagcctggtgcagttggtccagggcctgaaggatctggtgtggttgcccattgagcagtaccgcaaggacggacgaattgtgaggggtttccagcgaggtgcagcctcattcggtaccagtacagcaatggcggctttggagttgaccaataggatggtgcaaacgatccaggcagcagccgaaactgcttatgatatggtgtcacccggaaccctcagcatcgagcccaaaaagactaagagattcccacaccatcgactagctcaccagccagtcgacctgcgcgaaggggtggctaaggcttatagcgtggttaaagaaggaatcactgatacagcgcagactatttatgagacagctgcgagggaacacgaaagcagaggggtgaccggagctgtgggagaagtgttgaggcaaattccaccggctgtcgtgaagccacttattgttgccacagaagctacaagcaatgtgcttggaggcatgaggaaccagattcggcccgacgtacggcaggacgagtctcagaagtggcggcatggtgacgactag
